United States Patent Application Publication US 2017/0114356 A1 - sequence listing, part 10

SEQ ID NO: 11667 - DNA, 1516 bp, Zea Mays
caaacacgcccttggagaccttcccctgccgcggcgaggacaccgcttgctttcacggccgacgacctaatccccttccctcccattggcagccgtcgccatgctgcgcgtccgaaatcggctcctccctctgctcggcgccgcctccccgcttccctcccccatccacatccacctccgcgtgtgccgcctcctctccacctccacctctacggccaccgtccccgcacccttctcccttgagaactacctcgtcgccgcctgcggcttcgcacccgcccaagctcgcttggtgtccaagaaggcgttcaacgagttgtccagggaatccaagagatcatcggaggagcactcctgcagacgcctcatctccgcctccaacccagatgccatcctcgcgctgctctccggcgccggcctctcccgcgccgacatcgccgccgtcgtctttgcggacccgctgatcctccgcgcttccgtgagtaaaatcgcaccccgccttgtcgctctccgcgaccgcgtcggcctgtctactccccagatcgctcgcttcctcctggtcggctcacgcgctctccgccggtgcgacgtcgttcccaaggttgagttcttcttgtccttcttgggctcctttgatcgggtactggcggtcgcaaaggcaaacttgggcatcttcaacgcgaaccttgagaaggtaataaagcccaacatagacttgtttcgtcaacgcggcgttcgaaacgtccctaagatctgtctccaccgcccacggacgctttcctttaacctcgaacgcgtgaaggaatttttgctgcgggcagaagaacttggggtgcctgccgcgtcgcccttgttcatgcaagcagtgggagtcgtcaccagttttccccctgagaaggttgctgccaaacttgacttctttaagaggactcttggttgttctgagtctgaggtttcgaatgcagtgtccaagatgccacaaatactagcattgtctgaggcgactcttcttcgcaagatcgagttcctggtcaatgagggggcgatagagccacagtatattatgcaaaggcctatcctgctcgcattcagcttggagaagcggctagtgccccggtatcgtgtcatcaaagtgctgcagggaaagggattgctgaatagcaacatgagcctttcctcattagcttctcttgcagaagaaaccttcaagtccaagttcgtcgactgccacaaggactgtgttcctggccttgcagatgcttatgctgcagcttgtgctagtattgtgccctcgacagtggttacggatcatgagctgatgtaaccactgatgccctctgttctgagctgtcgctggaatgatgtaaccaccgatgccctctgttccgagctgccgctgaaattctagatctctaaacttgtgtgatcgattgccaaattagttgatttggaagtgttgcccatctgaaccacgtcatttctactgctaattagttgcctccgcgtatgtatgctg

SEQ ID NO: 11668 - DNA, 1832 bp, Zea Mays
caaacacgcccttggagaccttcccctgccgcggcgaggacaccgcttgctttcacggccgacgacctaatccccttccctcccattggcagccgtcgccatgctgcgcgtccgaaatcggctcctccctctgctcggcgccgcctccccgcttccctcccccatccacatccacctccgcgtgtgccgcctcctctccacctccacctctacggccaccgtccccgcacccttctcccttgagaactacctcgtcgccgcctgcggcttcgcacccgcccaagctcgcttggtgtccaagaaggcgttcaacgagttgtccagggaatccaagagatcatcggaggagcactcctgcagacgcctcatctccgcctccaacccagatgccatcctcgcgctgctctccggcgccggcctctcccgcgccgacatcgccgccgtcgtctttgcggacccgctgatcctccgcgcttccgtgagtaaaatcgcaccccgccttgtcgctctccgcgaccgcgtcggcctgtctactccccagatcgctcgcttcctcctggtcggctcacgcgctctccgccggtgcgacgtcgttcccaaggttgagttcttcttgtccttcttgggctcctttgatcgggtactggcggtcgcaaaggcaaacttgggcatcttcaacgcgaaccttgagaaggaatttttgctgcgggcagaagaacttggggtgcctgccgcgtcgcccttgttcatgcaagcagtgggagtcgtcaccagttttccccctgagaagtgtccaagatgccacaaatactagcattgtctgaggcgactcttcttcgcaagatcgagttcctggtcaatgagggggcgatagagccacagtatattatgcaaaggcctatcctgctcgcattcagcttggagaagcggctagtgccccggtatcgtgtcatcaaagtgctgcagggaaagggattgctgaatagcaacatgagcctttcctcattagcttctcttgcagaagaaaccttcaagtccaagttcgtcgactgccacaaggactgtgttcctggccttgcagatgcttatgctgcagcttgtgctagtattgtgccctcgacagtgtaagttaagccgtttcaaaaacaaaaacagtgtaagttaagcttctcattttgtgttttaggtggatgctcattggctgctgtccactctgcaattttgatttctgaagtatataaccactcatgatcactgattggtcatatccaaggtttaagttatggacttgtggttattgatgaaaggagctgtgtttggcttgttctggatgcttaatgcacgttttgttggtttcatcttctgcctagcacatggcctaagattatccttaacttcgttgtcttccgtggatcagtctttgatgtagagcagtatctgtaagggaatgagatgctgacagaatctaagtcttaaaactttttattactaccattttgtttactttttttttgttttaagtaggaattatcttggaactatttctacttttgtgcctttgcatgatagtagcaggcatagtgctatttataaagtttagcaactgatatggcagggttacggatcatgagctgatgtaaccactgatgccctctgttctgagctgtcgctggaatgatgtaaccaccgatgccctctgttccgagctgccgctgaaattctagatctctaaacttgtgtgatcgattgccaaattagttgatttggaagtgttgcccatctgaaccacgtcatttctactgctaattagttgcctccgcgtatgtatgctg

SEQ ID NO: 11669 - DNA, 295 bp, Zea Mays
caacaacaaccgcgtgatcaccgtaactacctcctcgtaagtatcgcagccgcggtagacttctcccccacggcgcggactcaccatggcccataaatgcacagcgcggacccccctgtatctccctaccgtgagttctaccctactcgtgctcgaggacaccatcgccggccaccacagcaaagtgaggggagctcgggttccgccgtgggagattgtgcactcaccggtttacgccgcggactcgttcgccgccgtggtcagagcttcaccgcaagcgattcgtgtgaggtca

SEQ ID NO: 11670 - DNA, 2306 bp, Zea Mays
ctgacctgagataagcaaacgcacacctgcggtgcgggctgcggctccgctcatcgctgccagccagtccaggtcactgcctccctcgttccacaccatgccagcggccgctctcgccgtgcgggtggccgccgtcctgctcctcctcgcccgaggcggatccggatcggcgcccggggagttcgtgctcagtggcttcgcgagcggcaacgtcacgaccagcggcgcggccgtcgtcacctcctccggcctcctgcagctcaccaacgcgaccaacgaggtgttcgggcacggcttctaccccgtgccgctccgcttcaaggacgcctcctccacgccgcgctccttctccaccaccttcgtgttcgccatggtgccgcggcacgacgacgcgcacggccacgggatcgccttcgcgctggcgccgtcgccgaccgtgcccggcgcggtggccgggaagaacctcggcctgttcaacacgtccgacgacacggggaaggccaggagcggggtcgtcgccgtcgagctcgacacggccaaggacgaggagtttagcgacatcaacgacaaccacgtcggcatcgacgtcaacagcctggtgtccgtgagctcagcgccggcggcgtacgtcgacgccggcagcctagtcaacatcagcctggtcagcggggagcccctgcaggcgtgggtcgagtacgacggcgcgagcatgcgcctggaggtgacggtggcgccggcgcgcaagcccaggccggctgtcccgctcgtgtcttccatcgtcaacctctcgtcggccgtggccgacgacacgtacgtcgggttcacggcggcgaacggcgcggcctccacctctcactacgttcttggctggagtttccgcctaggcgacggacgcgcgacggacctcgacgcctcgaagctgccgccggtcccatcgtccaagaagaagacgtcgcggctaaacttggtcacgctgtccctcgttgtcgtcgtggcactcctcttagcgtcggtggcagtcgcagctctcgtggtcaggcaccggcggttcgccgaggagcaagaggactgggagatacagtacgggcctcaccggatcagctacaaggacctgcacgcggccacgagggggttccgcgacgccatcggccaaggcggcttcggccgcgtgtaccacggcgtgctacagcggccggtgaacgccgaggttgccgtcaagaaggtgtcccacgactcccggcaagggctgcgcgagttcgtgtccgagatcgcgagcatgagccggctgcgccaccgcaacctggtgcagctcctcgggtactgccggcggcggggcgagctggtactcgtctacgactacatggtcaacggcagcctcgacaggcacctgttcgacgccggcaagccggcgctgagctgggagcagcgcggcaagatcgtccgcgacgtcgccgccgggctgctgtacctgcacgagggatgggagcaggtggtggtgcaccgcgacatcaagtccgccaacgtgctcctcgacgccgacatgaacggcaagctcagcgacttcggcctcgcgcggctgtacgaccacggcagcaacccgcagacgacgcacgtcatcgggacgctggggtacctcgcgccggagatgagcaagacggggaaggccaccacaagcaccgacgtgttcgcgttcggcgccttcctgctcgaggtggcgtgcgggcggcggcccatggagcgcgacgacgaccttgattcgcccgggctcgtcgacctcgtcctcgagtgctggaaggcgcagcgccggtgccagagacaccgcccaaagatctagccagcaacagcaggttgttctacggatacagcgagtctttcgacgagttcgccaccatgttcccggcgacgtcggaggtcaccagcgtcaccacgcagccgtcttcctcacactccaccggcgaggggcagcaggtctcctccgaacaaatcaccaacgtatagtcatgtgttttacgatggttgggttaggaagcaaacagtgatcataggtttaggtgttgtgtgatattttcttcaagtgaatataggatatggtcagccattttgtagggatgaccacaaaaacaaagttagataaagctccaacagattgaactattcctcgcttgtttcatcatggagagagcaagaaggtgaaattcttcattcaggtaaggagtcatatacgaatctcaaaagaaataataatatggcatcgaaatttctgtaaagaatcggaatccatgcagtcaccttcgcttaaaaggacc

SEQ ID NO: 11671 - DNA, 5254 bp, Zea Mays
aaaatgcttgctaatagattgggaccctatctgcaggagttggtggcatctaatcagagtgcctttgtgagaggccgatcgattcacgataactttatgttggtgcagcattcaattaaatctctccacaagaagagagtctctagtttgctcttgaagctggatatctccaaagcatttgactcggtctcttgggccttcttgcttgaagtgctttcatatcttgggtttggtcctgtgtggcgaaatatgatctccaatattctggcctcttcttctacgcaagtgcttttgaatgggtctcctggaattcctattaggcaccggagagggcttcgccagggtgatcctctctctccaatgttgttcgtattggttatggatattctcaacagtctgtttaacctggctgaaaatagggggctgctgcacagcttggagggtgctaatatccgtaacagactgtccatttatgctgatgatgtggtcctttttgttcaaccttttgaggaagattttcaatgtgtcaaaacgattttggactgctttggttcagccacgggattggtatctaatttgcaaaaaagttttgttatcccaatcaggtgtaatgagcaggcggtacagatgggctgcaatactcttcagtgcactgcttcctcctttccttgcacttatttgggactgccactttcagataaaaagctcagaaaatctgatctcatggtttgggtcgagaaagttgcagaccgacttcctaattggaaggctcggttgcttagtttcgctggcaggacaactatggtgcgctttgtgctttcagccatcccgatctaccttctcattgcaatgaaaatccccaagtgggtgattaattctatagataagattcggagaggatttatttggaaaggaagaaaggaggtaaatggtggcaattgccttgtgtcgtgggacattgttacaaggcctttggatctcggtgggcttgggatttctaacctgctgtaccagagttgggcgctgcaagctaaatggctatggctagaaaaaactgatcctaccaagccgtggtctggtttggacttgcctattcaacaaattgtcaagagattctttactgcttctattgtttctctggttggtaatgggcataatactttattttggacagatcggtggttggatgggtcttgtatccaagattttgcccctgctgttgtggctaatgttgggaaacgagctatttcttctagatcggtggcccatgctcttcagaattggcagtggatcagtgacattgagacccctcttagtttgcttgggctgcagcaatatcttagcctttgggatgctttaaggggagtggtgctcactcaggaggcggatcgacatgtgtggattcattcttcctctggtcagttctcttcgaagtcgtgttatagggcatttttcatgggttcgattaccttcgaaccatggaagaggttatggaagacttgggctccacccaaatgcaaattttttctttggttggcaataagaaataaatgttggacagctgatagactgcagaaaagagggttggcttatcctgaggtttgtcctttatgtgatcaagattcggagaatatccaacacctcctttgcacttgcatttttgcgcggcaattttggttctacattctctcttccttggggctggctaatctttctcctgcctctaatgagtccaattttgctgactggtgggagaaggtgtgtaagcaagtgcacaaatccaaaagaagaggctttaacagtatcatcatcttgggggcttggtgtttatggctgcatcgtaataaggcggtttttgatgacgtcaggccttcttttcagggaataaaatcagtttttctggatgagtttgagtgttggaggcttgccggtgctagacatcttgaggctttgggtcctggtgctgcaattttcagatcaagggttctattgggggcttagtgaagagaagttgtgtgggtgtgcggcctgctgacacttgtgctgctgtcctgtgcagagggcagctgcattcctgtgcgtagcatgtattagtggtcttgtgtttggtcaggttttggtggtcttgtgtttggccttttgtgccattgtactttggtccattttggactgtttcttctcttaatttaatgatgcgcagctctcctgcgcgttcacgaaaaaaaaaattatgtatagggtagcatgagttgtttttgtgatctggttttgttgttcggcccctaatatttgaagggctcagtctagctgatggtataatgtgagccctaagttattttacctgtgcttatcttgtagggcatcagaagactttcattacagttcagcaggttaataattaaactgccctgtgttttgggtctgctggtctccactccccagacgatagcattggatcctcttgctcaacaagatctgacaaccgatatgtctctagatcgttgtatggtgcgacttgcattggccctacacaacgactgagggcatagtttcccaatgcttttatctagaatcaagttccgctgtttggtttcagttaccaaattccttgaaaatgctttttaagggcttgttcggttgtgtctagatcgaaggggattgaggaaggttacgttctatttaattttgactagcgaaggatttaattccctctaatccccttcgatcgagacgtaaccgagtaagccttaagatgtgtaggctgtggcttgtgttactgaaccagaggattgctagcgtctgaatttttcgttgttcggagtagtgtctgaaaggtacgaggatgttatggactctttaagcagggatgcgggatgcgtacggttgcaagctattggggcgatgctggagcaaataaagtgatgcagtttgcttgcagattttcagatgttttttttgcagggcaagtacatacttctgggccacagattgtacgtgcgtctagaagaggcaaagcaagggtaacataacatccccatccacggccatggtcaaacggacggctcaaatctgcccaaactgttgaagttgcagttcaactagaaagctggaccatttcagagttgaaagtaatactgttctaaaaaaattgcgagtggcacatggttttgggtcgcatgcacgacctcgtcaaccaccattgtaccaaccactagcatgcagatcttgtcttttacaacaacaacaacaaaaattttaagtacagactgtggaatcatcctcacccgacagagaacgtggtgatgcttttacgcgtcaaaaaacaccaaagctccaaaattatgacacaagggctcgtagttttatttgaactttattttgtctgacgacaacggaggtgttcgaatcggccgttgggagcgcacagtataaacgagcgaacaccaagtcacgaaccttccgcttccccttcccctcaccgtgctgcgctgtttacgcccgcgtccccttccgtttccgttccattcgcctatcgtaccccctctccgtctctcgtcatcgtcggcccgtcgcagccacctccatcggcctccgatccctccacgagcctccggtcgaatccgaggagcaggatccgcggcggcgggcggcggtcgcccggcgatggcgcaccgtatggacaacgagtacgactacctcttcaagatcgtgctcatcggcgactccggcgtcggcaagtccaacatcctctcccgattcacccgcaacgagttctgcctcgagtccaagtccaccatcggcgtcgagttcgccacccgcaccctgcagtgtaaactgggccttatgtgatgccgatcgagtgatcagcgtgctgctctcagctggcgtgcccatgagcttatcccacacgctaaagctggagccgggctactatggcaaagccatctttcccgtgaaggtgcgggcgtcagcggagaaggtggccggctcatctgcatggtccggaggccaagcatcggatggccgaggagtgcctaagtcgagctgaaggctgtaccggaggccacaacccgttcttgatgatcttcaactatctgtgcatgtcttgaactggagcaagctcggggtttcacagatgcagacttatgggtacgacaaactgatgttcgccggtcagctggtgaagtgcaaccttattgcatcgttcattgtcatgagggagggtgcttggctgctcgcgccgctcgtcggcagcatcaccaagcagcacaacaacttcgcctgcaggatgtgcgagcacggagcacctcgtatgatacatgtgcacgcgagcatgaagatgaaggaaccctgctgctacatctaggttgaagggaaaaccatcaaagcccaaatatgggatactgctgggcaagagaggtaccgtgcaatcacaagtgcgtactacagaggagctgtgggtgcacttctagtctacgacatcacgaagaagcagacattcgaaaacatacagaggtggcttcgtgagctccgcgaccacgccgactccaacattgtgatcatgatggttggtaacaagtccgacctgaaccacctgaggtcggttgcagaggaagacgggcaggcattggcagagaaggaaggcctatccttcctcgagacatccgccctcgaagcgctcaatgtcgagaaggcgttccagaccgtcctctctgatattcaccaaatcataagcaagaaggcacttgcagcccaagaggcagcaggcagtgggcctccaggtcaaggaaccaccatcaacatcgcagacccatctgccaacacgaagagagggtgctgctcttcataagtaggtgcaaacaaagacatgctgctgcttctgcgaaaagaaaaccccccggtggatcatacaacacttttgttatgtagttgaccccttttggcctgtaactctggtgggttgtaatcacaattcatactcctgcaaagaaattctcctctcgggtagatacgatgtgtagtttcgagattttggtagaggccaatgtttggctggcagacttcgggtggagtccagcctcgtgttttctttcaatgttcttctacctcggtagtcttctgctggaaaaaaaaacatgatcagatacgttcttgtatttctacctgagtttgttgtattgtctccggtatattatatatacactaaaaactttgattcctgtgctacaacatgtatccgtgttgcttgtttgcg

SEQ ID NO: 11672 - DNA, 4716 bp, Zea Mays
aaaatgcttgctaatagattgggaccctatctgcaggagttggtggcatctaatcagagtgcctttgtgagaggccgatcgattcacgataactttatgttggtgcagcattcaattaaatctctccacaagaagagagtctctagtttgctcttgaagctggatatctccaaagcatttgactcggtctcttgggccttcttgcttgaagtgctttcatatcttgggtttggtcctgtgtggcgaaatatgatctccaatattctggcctcttcttctacgcaagtgcttttgaatgggtctcctggaattcctattaggcaccggagagggcttcgccagggtgatcctctctctccaatgttgttcgtattggttatggatattctcaacagtctgtttaacctggctgaaaatagggggctgctgcacagcttggagggtgctaatatccgtaacagactgtccatttatgctgatgatgtggtcctttttgttcaaccttttgaggaagattttcaatgtgtcaaaacgattttggactgctttggttcagccacgggattggtatctaatttgcaaaaaagttttgttatcccaatcaggtgtaatgagcaggcggtacagatgggctgcaatactcttcagtgcactgcttcctcctttccttgcacttatttgggactgccactttcagataaaaagctcagaaaatctgatctcatggtttgggtcgagaaagttgcagaccgacttcctaattggaaggctcggttgcttagtttcgctggcaggacaactatggtgcgctttgtgctttcagccatcccgatctaccttctcattgcaatgaaaatccccaagtgggtgattaattctatagataagattcggagaggatttatttggaaaggaagaaaggaggtaaatggtggcaattgccttgtgtcgtgggacattgttacaaggcctttggatctcggtgggcttgggatttctaacctgctgtaccagagttgggcgctgcaagctaaatggctatggctagaaaaaactgatcctaccaagccgtggtctggtttggacttgcctattcaacaaattgtcaagagattctttactgcttctattgtttctctggttggtaatgggcataatactttattttggacagatcggtggttggatgggtcttgtatccaagattttgcccctgctgttgtggctaatgttgggaaacgagctatttcttctagatcggtggcccatgctcttcagaattggcagtggatcagtgacattgagacccctcttagtttgcttgggctgcagcaatatcttagcctttgggatgctttaaggggagtggtgctcactcaggaggcggatcgacatgtgtggattcattcttcctctggtcagttctcttcgaagtcgtgttatagggcatttttcatgggttcgattaccttcgaaccatggaagaggttatggaagacttgggctccacccaaatgcaaattttttctttggttggcaataagaaataaatgttggacagctgatagactgcagaaaagagggttggcttatcctgaggtttgtcctttatgtgatcaagattcggagaatatccaacacctcctttgcacttgcatttttgcgcggcaattttggttctacattctctcttccttggggctggctaatctttctcctgcctctaatgagtccaattttgctgactggtgggagaaggtgtgtaagcaagtgcacaaatccaaaagaagaggctttaacagtatcatcatcttgggggcttggtgtttatggctgcatcgtaataaggcggtttttgatgacgtcaggccttcttttcagggaataaaatcagtttttctggatgagtttgagtgttggaggcttgccggtgctagacatcttgaggctttgggtcctggtgctgcaattttcagatcaagggttctattgggggcttagtgaagagaagttgtgtgggtgtgcggcctgctgacacttgtgctgctgtcctgtgcagagggcagctgcattcctgtgcgtagcatgtattagtggtcttgtgtttggtcaggttttggtggtcttgtgtttggccttttgtgccattgtactttggtccattttggactgtttcttctcttaatttaatgatgcgcagctctcctgcgcgttcacgaaaaaaaaaattatgtatagggtagcatgagttgtttttgtgatctggttttgttgttcggcccctaatatttgaagggctcagtctagctgatggtataatgtgagccctaagttattttacctgtgcttatcttgtagggcatcagaagactttcattacagttcagcaggttaataattaaactgccctgtgttttgggtctgctggtctccactccccagacgatagcattggatcctcttgctcaacaagatctgacaaccgatatgtctctagatcgttgtatggtgcgacttgcattggccctacacaacgactgagggcatagtttcccaatgcttttatctagaatcaagttccgctgtttggtttcagttaccaaattccttgaaaatgctttttaagggcttgttcggttgtgtctagatcgaaggggattgaggaaggttacgttctatttaattttgactagcgaaggatttaattccctctaatccccttcgatcgagacgtaaccgagtaagccttaagatgtgtaggctgtggcttgtgttactgaaccagaggattgctagcgtctgaatttttcgttgttcggagtagtgtctgaaaggtacgaggatgttatggactctttaagcagggatgcgggatgcgtacggttgcaagctattggggcgatgctggagcaaataaagtgatgcagtttgcttgcagattttcagatgttttttttgcagggcaagtacatacttctgggccacagattgtacgtgcgtctagaagaggcaaagcaagggtaacataacatccccatccacggccatggtcaaacggacggctcaaatctgcccaaactgttgaagttgcagttcaactagaaagctggaccatttcagagttgaaagtaatactgttctaaaaaaattgcgagtggcacatggttttgggtcgcatgcacgacctcgtcaaccaccattgtaccaaccactagcatgcagatcttgtcttttacaacaacaacaacaaaaattttaagtacagactgtggaatcatcctcacccgacagagaacgtggtgatgcttttacgcgtcaaaaaacaccaaagctccaaaattatgacacaagggctcgtagttttatttgaactttattttgtctgacgacaacggaggtgttcgaatcggccgttgggagcgcacagtataaacgagcgaacaccaagtcacgaaccttccgcttccccttcccctcaccgtgctgcgctgtttacgcccgcgtccccttccgtttccgttccattcgcctatcgtaccccctctccgtctctcgtcatcgtcggcccgtcgcagccacctccatcggcctccgatccctccacgagcctccggtcgaatccgaggagcaggatccgcggcggcgggcggcggtcgcccggcgatggcgcaccgtatggacaacgagtacgactacctcttcaagatcgtgctcatcggcgactccggcgtcggcaagtccaacatcctctcccgattcacccgcaacgagttctgcctcgagtccaagtccaccatcggcgtcgagttcgccacccgcaccctgcaggttgaagggaaaaccatcaaagcccaaatatgggatactgctgggcaagagaggtaccgtgcaatcacaagtgcgtactacagaggagctgtgggtgcacttctagtctacgacatcacgaagaagcagacattcgaaaacatacagaggtggcttcgtgagctccgcgaccacgccgactccaacattgtgatcatgatggttggtaacaagtccgacctgaaccacctgaggtcggttgcagaggaagacgggcaggcattggcagagaaggaaggcctatccttcctcgagacatccgccctcgaagcgctcaatgtcgagaaggcgttccagaccgtcctctctgatattcaccaaatcataagcaagaaggcacttgcagcccaagaggcagcaggcagtgggcctccaggtcaaggaaccaccatcaacatcgcagacccatctgccaacacgaagagagggtgctgctcttcataagtaggtgcaaacaaagacatgctgctgcttctgcgaaaagaaaaccccccggtggatcatacaacacttttgttatgtagttgaccccttttggcctgtaactctggtgggttgtaatcacaattcatactcctgcaaagaaattctcctctcgggtagatacgatgtgtagtttcgagattttggtagaggccaatgtttggctggcagacttcgggtggagtccagcctcgtgttttctttcaatgttcttctacctcggtagtcttctgctggaaaaaaaaacatgatcagatacgttcttgtatttctacctgagtttgttgtattgtctccggtatattatatatacactaaaaactttgattcctgtgctacaacatgtatccgtgttgcttgtttgcg

SEQ ID NO: 11673 - DNA, 5322 bp, Zea Mays
aaaatgcttgctaatagattgggaccctatctgcaggagttggtggcatctaatcagagtgcctttgtgagaggccgatcgattcacgataactttatgttggtgcagcattcaattaaatctctccacaagaagagagtctctagtttgctcttgaagctggatatctccaaagcatttgactcggtctcttgggccttcttgcttgaagtgctttcatatcttgggtttggtcctgtgtggcgaaatatgatctccaatattctggcctcttcttctacgcaagtgcttttgaatgggtctcctggaattcctattaggcaccggagagggcttcgccagggtgatcctctctctccaatgttgttcgtattggttatggatattctcaacagtctgtttaacctggctgaaaatagggggctgctgcacagcttggagggtgctaatatccgtaacagactgtccatttatgctgatgatgtggtcctttttgttcaaccttttgaggaagattttcaatgtgtcaaaacgattttggactgctttggttcagccacgggattggtatctaatttgcaaaaaagttttgttatcccaatcaggtgtaatgagcaggcggtacagatgggctgcaatactcttcagtgcactgcttcctcctttccttgcacttatttgggactgccactttcagataaaaagctcagaaaatctgatctcatggtttgggtcgagaaagttgcagaccgacttcctaattggaaggctcggttgcttagtttcgctggcaggacaactatggtgcgctttgtgctttcagccatcccgatctaccttctcattgcaatgaaaatccccaagtgggtgattaattctatagataagattcggagaggatttatttggaaaggaagaaaggaggtaaatggtggcaattgccttgtgtcgtgggacattgttacaaggcctttggatctcggtgggcttgggatttctaacctgctgtaccagagttgggcgctgcaagctaaatggctatggctagaaaaaactgatcctaccaagccgtggtctggtttggacttgcctattcaacaaattgtcaagagattctttactgcttctattgtttctctggttggtaatgggcataatactttattttggacagatcggtggttggatgggtcttgtatccaagattttgcccctgctgttgtggctaatgttgggaaacgagctatttcttctagatcggtggcccatgctcttcagaattggcagtggatcagtgacattgagacccctcttagtttgcttgggctgcagcaatatcttagcctttgggatgctttaaggggagtggtgctcactcaggaggcggatcgacatgtgtggattcattcttcctctggtcagttctcttcgaagtcgtgttatagggcatttttcatgggttcgattaccttcgaaccatggaagaggttatggaagacttgggctccacccaaatgcaaattttttctttggttggcaataagaaataaatgttggacagctgatagactgcagaaaagagggttggcttatcctgaggtttgtcctttatgtgatcaagattcggagaatatccaacacctcctttgcacttgcatttttgcgcggcaattttggttctacattctctcttccttggggctggctaatctttctcctgcctctaatgagtccaattttgctgactggtgggagaaggtgtgtaagcaagtgcacaaatccaaaagaagaggctttaacagtatcatcatcttgggggcttggtgtttatggctgcatcgtaataaggcggtttttgatgacgtcaggccttcttttcagggaataaaatcagtttttctggatgagtttgagtgttggaggcttgccggtgctagacatcttgaggctttgggtcctggtgctgcaattttcagatcaagggttctattgggggcttagtgaagagaagttgtgtgggtgtgcggcctgctgacacttgtgctgctgtcctgtgcagagggcagctgcattcctgtgcgtagcatgtattagtggtcttgtgtttggtcaggttttggtggtcttgtgtttggccttttgtgccattgtactttggtccattttggactgtttcttctcttaatttaatgatgcgcagctctcctgcgcgttcacgaaaaaaaaaattatgtatagggtagcatgagttgtttttgtgatctggttttgttgttcggcccctaatatttgaagggctcagtctagctgatggtataatgtgagccctaagttattttacctgtgcttatcttgtagggcatcagaagactttcattacagttcagcaggttaataattaaactgccctgtgttttgggtctgctggtctccactccccagacgatagcattggatcctcttgctcaacaagatctgacaaccgatatgtctctagatcgttgtatggtgcgacttgcattggccctacacaacgactgagggcatagtttcccaatgcttttatctagaatcaagttccgctgtttggtttcagttaccaaattccttgaaaatgctttttaagggcttgttcggttgtgtctagatcgaaggggattgaggaaggttacgttctatttaattttgactagcgaaggatttaattccctctaatccccttcgatcgagacgtaaccgagtaagccttaagatgtgtaggctgtggcttgtgttactgaaccagaggattgctagcgtctgaatttttcgttgttcggagtagtgtctgaaaggtacgaggatgttatggactctttaagcagggatgcgggatgcgtacggttgcaagctattggggcgatgctggagcaaataaagtgatgcagtttgcttgcagattttcagatgttttttttgcagggcaagtacatacttctgggccacagattgtacgtgcgtctagaagaggcaaagcaagggtaacataacatccccatccacggccatggtcaaacggacggctcaaatctgcccaaactgttgaagttgcagttcaactagaaagctggaccatttcagagttgaaagtaatactgttctaaaaaaattgcgagtggcacatggttttgggtcgcatgcacgacctcgtcaaccaccattgtaccaaccactagcatgcagatcttgtcttttacaacaacaacaacaaaaattttaagtacagactgtggaatcatcctcacccgacagagaacgtggtgatgcttttacgcgtcaaaaaacaccaaagctccaaaattatgacacaagggctcgtagttttatttgaactttattttgtctgacgacaacggaggtgttcgaatcggccgttgggagcgcacagtataaacgagcgaacaccaagtcacgaaccttccgcttccccttcccctcaccgtgctgcgctgtttacgcccgcgtccccttccgtttccgttccattcgcctatcgtaccccctctccgtctctcgtcatcgtcggcccgtcgcagccacctccatcggcctccgatccctccacgagcctccggtcgaatccgagcaggatccgcggcggcgggcggcggtcgcccggcgatggcgcaccgtatggacaacgagtacgactacctcttcaagatcgtgctcatcggcgactccggcgtcggcaagtccaacatcctctcccgattcacccgcaacgagttctgcctcgagtccaagtccaccatcggcgtcgagttcgccacccgcaccctgcagtgtaaactgggccttatgtgatgccgatcgagtgatcagcgtgctgctctcagctggcgtgcccatgaggtcatgtcctatctatttaaaatttatccatgccccgtcgatgccgacactaggatctgctccttcgccagcttatcccacacgctaaagctggagccgggctactatggcaaagccatctttcccgtgaaggtgcgggcgtcagcggagaaggtggccggctcatctgcatggtccggaggccaagcatcggatggccgaggagtgcctaagtcgagctgaaggctgtaccggaggccacaacccgttcttgatgatcttcaactatctgtgcatgtcttgaactggagcaagctcggggtttcacagatgcagacttatgggtacgacaaactgatgttcgccggtcagctggtgaagtgcaaccttattgcatcgttcattgtcatgagggagggtgcttggctgctcgcgccgctcgtcggcagcatcaccaagcagcacaacaacttcgcctgcaggatgtgcgagcacggagcacctcgtatgatacatgtgcacgcgagcatgaagatgaaggaaccctgctgctacatctaggttgaagggaaaaccatcaaagcccaaatatgggatactgctgggcaagagaggtaccgtgcaatcacaagtgcgtactacagaggagctgtgggtgcacttctagtctacgacatcacgaagaagcagacattcgaaaacatacagaggtggcttcgtgagctccgcgaccacgccgactccaacattgtgatcatgatggttggtaacaagtccgacctgaaccacctgaggtcggttgcagaggaagacgggcaggcattggcagagaaggaaggcctatccttcctcgagacatccgccctcgaagcgctcaatgtcgagaaggcgttccagaccgtcctctctgatattcaccaaatcataagcaagaaggcacttgcagcccaagaggcagcaggcagtgggcctccaggtcaaggaaccaccatcaacatcgcagacccatctgccaacacgaagagagggtgctgctcttcataagtaggtgcaaacaaagacatgctgctgcttctgcgaaaagaaaaccccccggtggatcatacaacacttttgttatgtagttgaccccttttggcctgtaactctggtgggttgtaatcacaattcatactcctgcaaagaaattctcctctcgggtagatacgatgtgtagtttcgagattttggtagaggccaatgtttggctggcagacttcgggtggagtccagcctcgtgttttctttcaatgttcttctacctcggtagtcttctgctggaaaaaaaaacatgatcagatacgttcttgtatttctacctgagtttgttgtattgtctccggtatattatatatacactaaaaactttgattcctgtgctacaacatgtatccgtgttgcttgtttgcg

SEQ ID NO: 11674 - DNA, 4710 bp, Zea Mays
aaaatgcttgctaatagattgggaccctatctgcaggagttggtggcatctaatcagagtgcctttgtgagaggccgatcgattcacgataactttatgttggtgcagcattcaattaaatctctccacaagaagagagtctctagtttgctcttgaagctggatatctccaaagcatttgactcggtctcttgggccttcttgcttgaagtgctttcatatcttgggtttggtcctgtgtggcgaaatatgatctccaatattctggcctcttcttctacgcaagtgcttttgaatgggtctcctggaattcctattaggcaccggagagggcttcgccagggtgatcctctctctccaatgttgttcgtattggttatggatattctcaacagtctgtttaacctggctgaaaatagggggctgctgcacagcttggagggtgctaatatccgtaacagactgtccatttatgctgatgatgtggtcctttttgttcaaccttttgaggaagattttcaatgtgtcaaaacgattttggactgctttggttcagccacgggattggtatctaatttgcaaaaaagttttgttatcccaatcaggtgtaatgagcaggcggtacagatgggctgcaatactcttcagtgcactgcttcctcctttccttgcacttatttgggactgccactttcagataaaaagctcagaaaatctgatctcatggtttgggtcgagaaagttgcagaccgacttcctaattggaaggctcggttgcttagtttcgctggcaggacaactatggtgcgctttgtgctttcagccatcccgatctaccttctcattgcaatgaaaatccccaagtgggtgattaattctatagataagattcggagaggatttatttggaaaggaagaaaggaggtaaatggtggcaattgccttgtgtcgtgggacattgttacaaggcctttggatctcggtgggcttgggatttctaacctgctgtaccagagttgggcgctgcaagctaaatggctatggctagaaaaaactgatcctaccaagccgtggtctggtttggacttgcctattcaacaaattgtcaagagattctttactgcttctattgtttctctggttggtaatgggcataatactttattttggacagatcggtggttggatgggtcttgtatccaagattttgcccctgctgttgtggctaatgttgggaaacgagctatttcttctagatcggtggcccatgctcttcagaattggcagtggatcagtgacattgagacccctcttagtttgcttgggctgcagcaatatcttagcctttgggatgctttaaggggagtggtgctcactcaggaggcggatcgacatgtgtggattcattcttcctctggtcagttctcttcgaagtcgtgttatagggcatttttcatgggttcgattaccttcgaaccatggaagaggttatggaagacttgggctccacccaaatgcaaattttttctttggttggcaataagaaataaatgttggacagctgatagactgcagaaaagagggttggcttatcctgaggtttgtcctttatgtgatcaagattcggagaatatccaacacctcctttgcacttgcatttttgcgcggcaattttggttctacattctctcttccttggggctggctaatctttctcctgcctctaatgagtccaattttgctgactggtgggagaaggtgtgtaagcaagtgcacaaatccaaaagaagaggctttaacagtatcatcatcttgggggcttggtgtttatggctgcatcgtaataaggcggtttttgatgacgtcaggccttcttttcagggaataaaatcagtttttctggatgagtttgagtgttggaggcttgccggtgctagacatcttgaggctttgggtcctggtgctgcaattttcagatcaagggttctattgggggcttagtgaagagaagttgtgtgggtgtgcggcctgctgacacttgtgctgctgtcctgtgcagagggcagctgcattcctgtgcgtagcatgtattagtggtcttgtgtttggtcaggttttggtggtcttgtgtttggccttttgtgccattgtactttggtccattttggactgtttcttctcttaatttaatgatgcgcagctctcctgcgcgttcacgaaaaaaaaaattatgtatagggtagcatgagttgtttttgtgatctggttttgttgttcggcccctaatatttgaagggctcagtctagctgatggtataatgtgagccctaagttattttacctgtgcttatcttgtagggcatcagaagactttcattacagttcagcaggttaataattaaactgccctgtgttttgggtctgctggtctccactccccagacgatagcattggatcctcttgctcaacaagatctgacaaccgatatgtctctagatcgttgtatggtgcgacttgcattggccctacacaacgactgagggcatagtttcccaatgcttttatctagaatcaagttccgctgtttggtttcagttaccaaattccttgaaaatgctttttaagggcttgttcggttgtgtctagatcgaaggggattgaggaaggttacgttctatttaattttgactagcgaaggatttaattccctctaatccccttcgatcgagacgtaaccgagtaagccttaagatgtgtaggctgtggcttgtgttactgaaccagaggattgctagcgtctgaatttttcgttgttcggagtagtgtctgaaaggtacgaggatgttatggactctttaagcagggatgcgggatgcgtacggttgcaagctattggggcgatgctggagcaaataaagtgatgcagtttgcttgcagattttcagatgttttttttgcagggcaagtacatacttctgggccacagattgtacgtgcgtctagaagaggcaaagcaagggtaacataacatccccatccacggccatggtcaaacggacggctcaaatctgcccaaactgttgaagttgcagttcaactagaaagctggaccatttcagagttgaaagtaatactgttctaaaaaaattgcgagtggcacatggttttgggtcgcatgcacgacctcgtcaaccaccattgtaccaaccactagcatgcagatcttgtcttttacaacaacaacaacaaaaattttaagtacagactgtggaatcatcctcacccgacagagaacgtggtgatgcttttacgcgtcaaaaaacaccaaagctccaaaattatgacacaagggctcgtagttttatttgaactttattttgtctgacgacaacggaggtgttcgaatcggccgttgggagcgcacagtataaacgagcgaacaccaagtcacgaaccttccgcttccccttcccctcaccgtgctgcgctgtttacgcccgcgtccccttccgtttccgttccattcgcctatcgtaccccctctccgtctctcgtcatcgtcggcccgtcgcagccacctccatcggcctccgatccctccacgagcctccggtcgaatccgaggatccgcggcggcgggcggcggtcgcccggcgatggcgcaccgtatggacaacgagtacgactacctcttcaagatcgtgctcatcggcgactccggcgtcggcaagtccaacatcctctcccgattcacccgcaacgagttctgcctcgagtccaagtccaccatcggcgtcgagttcgccacccgcaccctgcaggttgaagggaaaaccatcaaagcccaaatatgggatactgctgggcaagagaggtaccgtgcaatcacaagtgcgtactacagaggagctgtgggtgcacttctagtctacgacatcacgaagaagcagacattcgaaaacatacagaggtggcttcgtgagctccgcgaccacgccgactccaacattgtgatcatgatggttggtaacaagtccgacctgaaccacctgaggtcggttgcagaggaagacgggcaggcattggcagagaaggaaggcctatccttcctcgagacatccgccctcgaagcgctcaatgtcgagaaggcgttccagaccgtcctctctgatattcaccaaatcataagcaagaaggcacttgcagcccaagaggcagcaggcagtgggcctccaggtcaaggaaccaccatcaacatcgcagacccatctgccaacacgaagagagggtgctgctcttcataagtaggtgcaaacaaagacatgctgctgcttctgcgaaaagaaaaccccccggtggatcatacaacacttttgttatgtagttgaccccttttggcctgtaactctggtgggttgtaatcacaattcatactcctgcaaagaaattctcctctcgggtagatacgatgtgtagtttcgagattttggtagaggccaatgtttggctggcagacttcgggtggagtccagcctcgtgttttctttcaatgttcttctacctcggtagtcttctgctggaaaaaaaaacatgatcagatacgttcttgtatttctacctgagtttgttgtattgtctccggtatattatatatacactaaaaactttgattcctgtgctacaacatgtatccgtgttgcttgtttgcg

SEQ ID NO: 11675 - DNA, 5997 bp, Zea Mays
aaaatgcttgctaatagattgggaccctatctgcaggagttggtggcatctaatcagagtgcctttgtgagaggccgatcgattcacgataactttatgttggtgcagcattcaattaaatctctccacaagaagagagtctctagtttgctcttgaagctggatatctccaaagcatttgactcggtctcttgggccttcttgcttgaagtgctttcatatcttgggtttggtcctgtgtggcgaaatatgatctccaatattctggcctcttcttctacgcaagtgcttttgaatgggtctcctggaattcctattaggcaccggagagggcttcgccagggtgatcctctctctccaatgttgttcgtattggttatggatattctcaacagtctgtttaacctggctgaaaatagggggctgctgcacagcttggagggtgctaatatccgtaacagactgtccatttatgctgatgatgtggtcctttttgttcaaccttttgaggaagattttcaatgtgtcaaaacgattttggactgctttggttcagccacgggattggtatctaatttgcaaaaaagttttgttatcccaatcaggtgtaatgagcaggcggtacagatgggctgcaatactcttcagtgcactgcttcctcctttccttgcacttatttgggactgccactttcagataaaaagctcagaaaatctgatctcatggtttgggtcgagaaagttgcagaccgacttcctaattggaaggctcggttgcttagtttcgctggcaggacaactatggtgcgctttgtgctttcagccatcccgatctaccttctcattgcaatgaaaatccccaagtgggtgattaattctatagataagattcggagaggatttatttggaaaggaagaaaggaggtaaatggtggcaattgccttgtgtcgtgggacattgttacaaggcctttggatctcggtgggcttgggatttctaacctgctgtaccagagttgggcgctgcaagctaaatggctatggctagaaaaaactgatcctaccaagccgtggtctggtttggacttgcctattcaacaaattgtcaagagattctttactgcttctattgtttctctggttggtaatgggcataatactttattttggacagatcggtggttggatgggtcttgtatccaagattttgcccctgctgttgtggctaatgttgggaaacgagctatttcttctagatcggtggcccatgctcttcagaattggcagtggatcagtgacattgagacccctcttagtttgcttgggctgcagcaatatcttagcctttgggatgctttaaggggagtggtgctcactcaggaggcggatcgacatgtgtggattcattcttcctctggtcagttctcttcgaagtcgtgttatagggcatttttcatgggttcgattaccttcgaaccatggaagaggttatggaagacttgggctccacccaaatgcaaattttttctttggttggcaataagaaataaatgttggacagctgatagactgcagaaaagagggttggcttatcctgaggtttgtcctttatgtgatcaagattcggagaatatccaacacctcctttgcacttgcatttttgcgcggcaattttggttctacattctctcttccttggggctggctaatctttctcctgcctctaatgagtccaattttgctgactggtgggagaaggtgtgtaagcaagtgcacaaatccaaaagaagaggctttaacagtatcatcatcttgggggcttggtgtttatggctgcatcgtaataaggcggtttttgatgacgtcaggccttcttttcagggaataaaatcagtttttctggatgagtttgagtgttggaggcttgccggtgctagacatcttgaggctttgggtcctggtgctgcaattttcagatcaagggttctattgggggcttagtgaagagaagttgtgtgggtgtgcggcctgctgacacttgtgctgctgtcctgtgcagagggcagctgcattcctgtgcgtagcatgtattagtggtcttgtgtttggtcaggttttggtggtcttgtgtttggccttttgtgccattgtactttggtccattttggactgtttcttctcttaatttaatgatgcgcagctctcctgcgcgttcacgaaaaaaaaaattatgtatagggtagcatgagttgtttttgtgatctggttttgttgttcggcccctaatatttgaagggctcagtctagctgatggtataatgtgagccctaagttattttacctgtgcttatcttgtagggcatcagaagactttcattacagttcagcaggttaataattaaactgccctgtgttttgggtctgctggtctccactccccagacgatagcattggatcctcttgctcaacaagatctgacaaccgatatgtctctagatcgttgtatggtgcgacttgcattggccctacacaacgactgagggcatagtttcccaatgcttttatctagaatcaagttccgctgtttggtttcagttaccaaattccttgaaaatgctttttaagggcttgttcggttgtgtctagatcgaaggggattgaggaaggttacgttctatttaattttgactagcgaaggatttaattccctctaatccccttcgatcgagacgtaaccgagtaagccttaagatgtgtaggctgtggcttgtgttactgaaccagaggattgctagcgtctgaatttttcgttgttcggagtagtgtctgaaaggtacgaggatgttatggactctttaagcagggatgcgggatgcgtacggttgcaagctattggggcgatgctggagcaaataaagtgatgcagtttgcttgcagattttcagatgttttttttgcagggcaagtacatacttctgggccacagattgtacgtgcgtctagaagaggcaaagcaagggtaacataacatccccatccacggccatggtcaaacggacggctcaaatctgcccaaactgttgaagttgcagttcaactagaaagctggaccatttcagagttgaaagtaatactgttctaaaaaaattgcgagtggcacatggttttgggtcgcatgcacgacctcgtcaaccaccattgtaccaaccactagcatgcagatcttgtcttttacaacaacaacaacaaaaattttaagtacagactgtggaatcatcctcacccgacagagaacgtggtgatgcttttacgcgtcaaaaaacaccaaagctccaaaattatgacacaagggctcgtagttttatttgaactttattttgtctgacgacaacggaggtgttcgaatcggccgttgggagcgcacagtataaacgagcgaacaccaagtcacgaaccttccgcttccccttcccctcaccgtgctgcgctgtttacgcccgcgtccccttccgtttccgttccattcgcctatcgtaccccctctccgtctctcgtcatcgtcggcccgtcgcagccacctccatcggcctccgatccctccacgagcctccggtcgaatccgaggagcaggatccgcggcggcgggcggcggtcgcccggcgatggcgcaccgtatggacaacgagtacgactacctcttcaagatcgtgctcatcggcgactccggcgtcggcaagtccaacatcctctcccgattcacccgcaacgagttctgcctcgagtccaagtccaccatcggcgtcgagttcgccacccgcaccctgcaggtaaacccacccgcaatgatttgaagaacgttctagtttataagtcgttttgacatttgtaaatacacaacttctgttatgtaactagacaaatagtgtatccttttccacaacggacgaatccgaatttcattgtttggaatcaactaaaattacaaaagttttaaccacacattttccactagtatcaccaaaaaaacctgcttagctggaatgaacacggcatattatgtggctagatgcttgatgtatctagaaaagccaaaacaacctatagtttgggacatacgatgtatgtcgttgtatagaatgtaatataaaacatgacaactttatgggctcgtctcacgacaccatagtggttaaggcaagggtagcactagcagcagtaatgacgtcaaattctggaaccgggatgccatcctgggggatctcgagggcatgacaagtccaacagctcaagagcacctgcaggttgcgacgacaccgcgctggccaacaatgggcagtgctacattaactaaggtggggtgaagtacccaagtaggagcagctatgcttatctttacttaatttacctttactgtcattcgtaaatcgattcatcatattgataattaaccaacaaattagataaacaacttttaaaaagagaagtctactgctgtgcagtgtaaactgggccttatgtgatgccgatcgagtgatcagcgtgctgctctcagctggcgtgcccatgaggtcatgtcctatctatttaaaatttatccatgccccgtcgatgccgacactaggatctgctccttcgccagcttatcccacacgctaaagctggagccgggctactatggcaaagccatctttcccgtgaaggtgcgggcgtcagcggagaaggtggccggctcatctgcatggtccggaggccaagcatcggatggccgaggagtgcctaagtcgagctgaaggctgtaccggaggccacaacccgttcttgatgatcttcaactatctgtgcatgtcttgaactggagcaagctcggggtttcacagatgcagacttatgggtacgacaaactgatgttcgccggtcagctggtgaagtgcaaccttattgcatcgttcattgtcatgagggagggtgcttggctgctcgcgccgctcgtcggcagcatcaccaagcagcacaacaacttcgcctgcaggatgtgcgagcacggagcacctcgtatgatacatgtgcacgcgagcatgaagatgaaggaaccctgctgctacatctaggttgaagggaaaaccatcaaagcccaaatatgggatactgctgggcaagagaggtaccgtgcaatcacaagtgcgtactacagaggagctgtgggtgcacttctagtctacgacatcacgaagaagcagacattcgaaaacatacagaggtggcttcgtgagctccgcgaccacgccgactccaacattgtgatcatgatggttggtaacaagtccgacctgaaccacctgaggtcggttgcagaggaagacgggcaggcattggcagagaaggaaggcctatccttcctcgagacatccgccctcgaagcgctcaatgtcgagaaggcgttccagaccgtcctctctgatattcaccaaatcataagcaagaaggcacttgcagcccaagaggcagcaggcagtgggcctccaggtcaaggaaccaccatcaacatcgcagacccatctgccaacacgaagagagggtgctgctcttcataagtaggtgcaaacaaagacatgctgctgcttctgcgaaaagaaaaccccccggtggatcatacaacacttttgttatgtagttgaccccttttggcctgtaactctggtgggttgtaatcacaattcatactcctgcaaagaaattctcctctcgggtagatacgatgtgtagtttcgagattttggtagaggccaatgtttggctggcagacttcgggtggagtccagcctcgtgttttctttcaatgttcttctacctcggtagtcttctgctggaaaaaaaaacatgatcagatacgttcttgtatttctacctgagtttgttgtattgtctccggtatattatatatacactaaaaactttgattcctgtgctacaacatgtatccgtgttgcttgtttgcg

SEQ ID NO: 11676 - DNA, 359 bp, Zea Mays
cagcagcaccctccgcggcggcggctgccggcttcagagccggcggcggtggctggtggtgggagacgacgagcgggggtctgggcgcgcgcctctccgcctcggcctgcttgcgcgcgttgtacatctcctcggtctcgacggcgacgaggcgcttcacctgggtgagcatcccgagcagcgacggcgtggtgcggtgctcgacggtgcggtggcagcggcggaggcgcatggcctcgagcgtgcggcggtggaggcggcgcgtgcccggtaggccccgcaccagcgtgatgtacagccggggactccacgccaccggcacccgcgacttgaacgcgttgaacgcgcttccgctcatc

SEQ ID NO: 11677 - DNA, 2262 bp, Zea Mays
aagagacagagacaggggcgtcggccaaggcagggaggcgaacgacaggtggagggagccgaggaggcgggaggggaagcgtcatcccgccccaagatcgtctcctggcttcagggtgcttcttccctatacataatcagttgcgagagagaatgatgccctctatgcaacctccatcatttaaccatcccgtgaaaaagtcgttatcttttcatgcattactttacttgacagcataatggcagtaatgacattcaagtgttcaactttgaaaaagcaatgggcaatggcatagaacagatggtaaattattctgtcagctaatggaacatgttactgtaggatttcttatatcagacacaaattcaaagcatgattcatgcctttttttaacgagccctgggaaactcgtctggaccaggcagcgcgcgttcataggcattcagatccaagggcctggggtggactgacctgcctggatgagtgctcccaaggcagggtgccaaattttggctactatagaaacaataacagatatatctacatacaattttctatgtggatagaatatctgcttcttggatactctaccaaatcgcacccacaaccaagagaatttcaggagtagattaattggtctagctacattaaggttatatgggatggataacatcattcatcacccgtgtccattttctacaataagttatcctacagagaattttgaagcaaaacataaatacttcaggtttgtttttccaagcactgttcctgcttcagaagggctggtgcaacccacaatgccatcaccatgggttttaagttgttgcctaggcatctagtcgcgaagtctaggcgtcagcacacaattttctgtctgaaagaggacgatgaagtagggcgtgggagtttcgcgcgctggggagatcaactggagttgtgtgctagcaggaaattgcacgactacaatccccgcaatcattcttcaccgtctcctgtgcgccaatacacatagcagggagaagggggcaaacctagtatttggcagcgcaaggccagaagccagctgctacagaccattttggtccatcgattcatgcctgatgcctcccttgtccctcctttgactcattcctccctctctccaccgatttatgccttcaattcgtgcatccatccttagcatcctcttctccaccaattgacgccttcagttcgtgcattattcctcatctcgaccaatttgcacctctgattcacgcatccttcctctgccccccaccaattcccatccccattagcatgttgtcacaatctcatgggcacacatgtatctctctctctctcatacacctccctcttatggttgttgcttgaacgttgcattgcccctccagcttgtgtctgctctgctgtgatgcacctgcttgtgcctggatgtgaagttgtgaactgctccgcctgcttgtcctagactgctagtgctaggtgcccagcagtccagcacttgtgttttgtgctctgcaagtttgctgctgcatagccatagatccagagtgcttcactgctatgggtgaatgtgtgcctgtgctttactgcctttagttagtttgttcatttttagctgattacagtttacagattgtgatatatgtctctgtgttctgtgacagctcacagctacatcaacaagttcgttcatgctgctccactgtaggttggaatgtatgtgtggtgttccctcaccacaagcttaggtgtctggaagggggtgggtcacctcgccttacgccatcataaccatgcctgtcactaatgattaatgttgttttgtactgtcatcttttttattcagataacaacttgacatcaatttgcatttttgtggtacttgaaacatccagatagctgttcaggattaacaagaattgataggtcaggctaattgtatagttttcttttactgaagtttaataacaatgacacccttttgctctagatgctattttttcagtgtcaacaacaaacacctaggaagatcttggtcattttaaattggtatgttaagtaaggacgtggtttgggctgcaccctccatgttgttacacggagagctaagggaaaaattataatgagcataccaggtaagaatagcaaggaaaagttggatgaatgtctgatataaagcactcaatacaaaaatgcagaacaaattaaacgcagccgctaactcttagattgcttcttcattataaacaaaac

SEQ ID NO: 11678 - DNA, 1866 bp, Zea Mays
cacaatttgacagctatcatcacccatcagatactcggatggcaatatcctttatatatattgttgcccaaggactactgcagaattggaggcacatgtagctgatacatctcttgtgtctgctgatgcacctcgtgtgcttgctgatactgtactggatatatctggtggggagcgtgcttttattgaggcagatgaagcaaaggaactgcttagtccacttacgaaaccagggaattcatataaaagaatttgctttagcaacaggagctttggtattggtgctgctaatgttgctggtccaattcttgattcagttaagaatcagctcacagaggttgacatatcagattttgtggcaggaaggcctgaggatgaagcccttgatgtgatgcgcatattctccaaagcattagagggttctgtcctgagatatctgaacatctctgacaatgctttgggtgagaagggtaggaagctgcgaaagctctatctgagcttattcctgcaactgaagcttaaggttctccacttccacaacaacatgacgggagatgaaggtgctatgtatattgctgagatggttaagcgttctccgaatgtagagagtttcaggtgctcagcaacaaggataggatctaatggtggagtcgcattgtctgaggcattagggacatgcactcgcctgaagaaacttgatctcagggacaacttgtttggtgttgatgcagggttagctctcagcaaaacccttccaaagcttcctgatcttgttgagctttatctcagtgatctcaatcttgaaaacaagggtactatagcaattgccaaagccctcgaacagtcagcaccgcagttggagatactgttgaagatgctaccaaaatattacaatcatgtcagagcttatgataatacactcattacaaaaaaatttggcgtccacaggattactctgaaaggcggaagaaaggttcgctttgttgtgatgggaaatatgttttgcactgagctgcgaattcctcgtaagtatgacttaaagggttctacacaaggccgatcaaccaaaaagcaaaatataaatgagaacgcaacactgaaggaccttgacctatcatatgtttttcatgtcgataaaccatggcgggacacacttttcagaaatgatcatagtgggttaatgattattgtttcttctaatgttcttttatcacacaagaggagcataccccttgagaaggaccttaaggaacaacaggttgtgcatggtgaggtggaaaacactttagggcctggttttatcaacttggcattagagaatccaataccaaaggtaatctgtgttaatggcaatgatagtggaccagtctcgtgcagcagtaactctcgctgaccactgctgtcagttatggacttgctaccagggccccatcaattttcgtatatttgtgaagatggacggcagtgacctgcatgttggcatggcaaaattgaaatgggggcatgcagtgcaatgggtgggctacgtaaggtgttggttgtgtgctgacgaaattcggtcgaagccgtcctaatccagaatcatttagggagatgctgagttgacatgttcgaatgacctttttatagatatagtacgtatgtccatgggactgggaggaaccgaggacccatgagatgcatatacgtttctttcaaacaattcatcttatgggttttaaacgcaacatgattatgtatgttaacattagacaagccaattccttcaaaaaaatgtcatacaaggcaagacatttctggtggcacttgatgcgcgtcctcattttaagcatcacggatagaatataaccacatgttctgcttgct

SEQ ID NO: 11679 - DNA, 712 bp, Zea Mays
gtacggcccatgtgagaaggcgcgcacctgctcctcacctgtgtttgcttccgccgccggcaaggaagaagagagcaaaaccctagctagagttggcgagtgggggtggaggcgcggctgctcgtcacgacatcgagtttcagcgccgcccgcgagatccccggatttcgttctctacccctgttagggagagctgcggcaatggctgggaaaggcgggtcgaccaacttagaaaaggagcagatgtttgggatggcggagaaggagatggagtacagggttgatcttttcaacaggtataaagaagctgagctcaatatgggcgagaacagttgcattgatcgatgtgtttcaaagtattggcaggtgactaatttagttggtcagatgcttggaaaccggcctcaaatgtgaactgagaagcactcgttccattttgtagcagaattctattgctctgtttcttctttttggttggttgtagaatgccgcacctgttctaagtacaccaatacagcaacagacatgctactgcgtggaccgctttaaagaaaaaaaatcagtgatgcgcattctctctgaatcatgaactgtaataatttgatacagctctagggcaattctgtttcgaaagctcgtcctgtttcgtagtaaaattctggatttgtgttcctctgaggtaattagagtataatatttttctttgcgaatc

SEQ ID NO: 11680 - DNA, 1354 bp, Zea Mays
cgcacggcggcgcgggaatggtcatcgggttcgccgtcgcgcccggattccggctggggaacggcgccgtcgtgcgcgcccgggtctacctggtgccgcgtggtggccgaccgtgacagacccatgcatggcgtgacagaccgcgtggtagcgttgcatagcgccgcggcccacggatcacctccgagagttgttggtgggtgccaatgcgcaccctgctggagcctggagctggacctgcggagtagctgctggctggctgcgttggtgaagaacagacaaaggctcatagctactgtactagtggctccgtagattttatttcatttacttctccttgttaatctcaaaaaaagtaataatcgccatgtgtaagaggactttgaatttaattctcgcatcaacatcgtttgtaatcatcaccttgagatttgactttgtagttaagagggacagttaagttcagcagtgcattgcgcgttccaggactctcgatctcaaggaccacatctctgctcttctcataaaagggcattcatggtgacgactgtgcttgctgctctgcggctacagctctcctgcagctgcaggagcaggcgcatgggaaactcataatcgtcacccattaatttgtatgaacattattgcaatcatgcccgtgatagagcagctagggcgaagagaatgcatattttgtctgaacattactactactggatcttgtttgagggcagatctgtggaagctgcccggaaagcgaaaagcaaaaggaggaaaagaagattgtctcgttcctaatcgaaagctcttggcccaaacaaccgagccgggcctctttccacaaagccatttctgtctggtgtctgccacaatgcagcgagcgaagcgaagcaaaccaacgaaagccccggggctgctgcttatagcatattcaaagtacactccaataatttgtaatgtttgtttgccttttaacttatttaagttggattgtataatctagagggtaaacaaactagacctaaataagtttaaatcggaatagaattcaatctttctgagattgtgttcgctcgagtatatggatcaacaactaccatctccaacaacttacctatacctatattcaaactataatctacaaacagtacaatgtaaaataatgtttttggtaaccatatgagtgaactactatacattgaaccatatggtcgctaaaaacatcgttttgtaccgtagattgtaatatttgtagagtgtagtttgaatatgggtacatgtatcggtaagctgatggagatggtctataaacgaagacaaagtgtgaaatgaatggcctaagggactgctttct

SEQ ID NO: 11681 - DNA, 967 bp, Zea Mays
aaacaatgccatttctactcatggaggatgggttggattcttctcatatgatacagtgcgttatgttgaaacaaagaagcttcctttcagtaaggcaccacatgacgataggaaccttcctgacattcatttaggcctctatagtgacgtcattgtgtttgatcatgttgaaaagaaaacacatgttattcattgggtgaggacagactgctatcgttctgttgatgaagcatatgaagatggaagaaatcggcttgaagctttgttatcaagattacattgcctcaatgtcccaacactttcttctggttctataaaactcaatgttgaaaactttggcccagtaatgcaaaaatcaacgatgtcaagcgaagaatataaaaatatcgttgtccaagctaaagaacacatcttggccggtgacattttccaagttgttttaagccagcgttttgagagacggacattcgccgacccctttgaaatctatcgtgcattgcgcatcgtaaatcctagtccatatatggcctatctacaggcacgaggttgtattctcgtggcatcgagtcctgaaaattcttacccgggtacaaaagaggacaataatcaatcgtccgcttgctggaaccataagaagaggcaaaacaaaagcagaagacaaaactttagaacaattgcttttgagtgatgaaaagcagtgtgctgaacatattatgctagtagatcttggccgaaatgatgttgggaaggtgtccaaaccaggttcagtaaaggtagagaaattgatgaatatcgaacgatattctcatgtcatgcacatcagctcaacagtaactggagagctacgcgatgatcttacgtgttgggatgcgctacgagccgcattgccagttggaaccgttagtggcgctccaaaggtgagagcaatggagttgattgatcagctagaagtgagtaatgcgtgggc

SEQ ID NO: 11682 - DNA, 1349 bp, Zea Mays
acgagggggcccacgcctgaatgccaggcctggccgcgacgtgtcgcgcctcgccctccccgactccactccactccactccactcgcccgcgcccgccgcccgcgtgctcctccctcgcgccccgccccgccccgcccctatctatatccattcccgctcgtccccctcaacaaccctcctcaccgcgcactcgtgttcgtgtcatcccgcccgcaggccgcagtccatggccaccgccagccttctatggaggtcgtggccaaggctaaccatgtgacggtcatggaccatgagatgaagtcgaggagggagcacttcgtgcctgatcccatgaggatccccaggacaatcatggagcagtggaacccgcagattgctgacagcctccctgatgcattttgtggaggatgggttggattcttctcatatgatacagtgcgttatgttgaaacaaagaagcttcctttcagtaaggcaccacatgacgataggaaccttcctgacattcatttaggcctctatagtgacgtcattgtgtttgatcatgttgaaaagaaaacacatgttattcattgggtgaggacagactgctatcgttctgttgatgaagcatatgaagatggaagaaatcggcttgaagctttgttatcaagattacattgcctcaatgtcccaacactttcttctggttctataaaactcaatgttgaaaactttggcccagtaatgcaaaaatcaacgatgtcaagcgaagaatataaaaatatcgttgtccaagctaaagaacacatcttggccggtgacattttccaagttgttttaagccagcgttttgagagacggacattcgccgacccctttgaaatctatcgtgcattgcgcatcgtaaatcctagtccatatatggcctatctacaggcacgaggttgtattctcgtggcatcgagtcctgaaaattcttacccgggtacaaaagaggacaataatcaatcgtccgcttgctggaaccataagaagaggcaaaacaaaagcagaagacaaaactttagaacaattgcttttgagtgatgaaaagcagtgtgctgaacatattatgctagtagatcttggccgaaatgatgttgggaaggtgtccaaaccaggttcagtaaaggtagagaaattgatgaatatcgaacgatattctcatgtcatgcacatcagctcaacagtaactggagagctacgcgatgatcttacgtgttgggatgcgctacgagccgcattgccagttggaaccgttagtggcgctccaaaggtgagagcaatggagttgattgatcagctagaagtgagtaatgcgtgggc

SEQ ID NO: 11683 - DNA, 1689 bp, Zea Mays
acgagggggcccacgcctgaatgccaggcctggccgcgacgtgtcgcgcctcgccctccccgactccactccactccactccactcgcccgcgcccgccgcccgcgtgctcctccctcgcgccccgccccgccccgcccctatctatatccattcccgctcgtccccctcaacaaccctcctcaccgcgcactcgtgttcgtgtcatcccgcccgcaggccgcagtccatggccaccgccagcctcgcgctctcgctgcgcctcgcgccgtcctcgcgcccgctgagcctccgccgccggggggccgccggcgtcacctgccgcgccaccaccgccacgttccaccagctcgacgccgtcgcggtgagggaggaggagtccaggttccggacggcggcggcggagggccgcaacctgctgccgctcacgaggtgcatcttctccgatcacctcacgcccgtgctagcgtaccgctgtctcgttaaggaggacgaacgcgatgcgcccagctttctcttcgagtctgtcgagcaggggtccgagggcaccaatgtggggaggtacagcgtggtcggggcgcagccttctatggaggtcgtggccaaggctaaccatgtgacggtcatggaccatgagatgaagtcgaggagggagcacttcgtgcctgatcccatgaggatccccaggacaatcatggagcagtggaacccgcagattgctgacagcctccctgatgcattttgtggaggatgggttggattcttctcatatgatacagtgcgttatgttgaaacaaagaagcttcctttcagtaaggcaccacatgacgataggaaccttcctgacattcatttaggcctctatagtgacgtcattgtgtttgatcatgttgaaaagaaaacacatgttattcattgggtgaggacagactgctatcgttctgttgatgaagcatatgaagatggaagaaatcggcttgaagctttgttatcaagattacattgcctcaatgtcccaacactttcttctggttctataaaactcaatgttgaaaactttggcccagtaatgcaaaaatcaacgatgtcaagcgaagaatataaaaatatcgttgtccaagctaaagaacacatcttggccggtgacattttccaagttgttttaagccagcgttttgagagacggacattcgccgacccctttgaaatctatcgtgcattgcgcatcgtaaatcctagtccatatatggcctatctacaggcacgaggttgtattctcgtggcatcgagtcctgaaaattcttacccgggtacaaaagaggacaataatcaatcgtccgcttgctggaaccataagaagaggcaaaacaaaagcagaagacaaaactttagaacaattgcttttgagtgatgaaaagcagtgtgctgaacatattatgctagtagatcttggccgaaatgatgttgggaaggtgtccaaaccaggttcagtaaaggtagagaaattgatgaatatcgaacgatattctcatgtcatgcacatcagctcaacagtaactggagagctacgcgatgatcttacgtgttgggatgcgctacgagccgcattgccagttggaaccgttagtggcgctccaaaggtgagagcaatggagttgattgatcagctagaagtgagtaatgcgtgggc

SEQ ID NO: 11684 - DNA, 3986 bp, Zea Mays
tttttttttaatttcatttctcatattttcaataaagaaaataaagggaaaatcccttcaaatgaacagcagagaaagggaggagaatcgatcgatcatcgaccacgctcatgcccacgcccgcttcttcgggataagatcgagcgtcttgactttatctatcctggcggcgacgatgtagtcgttgacggtgaggctgtcgccggcggcggagggcgtggagagctcggccgtcacctggttgggggcctcgaacgccagggtcgccggggcgtgtccggcgccgtggagcgcggcgttgatcctggcgatgagctcctggccgcaggtctcgtcgcgcaccttccagacgcactgcagccgcgcgggacgctgctcgtcgccgtcgccgtcggagaggacgagcctccacccgacgaccttgaagaggagcctgcgcgcgtcgtcgagggagagcggctccgcgtcgggctgcagcgggaggctcgcgagggagagcgcggagagggtggggatgaggatctggtggagcgtgtccacgttgcccagcaccttctccccaaactggctctcgatctcctccgggaaggggtcgcgcgcgcccaagtcgcccagcaggtcggccatcgccaccacgcagccacgcgccctgccccggcggctcccaactgcgacgcccggccggatgaagcttgcgctgctgcagcggcatgtggaggccgcgggtgcagctgctggcggggcgagggagagcctgagcgccattggattgggtggaaacggagcccaatggatggctcaggatgcacactggcagtagctgggaatggattagtgcccggggcagcggggctgcctttatatcgttaaacctctttttttccagcttctagtcccttctgcaacctcaacgccactcattctcgtcatcttcttcctgctccgtggagccctcatcctcatgtggacatcaattgaacagattaatttgcttatgaacagatagttcaattctgaatacagtcacttgcagatcacagcactgagattttaaggcacataaacatatttgtttaagtagcatatgatacatcactccaaagtgcagttcagctgcttgacaagcaggtacagtacagtaaaatacagactgaatacagaataggtacaattccacaatgctttagaaatccccactacacactatccaggaggggacttcgacatatactgtatcagaatccagatgtccaatatcatgacgtctatttacaaaaccatgctgtctgttacatgatgctatagtatcatatttgcactacaccgccaagtggtaggctctcttaccacgttacacaagagctctgattcagccacagctgaatcagagcgaatgccaatgtgtagtttatgggtagaccggagcaatctactagagctctgatgataaaccagaggacattgaggccctgctggtgagagcaggcctcatcgtcaccaaagcagattcatttgcaccagctctcaaagcaatccgaccagcttccaggaacctggcgacagcatcctctgcgtagcggtttgcttccccgacagtcatggtcctgccaatatctgggtacgtgttcagtacgtgatcaccgttgagctgtgaagcaagttgaatcaactccacttgaaattccgagagagacgaatcttccttgggaccaaatggtcgcaatgacttcgtcacctctgggagcttctctgtttgagagaagaaagagtatctagttaggactctagtaaaattgatcattcaagtatatatagagccaaaagtgtcataattgttattccattggcataacacatataccaaactaccataaatacatacctggacagtcagttcttggtgttttccggattttgaagtagctctcaaaggtcccagcccatgcatctctctttgtcagaaagttagaatgtaaattgaatagcttctttactgttgcagggatggacgaatgctcatattgcgaggtatcctgtggaccatttggttcatggatcactgcagaaatgaaaagtaaggtgtgaattctgctggtgaaaacatgcagctcaatgttggaagcataatttaccgatgaataggttcggcacatggttaaagttcctaatttcattaacattagtatgaagataatcaagacacagagatagcataacaatagcataaaaggcagttcagtcctctttcatgagaatctcgttgaaatgctacttatatataagttatatctaacaaactctccacatggagagctgcttgccagacatataggatgtctccacctgcccaccataacacaagtcgatgtaggaagtctgaaatttattcacatagttgataaattccttgcagagctacttccaacacataaattaaacctggaagctgaaagactaaacccatttgttcatcaacagctattaggagcaagaaaattaaagcatcctctatggcaggaaaattaaagattcggcgctagaagtactcaccagtgcccttctctatccaaggtgagatgagaaaggtgggaacacgcaccccaagccgttcgaacttgaagtagtatggatcaggcccaactattccatcaggctggggcactccaacgaccggcgtaggtacatggtcatagaatccaccatgctcatcatatgtgataatcagggccgtctcgttccactgcggactggctctcagtgtttcatacacctctttgacgaacctctgtccccttgccacatcatgcgagggatgatcatcgtttgctgggaacatctcgcaatcaaagtacctttgttcaatcaccacataatttggcagcttccccaacttggcgtgcaacttgaacttgaggctgtactggtggaacttaatgaggtgctttaggcggcggaggctctggtagaagagcgtggccgggatgttctggtagtagatgccaaaagacaggccattctcctcgaggctgtcaaagatggtcttctgcgggaaaccatggatgaggtccttgcgggcgttaaaggtgaggccgtgggaggtcgccgagtggacgaacaggcggttgggctgcgtggaggtgggcacggaggcgaaccagcggtcgaacacggcgaagtcgtcggcgagggaggcgtagatggggacggcgtcgggcttgaagccgctcatgacgttctgcggcatgccgaggcccatgccgcgcgcgttctgggcgaatccggacattgggggcggcaccgcggaggtgtcggcggagccgaagatctgctcccggatgtcctcgaagccgtggccggggtcggagtctacgtagccggcctcgtcggtgacgaagatctccggggatgcggggtcggaggcgttgaggcggttcgactcgcggcccgtgaggccgtcgatgtcggggcgggtgcggcggagccagccgaggatgtggtcgaagctgcggttctccatcaccaccaccaccaccgtcttgaccggggaatggatctcgtgcttccgccgccggcgcttcagcccgcggtggtgcgcgtccaggcagtgcccggagacgaccagcgccagcaggaggagcgccgcgaggaggcgcgccccggggccgcggcgggccacggcagccatcgcgacggaccgggaactaggtcttcgccttcgacggcgggcggtgcgcttgcaggtagggtaggtgcgcttgctgttcagttgaattggtgagctctctgttttttttccttcctttctttttcaatttaagcagttgctttgcttctgcgtacgggcggcggcggtgactttttttaatcgcttccaattttaccccgtgagaaggtagttagggaaagcagacaggtgggtcccacttaggcgccgcccgtggctccacacgtcattgggagggagttcggttcgtggagagtacggt

SEQ ID NO: 11685 - DNA, 3273 bp, Zea Mays
tttttttttaatttcatttctcatattttcaataaagaaaataaagggaaaatcccttcaaatgaacagcagagaaagggaggagaatcgatcgatcatcgaccacgctcatgcccacgcccgcttcttcgggataagatcgagcgtcttgactttatctatcctggcggcgacgatgtagtcgttgacggtgaggctgtcgccggcggcggagggcgtggagagctcggccgtcacctggttgggggcctcgaacgccagggtcgccggggcgtgtccggcgccgtggagcgcggcgttgatcctggcgatgagctcctggccgcaggtctcgtcgcgcaccttccagacgcactgcagccgcgcgggacgctgctcgtcgccgtcgccgtcggagaggacgagcctccacccgacgaccttgaagaggagcctgcgcgcgtcgtcgagggagagcggctccgcgtcgggctgcagcgggaggctcgcgagggagagcgcggagagggtggggatgaggatctggtggagcgtgtccacgttgcccagcaccttctccccaaactggctctcgatctcctccgggaaggggtcgcgcgcgcccaagtcgcccagcaggtcggccatcgccaccacgcagccacgcgccctgccccggcggctcccaactgcgacgcccggccggatgaagcttgcgctgctgcagcggcatgtggaggccgcgggtgcagctgctggcggggcgagggagagcctgagcgccattggattgggtggaaacggagcccaatggatggctcaggatgcacactggcagtagctgggaatggattagtgcccggggcagcggggctgcctttatatcgttaaacctctttttttccagcttctagtcccttctgcaacctcaacgccactcattctcgtcatcttcttcctgctccgtggagccctcatcctcatgtggacatcaattgaacagattaatttgcttatgaacagatagttcaattctgaatacagtcacttgcagatcacagcactgagattttaaggcacataaacatatttgtttaagtagcatatgatacatcactccaaagtgcagttcagctgcttgacaagcaggtacagtacagtaaaatacagactgaatacagaataggtacaattccacaatgctttagaaatccccactacacactatccaggaggggacttcgacatatactgtatcagaatccagatgtccaatatcatgacgtctatttacaaaaccatgctgtctgttacatgatgctatagtatcatatttgcactacaccgccaagtggtaggctctcttaccacgttacacaagagctctgattcagccacagctgaatcagagcgaatgccaatgtgtagtttatgggtagaccggagcaatctactagagctctgatgataaaccagaggacattgaggccctgctggtgagagcaggcctcatcgtcaccaaagcagattcatttgcaccagctctcaaagcaatccgaccagcttccaggaacctggcgacagcatcctctgcgtagcggtttgcttccccgacagtcatggtcctgccaatatctgggtacgtgttcagtacgtgatcaccgttgagctgtgaagcaagttgaatcaactccacttgaaattccgagagagacgaatcttccttgggaccaaatggtcccagcccatgcatctctctttgtcagaaagttagaatgtaaattgaatagcttctttactgttgcagggatggacgaatgctcatattgcgaggtatcctgtggaccatttggttcatggatcactgcagaaatgaaaagtgagatgagaaaggtgggaacacgcaccccaagccgttcgaacttgaagtagtatggatcaggcccaactattccatcaggctggggcactccaacgaccggcgtaggtacatggtcatagaatccaccatgctcatcatatgtgataatcagggccgtctcgttccactgcggactggctctcagtgtttcatacacctctttgacgaacctctgtccccttgccacatcatgcgagggatgatcatcgtttgctgggaacatctcgcaatcaaagtacctttgttcaatcaccacataatttggcagcttccccaacttggcgtgcaacttgaacttgaggctgtactggtggaacttaatgaggtgctttaggcggcggaggctctggtagaagagcgtggccgggatgttctggtagtagatgccaaaagacaggccattctcctcgaggctgtcaaagatggtcttctgcgggaaaccatggatgaggtccttgcgggcgttaaaggtgaggccgtgggaggtcgccgagtggacgaacaggcggttgggctgcgtggaggtgggcacggaggcgaaccagcggtcgaacacggcgaagtcgtcggcgagggaggcgtagatggggacggcgtcgggcttgaagccgctcatgacgttctgcggcatgccgaggcccatgccgcgcgcgttctgggcgaatccggacattgggggcggcaccgcggaggtgtcggcggagccgaagatctgctcccggatgtcctcgaagccgtggccggggtcggagtctacgtagccggcctcgtcggtgacgaagatctccggggatgcggggtcggaggcgttgaggcggttcgactcgcggcccgtgaggccgtcgatgtcggggcgggtgcggcggagccagccgaggatgtggtcgaagctgcggttctccatcaccaccaccaccaccgtcttgaccggggaatggatctcgtgcttccgccgccggcgcttcagcccgcggtggtgcgcgtccaggcagtgcccggagacgaccagcgccagcaggaggagcgccgcgaggaggcgcgccccggggccgcggcgggccacggcagccatcgcgacggaccgggaactaggtcttcgccttcgacggcgggcggtgcgcttgcaggtagggtaggtgcgcttgctgttcagttgaattggtgagctctctgttttttttccttcctttctttttcaatttaagcagttgctttgcttctgcgtacgggcggcggcggtgactttttttaatcgcttccaattttaccccgtgagaaggtagttagggaaagcagacaggtgggtcccacttaggcgccgcccgtggctccacacgtcattgggagggagttcggttcgtggagagtacggt

SEQ ID NO: 11686 - DNA, 1576 bp, Zea Mays
cacacccacaacaaaccctcgccgccaagggcgccctcgcgccagatctgtcgcccgccttcgcgggagcttttccgtatcgggtgagctcgaggggtagggcccggtctgggttagtttcctggagaggttcccgtgaatgttaggctgcgactgcgatggaattgaagtacaagtactcggtggaaagctttgctggtgcatatgattctgatcagaaggtatatgctgtgatgtcattcctttcccttatcctccctgacaacgcgatatattttaattctattcgagagatatatgatgcttgggtcatctacaattttctctcactctgcttggcatgggtgggaggtcctggtgctgtggtggtaagcttgagtggccgaaccctgaaaccgtcgtggattctgatgacttgctgttatccagctattcctctagatgggcgttttatacgaagatgcaaacaaggttgcttgcagtttgtgattctcaagcctattttggttgttatcacttttatactttacgcgaaaggaaaatacaaagatggcaacttcagtgtcaaccaatcctatctctacataactatcatatatacaatctcatactcgatggctttgtatgcccttgcattgttctatgcggcttgcagagatctacttcggccatataatcctgtcccaaaattcatcatgataaaatcagtggtgtttctcacatattggcagggtgtcctggttttccttgctgcaaaatctcgatttatcaagaatgctgataaggctgctgatcttcagaactttgtgttgtgtgttgagatgctaatagcagccattggtcacttatttgccttcccctacaaggaatatgcaggtccgaatgcccgcccttcaggtggtttcagagaaagccttcttcatgctttgaaattcaatgatttctaccatgacactgttcaccagtttgctcctacatacaatgaatatgtgctctacaatcacaatgagggagacaatgcagaaacgaaatttccctcagggagcactgccacaagtgggcagggtgtggagttggctggcattaccgttgtggcttcaaacagtccagtgacatcaagtgtatcatgcaaccaggcagatcaggaagagacaatgacaaccccaatcaaggacaaagtcgatcctggagggctttatgatctcacagaattgcttgatgtggatttgtctagctacccagacaaggttcctgcaatcaccgatgtaagaaaacaatgaccaagcttgatgagatgtactattagtagggttgcaaacttgcaattggggggaaattgtgattttgtcgaagagttgccatagttaacatttgtaaaaatgtgtgtattacttggtctgattttcccccattcaatggggtttattcattgtcaaaagctgctgccacatggcctccctcacccctgctctttactaactgtaaattgttgctcaaggtgaactttaggtgtcaaggggactccatactaatacaatattctgggtttctgatggagtattttccgattttactc

SEQ ID NO: 11687 - DNA, 1742 bp, Zea Mays
ctccgtccgctacctttctttccctcttccgtcttccccaacccaaccacccgcaccaagccgacccagagagaggagagcctgcttgcctgcctgggctggactcccccttcgcctcctcctcgtccgatcggccccgccccgcctagctgctgctgctgctgctgctgctgctgcgcgcgcgccgcggcgggacccgggaggagcgccggtggtggtggccgggcccgatggagtgggcgtcggcggcgtacacggctgcggcgctggtgtgcgccgcggcggcgagcgtggtcgcgctcgcgcacatctaccgccacctcctccactacgccgagcccatctaccagcggttcatcgtccgcatcatattcatggtcccggtatatgctgtgatgtcattcctttcccttatcctccctgacaacgcgatatattttaattctattcgagagatatatgatgcttgggtcatctacaattttctctcactctgcttggcatgggtgggaggtcctggtgctgtggtggtaagcttgagtggccgaaccctgaaaccgtcgtggattctgatgacttgctgttatccagctattcctctagatgggtgcgcgttttatacgaagatgcaaacaaggttgcttgcagtttgtgattctcaagcctattttggttgttatcacttttatactttacgcgaaaggaaaatacaaagatggcaacttcagtgtcaaccaatcctatctctacataactatcatatatacaatctcatactcgatggctttgtatgcccttgcattgttctatgcggcttgcagagatctacttcggccatataatcctgtcccaaaattcatcatgataaaatcagtggtgtttctcacatattggcagggtgtcctggttttccttgctgcaaaatctcgatttatcaagaatgctgataaggctgctgatcttcagaactttgtgttgtgtgttgagatgctaatagcagccattggtcacttatttgccttcccctacaaggaatatgcaggtccgaatgcccgcccttcaggtggtttcagagaaagccttcttcatgctttgaaattcaatgatttctaccatgacactgttcaccagtttgctcctacatacaatgaatatgtgctctacaatcacaatgagggagacaatgcagaaacgaaatttccctcagggagcactgccacaagtgggcagggtgtggagttggctggcattaccgttgtggcttcaaacagtccagtgacatcaagtgtatcatgcaaccaggcagatcaggaagagacaatgacaaccccaatcaaggacaaagtcgatcctggagggctttatgatctcacagaattgcttgatgtggatttgtctagctacccagacaaggttcctgcaatcaccgatgtaagaaaacaatgaccaagcttgatgagatgtactattagtagggttgcaaacttgcaattggggggaaattgtgattttgtcgaagagttgccatagttaacatttgtaaaaatgtgtgtattacttggtctgattttcccccattcaatggggtttattcattgtcaaaagctgctgccacatggcctccctcacccctgctctttactaactgtaaattgttgctcaaggtgaactttaggtgtcaaggggactccatactaatacaatattctgggtttctgatggagtattttccgattttactc

SEQ ID NO: 11688 - DNA, 1374 bp, Zea Mays
caattccacgccatgcacggtatatgctgtgatgtcattcctttcccttatcctccctgacaacgcgatatattttaattctattcgagagatatatgatgcttgggtcatctacaattttctctcactctgcttggcatgggtgggaggtcctggtgctgtggtggtaagcttgagtggccgaaccctgaaaccgtcgtggattctgatgacttgctgttatccagctattcctctagatgggcgttttatacgaagatgcaaacaaggttgcttgcagtttgtgattctcaagcctattttggttgttatcacttttatactttacgcgaaaggaaaatacaaagatggcaacttcagtgtcaaccaatcctatctctacataactatcatatatacaatctcatactcgatggctttgtatgcccttgcattgttctatgcggcttgcagagatctacttcggccatataatcctgtcccaaaattcatcatgataaaatcagtggtgtttctcacatattggcagggtgtcctggttttccttgctgcaaaatctcgatttatcaagaatgctgataaggctgctgatcttcagaactttgtgttgtgtgttgagatgctaatagcagccattggtcacttatttgccttcccctacaaggaatatgcaggtccgaatgcccgcccttcaggtggtttcagagaaagccttcttcatgctttgaaattcaatgatttctaccatgacactgttcaccagtttgctcctacatacaatgaatatgtgctctacaatcacaatgagggagacaatgcagaaacgaaatttccctcagggagcactgccacaagtgggcagggtgtggagttggctggcattaccgttgtggcttcaaacagtccagtgacatcaagtgtatcatgcaaccaggcagatcaggaagagacaatgacaaccccaatcaaggacaaagtcgatcctggagggctttatgatctcacagaattgcttgatgtggatttgtctagctacccagacaaggttcctgcaatcaccgatgtaagaaaacaatgaccaagcttgatgagatgtactattagtagggttgcaaacttgcaattggggggaaattgtgattttgtcgaagagttgccatagttaacatttgtaaaaatgtgtgtattacttggtctgattttcccccattcaatggggtttattcattgtcaaaagctgctgccacatggcctccctcacccctgctctttactaactgtaaattgttgctcaaggtgaactttaggtgtcaaggggactccatactaatacaatattctgggtttctgatggagtattttccgattttactc

SEQ ID NO: 11689 - DNA, 5959 bp, Zea Mays
aaagagctccctttcttcttcttctctctcaatcgagaaaagatccatgcctattctgtctaatcgagagctcggtagatcgaccacaagtcaaccatgtcttacaataaatctgtaaaaattatgatataagcaaagttgagtataaacatggctgcaactactgctttggcatctgaacgaaagccgacgatgactgacaactaggcccacgtggcacaacggtaagacctggagacggaacccaagtgataggtaaatcatagtataaatccactatattgtgatgtgtcgctcctcccatgcatagtttagtcttcctcttgcgcttgatcgccctatagacttagttgtcatgatacctactggcaccccggacagtgagatgtgtagccttaactaggtgtactcagaatctgtttcattatacgtctagtaagaaaatgtatccatcctttagaacaacttcagtgcgggatctaagggcatctatcaatacctagagaaggacatactctcggctaccgccaagatacattcaaggatcctgatatagaaagcttctatatggccaccatactagaaccagtggcgtaaaaatatgatggcctacccatcacgtctgccactgccaaccagtggcgtgtagtgtgtctgaaaaagaagaggaaggcccgcggattgccctgtacacctcacgtccgctcacatcctcggattgttctgttctcgtctcgtctccagctgtaaaagatatatactccagtgccgtgatgtgcccctgaactgaaagagctccctttcttcttcttcttcttctctctatcgatcgagaaaagatccatgcctattctgtctaatctatagctcggtagattgaccacaagtcaaccctgtcttgcaataaatctgtaaaaattatggtacaacacattaaaggagcgatgtatgccagtacagacttgacaagtgtgatattgccatgacttggggtttgatattattatatggtatgtgtatcgatcttacacatgcatgtgtagtactcgttgttcttacacagcagctatatatgtgatcttacacagcagctaccagttgacatgcatgtgtagtactcgttgttcttggtttttacttcttccgtttcgttttagttgtcgctgaatagtgcaaaattgaactatcagcgacaactaaaaagaaacggaggtagtatatatgtgatgtgagtggttagatgctgagttagaaagtaggctaaaattattaaacaaaaaaaatattggctaccatttacgtggcctgctcgatgcctcgatccttcatcgagtgagaaaaaaaatactagtgaaaaagacggagcaaagggctgtgagtcagagaagcggagacagacgggtctcaaactctcaatgggggtggtgcacgtacgtgttaagtgagacacagggccgcctaacaaatgtctgggtctggcgatgccgtctgtggcggcagtcggcacggccgtacgtgtcgtgtcgtgtcgtgtgtgccaaacttgcattgtgtgcggtgcaaacgacggaagtgcaagccgttcctggccggccccgcgcgcgccgtggcagacgacgacacggcaagcaccacgcacggatgacggctgtggcgcaaatggcgcgcgcgcaggaagaaacgtagggaaacatcccgcatgcaggacgggacggcacggcaggccgaaagcaacgagatctggactggaccgttcgtaatgagctttgcgccggctttagacttgtggcgtgacttgactccgtgcggaagattgttggtttaggatgtgtttgtttgatgtcaaagtgagatgagacgaaggtgacaccgtcttctcgacttttttgaatcatatcgccaccaaaagttactccgtaatttatcttaccctaacacaactctcatccaaacactttaaaaactggtctgtttgagagagctttacttcagagtttattcgttttatgactgttttctagtcattaatcatccgctaatcatcaaggataattaaagaaatccacgcaaattaattgtattacagaagttgtaatctatatgcaaaccaaacactcttaaaccctatgtcaccaatctgttaaagtcgtttaatgatgaaggtggaaaaccgaaacaataattattaaaataaagccatcccaaaaatagccttaatctacccatttatttcgaaactggcttcatatttacgatgaagcaaacacaaacagtactgcagcagtcggcatcggtggtttcgttctcaaagttaaaacaagatggcaagtggcgtcctctagtctagagaaagaaagggttaggaagctccggttttcaccaatgggcaagagcgggaccaagcgtggatggtagaaaaactttggttgagatcaaattttataaagctacaaacaagtgcaatttagtatacagagatttcagatgattttctaaacattttaaagcatataataccacaatattgctcatactgcagtattgcttcaatcccgcagaaaaaaaactttgttcccaaacacactactattgtttttatatactagacgttgctacgatttccattttatatttgagtatactctcttcgctccaaaaccgtggtcgttttaccttctaaaattttatgtctatattgaaatgaatgatgacaaatctagacatatatatataataaatacattaattattttatgaatcaactaaaaaggtaaacaaattttattttgtaacggaatgaaggagtacaaaaacacaaatgatgacacgtatgccaccatcgcgctcgcgcccttgtccggcctttggatcaagtccatccatccgtgactcagcagacacgtagcggcagccgaccacggacgggatcaccaacactgttacacagcctacactgctgtcggcgcggcggcggcgtatgggaaacaaagaccggtaaaaatcgagtggacgatcaacccagcacgtacagacgttacgccttgatgctgatgcggcactgtgacgtggccgtgggcccgtgtcgtgtcctgcaccctgggccggcggcatctcgtagtccatcatcaccacatccatacagagtacagacccaccgcaacacgacaccgcgccgggcggtagctacgtcgagcggccgtccgaagcccaagcgaagacaccgccacccatcccgccgtacgagtgccggcccctgccctgccggctgtaccccattgccctgcgtccaagtccaaccgagcccggacgagcgtctcattctgccggtgcccggatggccggatctcatattgcggatccgcgcgcgcaggaacgcgacgccttgccactgccacctttccgtcccgctcgtcctccgtgttccaccagtcgtggcgcttgcccgcccgctcgacacgtggacacaggcaacggtggagtggagctcggtgaagaagaagctggacctcgtcgcacgcggcaaggtgtaccggagggagagttcgagccagcaatggcgaggccacggccggcggcggccaccctcctcctggtcaccttcctcctggccgcggccgccgccgagaccacggacgtcatcagcggcggcggcggcatggtgggcgtggacggcacgcggttcgtggtgggcggcgccgccggaggcaggcccgtctacttcagcgggttcaacgcgtactggctcatgctggtggcgtcggagccggcgcggagggacaaggtggtggcggcgttccgccaggcggccgaccacgggctcaacctcgcgcggacctgggccttcagcgacggcggggacacgccgctgcaggcggcgccgggcgtctacgacgaggccatgttccagggtctggacttcgtggtcgccgaggccaggcggcacggcatctacctcctcctctgcctcgccaacaacttccacgacttcggcggcaagcggcagtacgtgcagtgggccagggacgccggccaccgcctcgccaccgacgacgacttcttcaacagcaccgtcgtcaagggatactacaagaaccacgtcaagacggtgctgacgcgggtgaacaccctcaccggcgtggcgtacaaggacgaccccgccatcctcggctgggagctcatgaacgagccccgctgcgacgccgagcccaccggcgccatggtgcaggtgagctgcatccactacatagtgtaccaatcaatcagctagctcgtgcaccacgcgctgcctgaactatccagcaccagtcgagcactgcttgctctgcctgccctcacatcacatgcatgcaacctgatcaaatcaaatgaaaaaaaaaaagaaatggaggagacctggccggcaggcggcagcaattaactgccggcccgtcagtcaaccgaccgacgaccgatccatcaccttctacgagccacatgctccaccgaccaccacgcccacgcacgaagattcatttggatctgtgtgactgaccttgaccgcgccggccgcgcgcgcgcgtgcgtgcaggcgtgggtggaggagatggcgccgtacgtgaagtccgtggacggcgggcacctggtgacggcggggctggagggcttctacggcgcgggcgcgcacgagagcaaggacctcaacccctggcgcatctactacggcaccaacttcgtggagacgcaccgcgcgcgcggggtggacttcgccaccatccacctgtacccggacgcctggctctggggctgcgccgccgacgcgcagcgcgccttcctccgcaactggacgcgcgcccacgcccgcgacgccgcgctctacctgcgcaagccgctgctcgtcaccgagtacggcaagttcctgtgggagggcgtcgccggcgccaaccgcacccagcgggacgccttcctccgcctcgtgctcgactccatctacgcctccgccgcgcggggaggcccgctcgtcggcggcgccttctggcagctgctcgacgacggcatggacacgctcagggacggctacgagatcatactccccgacgaccagctcgccgccaccatcatcgccacccactcccgccagctggccgacctcagcctcgtcaccgccgaggacgtccgggaagaggaggcggcgccgcttcgccggaggaggaggaagagcgcgcatggcaagatacaccacgtactcagcgtgggtggtggtactagtagtgatgatagttattatacgcaacggttgctgcacatattcttgcttcgtctcatctctttgttcgaatcaatctcttcattgtttcagtagtgtataggttacgtgtagaatttttttttctctatcgccaccaggaaaaaaaaacctggttaggtgtgtgtgcgcgtgtgcaggttgttctagaaagttaggcatagccagtgtgtgtagagtatacagtttctcttttttttttgtcttttttcttttctttgagggcaaaaaagacaggtgctctgatcctttcattcaaaaggaagcaacagagtttacaagaagattacaagaggccaggccaagagccggtggtcaaaatgaaagagaacagggacaggcagagccaaacactttacaccaaaagttttgcataatggtgtgttaagccttcgaatacattaagatagaagttaccgtgtcttacatatcaaagtgtattgtatcttgtttagattagataacatagtgtataactcatagcttgtttttcctaaacttttaattcatgagatctttgatcacaaagggttggattgtcgaagtgtacaacttaggtaggtcttagaccgcctccaacaagcacttgtaaatggtcatgtcttgtatattaagcgtctctaacagattctatatcccctcccgtatctcatctactattttaaatttcactctgca

SEQ ID NO: 11690 - DNA, 6090 bp, Zea Mays
tagagagtgaattgaatggagtaatatattgggcacgtggtgacccgagtcattgttgttgcatgaatttgatcgtaaccctgtcccttaagtaacgatccattaattcttccggcactggatatatacacacactcatgctgtaagaatacgatggcctaccagcatcacgtctgccactgccattgccctgtacacctcacgtccgctcacatcctcggattgttttgttctcgtctcctctcgtctccagtaaaagatacgtatatactccagtgtcgtgatgtgcccctgaactgaaagagctccctttcttcttcttctctctcaatcgagaaaagatccatgcctattctgtctaatcgagagctcggtagatcgaccacaagtcaaccatgtcttacaataaatctgtaaaaattatgatataagcaaagttgagtataaacatggctgcaactactgctttggcatctgaacgaaagccgacgatgactgacaactaggcccacgtggcacaacggtaagacctggagacggaacccaagtgataggtaaatcatagtataaatccactatattgtgatgtgtcgctcctcccatgcatagtttagtcttcctcttgcgcttgatcgccctatagacttagttgtcatgatacctactggcaccccggacagtgagatgtgtagccttaactaggtgtactcagaatctgtttcattatacgtctagtaagaaaatgtatccatcctttagaacaacttcagtgcgggatctaagggcatctatcaatacctagagaaggacatactctcggctaccgccaagatacattcaaggatcctgatatagaaagcttctatatggccaccatactagaaccagtggcgtaaaaatatgatggcctacccatcacgtctgccactgccaaccagtggcgtgtagtgtgtctgaaaaagaagaggaaggcccgcggattgccctgtacacctcacgtccgctcacatcctcggattgttctgttctcgtctcgtctccagctgtaaaagatatatactccagtgccgtgatgtgcccctgaactgaaagagctccctttcttcttcttcttcttctctctatcgatcgagaaaagatccatgcctattctgtctaatctatagctcggtagattgaccacaagtcaaccctgtcttgcaataaatctgtaaaaattatggtacaacacattaaaggagcgatgtatgccagtacagacttgacaagtgtgatattgccatgacttggggtttgatattattatatggtatgtgtatcgatcttacacatgcatgtgtagtactcgttgttcttacacagcagctatatatgtgatcttacacagcagctaccagttgacatgcatgtgtagtactcgttgttcttggtttttacttcttccgtttcgttttagttgtcgctgaatagtgcaaaattgaactatcagcgacaactaaaaagaaacggaggtagtatatatgtgatgtgagtggttagatgctgagttagaaagtaggctaaaattattaaacaaaaaaaatattggctaccatttacgtggcctgctcgatgcctcgatccttcatcgagtgagaaaaaaaatactagtgaaaaagacggagcaaagggctgtgagtcagagaagcggagacagacgggtctcaaactctcaatgggggtggtgcacgtacgtgttaagtgagacacagggccgcctaacaaatgtctgggtctggcgatgccgtctgtggcggcagtcggcacggccgtacgtgtcgtgtcgtgtcgtgtgtgccaaacttgcattgtgtgcggtgcaaacgacggaagtgcaagccgttcctggccggccccgcgcgcgccgtggcagacgacgacacggcaagcaccacgcacggatgacggctgtggcgcaaatggcgcgcgcgcaggaagaaacgtagggaaacatcccgcatgcaggacgggacggcacggcaggccgaaagcaacgagatctggactggaccgttcgtaatgagctttgcgccggctttagacttgtggcgtgacttgactccgtgcggaagattgttggtttaggatgtgtttgtttgatgtcaaagtgagatgagacgaaggtgacaccgtcttctcgacttttttgaatcatatcgccaccaaaagttactccgtaatttatcttaccctaacacaactctcatccaaacactttaaaaactggtctgtttgagagagctttacttcagagtttattcgttttatgactgttttctagtcattaatcatccgctaatcatcaaggataattaaagaaatccacgcaaattaattgtattacagaagttgtaatctatatgcaaaccaaacactcttaaaccctatgtcaccaatctgttaaagtcgtttaatgatgaaggtggaaaaccgaaacaataattattaaaataaagccatcccaaaaatagccttaatctacccatttatttcgaaactggcttcatatttacgatgaagcaaacacaaacagtactgcagcagtcggcatcggtggtttcgttctcaaagttaaaacaagatggcaagtggcgtcctctagtctagagaaagaaagggttaggaagctccggttttcaccaatgggcaagagcgggaccaagcgtggatggtagaaaaactttggttgagatcaaattttataaagctacaaacaagtgcaatttagtatacagagatttcagatgattttctaaacattttaaagcatataataccacaatattgctcatactgcagtattgcttcaatcccgcagaaaaaaaactttgttcccaaacacactactattgtttttatatactagacgttgctacgatttccattttatatttgagtatactctcttcgctccaaaaccgtggtcgttttaccttctaaaattttatgtctatattgaaatgaatgatgacaaatctagacatatatatataataaatacattaattattttatgaatcaactaaaaaggtaaacaaattttattttgtaacggaatgaaggagtacaaaaacacaaatgatgacacgtatgccaccatcgcgctcgcgcccttgtccggcctttggatcaagtccatccatccgtgactcagcagacacgtagcggcagccgaccacggacgggatcaccaacactgttacacagcctacactgctgtcggcgcggcggcggcgtatgggaaacaaagaccggtaaaaatcgagtggacgatcaacccagcacgtacagacgttacgccttgatgctgatgcggcactgtgacgtggccgtgggcccgtgtcgtgtcctgcaccctgggccggcggcatctcgtagtccatcatcaccacatccatacagagtacagacccaccgcaacacgacaccgcgccgggcggtagctacgtcgagcggccgtccgaagcccaagcgaagacaccgccacccatcccgccgtacgagtgccggcccctgccctgccggctgtaccccattgccctgcgtccaagtccaaccgagcccggacgagcgtctcattctgccggtgcccggatggccggatctcatattgcggatccgcgcgcgcaggaacgcgacgccttgccactgccacctttccgtcccgctcgtcctccgtgttccaccagtcgtggcgcttgcccgcccgctcgacacgtggacacaggcaacggtggagtggagctcggtgaagaagaagctggacctcgtcgcacgcggcaaggtatttcttcaaacggaggcgtcgcgttcaagggccacgcgcgccgtcgacgctggcctagagctagctgcgcagctcgtacacgactacacgtacgtacgaatggcagtgctaaacactggtgggggctctattaatagagatcccctgttaatatatatatgcgcttggcaggtgtaccggagggagagttcgagccagcaatggcgaggccacggccggcggcggccaccctcctcctggtcaccttcctcctggccgcggccgccgccgagaccacggacgtcatcagcggcggcggcggcatggtgggcgtggacggcacgcggttcgtggtgggcggcgccgccggaggcaggcccgtctacttcagcgggttcaacgcgtactggctcatgctggtggcgtcggagccggcgcggagggacaaggtggtggcggcgttccgccaggcggccgaccacgggctcaacctcgcgcggacctgggccttcagcgacggcggggacacgccgctgcaggcggcgccgggcgtctacgacgaggccatgttccagggtctggacttcgtggtcgccgaggccaggcggcacggcatctacctcctcctctgcctcgccaacaacttccacgacttcggcggcaagcggcagtacgtgcagtgggccagggacgccggccaccgcctcgccaccgacgacgacttcttcaacagcaccgtcgtcaagggatactacaagaaccacgtcaagacggtgctgacgcgggtgaacaccctcaccggcgtggcgtacaaggacgaccccgccatcctcggctgggagctcatgaacgagccccgctgcgacgccgagcccaccggcgccatggtgcaggcgtgggtggaggagatggcgccgtacgtgaagtccgtggacggcgggcacctggtgacggcggggctggagggcttctacggcgcgggcgcgcacgagagcaaggacctcaacccctggcgcatctactacggcaccaacttcgtggagacgcaccgcgcgcgcggggtggacttcgccaccatccacctgtacccggacgcctggctctggggctgcgccgccgacgcgcagcgcgccttcctccgcaactggacgcgcgcccacgcccgcgacgccgcgctctacctgcgcaagccgctgctcgtcaccgagtacggcaagttcctgtgggagggcgtcgccggcgccaaccgcacccagcgggacgccttcctccgcctcgtgctcgactccatctacgcctccgccgcgcggggaggcccgctcgtcggcggcgccttctggcagctgctcgacgacggcatggacacgctcagggacggctacgagatcatactccccgacgaccagctcgccgccaccatcatcgccacccactcccgccagctggccgacctcagcctcgtcaccgccgaggacgtccgggaagaggaggcggcgccgcttcgccggaggaggaggaagagcgcgcatggcaagatacaccacgtactcagcgtgggtggtggtactagtagtgatgatagttattatacgcaacggttgctgcacatattcttgcttcgtctcatctctttgttcgaatcaatctcttcattgtttcagtagtgtataggttacgtgtagaatttttttttctctatcgccaccaggaaaaaaaaacctggttaggtgtgtgtgcgcgtgtgcaggttgttctagaaagttaggcatagccagtgtgtgtagagtatacagtttctcttttttttttgtcttttttcttttctttgagggcaaaaaagacaggtgctctgatcctttcattcaaaaggaagcaacagagtttacaagaagattacaagaggccaggccaagagccggtggtcaaaatgaaagagaacagggacaggcagagccaaacactttacaccaaaagttttgcataatggtgtgttaagccttcgaatacattaagatagaagttaccgtgtcttacatatcaaagtgtattgtatcttgtttagattagataacatagtgtataactcatagcttgtttttcctaaacttttaattcatgagatctttgatcacaaagggttggattgtcgaagtgtacaacttaggtaggtcttagaccgcctccaacaagcacttgtaaatggtcatgtcttgtatattaagcgtctctaacagattctatatcccctcccgtatctcatctactattttaaatttcactctgca

SEQ ID NO: 11691 - DNA, 951 bp, Zea Mays
ctaaaacggaagggtccttgttgtaatttgggtcaagcctttaaacgccgtacagcggataggataaggccatctcccataacggagagagacgaagagagcggaagcgaaagagcagcggcgcaaaggaaagggagccatgctcgcgtcgccggcgctcgccggcgcccactccttcgcggcgtccgtgtatggaagcctcctcgtcccctcgcctcccgtccccgcgccggcacgtcgcgcggcgctgtccgtcgtcgccaaggtcaaggtggccacgccccaggacgaccgcatcgcccgccacgtccgcctccgcaagaaggaaatagcacaaaagatcggtgaggtgattgccaagtcttgtttggagaaagggatcaccaaggttgtcttcgaccgaggtggtttcctctaccatggccgcataaaggctctcgctgattctgccagagagcacgggcttgaattctgagtcgtccaggcgtttgttcatatctccaggatcacctatccgtctgtactctatggtgcacatgatatgtactcatataataccatagaatgataatagggtcagtacgctgaatactctgcagctgcggactgcagagtgtctcctagaaacgtcatgtttgaacaaccaaaagccaagcagtcgctgttgggctactgctcacagcgtcatctgatgtatgttccttctgggcactgttgtacgactcgttatacaaatgagggtgtttggttctagggaaaggtcatatttgaatgcacaaaaactaatgattagtcgttaaaattagccgaaagatatccaaacagtctagctaatagttaggtagttatttagtagtccgttaattttactagcattttttagccaagtagctagctttagtgcatttaaacaaactctaaagtttagtctatgttatatctatgttatat

SEQ ID NO: 11692 - DNA, 1220 bp, Zea Mays
aatttgggtcaagcctttaaacgccgtacagcggataggataaggccatctcccataacggagagagacgaagagagcggaagcgaaagagcagcggcgcaaaggaaagggagccatgctcgcgtcgccggcgctcgccggcgcccactccttcgcggcgtccgtgtatggaagcctcctcgtcccctcgcctcccgtccccgcgccggcacgtcgcgcggcgctgtccgtcgtcgccaaggtcaaggtggccacgccccaggacgaccgcatcgcccgccacgtccgcctccgcaagaaggtaagtggcaccactgagaggccgaggttgagtgttttccgctcaaacaaacatctgtacgctcaagtcatcgacgacacaaagcaatgtactctggcttcagcttcaaccatgcacaaatctctctccaaggaatttgaatactcggctgggccaacgatccatcattggaaactaggtgataaattatgtggtaagggctaaggacttcaatgtgcaattaattatctatgacccaatcagatgtatatactctgtaacgacaatttcagattacatggtctgaggtactcctactttaaacacggggcttgtttcttctagattgtgtaatcactacaaatatgcatgcattcctgatttctccacaagaatagacacgaccttatgcctctgatcattggcgaaaccctggttgtagtaaaagtaaaacagggcaccggagtagataaggtgaatagacaatgcagcctttgatatattcatattcataactgataagtccagtatttcatcagtcatttgtgcacttcaatatttgcttatatgtacataaaacagtacagttaaatctaggttcaaaatcccctttctgaaaaaccaatgaggttttaggacatcatgtttttcctagtaagatcacaatggcttgtacatggtctggttaccggaacttgaacaatcgcagggaaccatacactgttttcttcagatgattctagatataaaaagcacaaagcagtttgaagttgtgcaagtcctaggttcaaaactccccttctgaaaaatcaaatgaggttttatgacagcatgcttttcctagtaagatcacagtggcttgtaacatagtctggttacagcaacttgagcaatctcagggaaccatgcacttcgttttcttcagatggttctgcatctt

SEQ ID NO: 11693 - DNA, 1226 bp, Zea Mays
cagcacaaggtgaagagggcgcaggaggaaaggaaccaagggatggcgttcaagtgttttctgactcttgaggatggaggctattcttgaaagaccgaagtacgagtgcttgctgtttgatcttgatgacactctgtaccccttcagtgctggcatcaatctagcttgtcgcaaaaacatacaagattacatgcggcaccacctgcatattgaagaaaggcaggttgcagatatgtgcctggacctgtacaaggaatatggcaccacaatggctggccttaaggcattaggctacgaatttgacaacgatgagttccatgcaactgttcatggtaccttgccatatcacaacctgaggcctgaccctgttttgaggaccctcctactttcaattccacagagaaaaatagtgttcacaaattctgacaaagctcacgcggaggaagctctgtgcagacttggtttacagggttgcttcgatggcgtgatctgcttcgagacactgaatccctgcaatggtccgagcgcgttccgagacggcaacggcatgctgttcccagatgaaacgttccccgactcggctgatctgaatgaatccgatgggttcagacccatatcacccatcctctgcaagccctccattgaagccatggaagctgtaactcggattgcaaacgttgatcccaagaaaacaatattttttgacgacagcactcggaacatagcttcgggaaaggcagcaggcttccatactgtgattgttggcaggccgacacttgttccaggggctgaccatgctttggagagcattcacaacatgaaggaagctctacccgagatatgggacggccaggatcggtctgagtctgatgctcttctttctcccactgctgtcgagactccggtggctgcttgaatctgggggctatgtatccttcctgcgctaccatgagacctgctaccaatagttttgggtttggatagtggatgcagaaggtgtaccctagtagcttcattaatgagaaatagcattgcactcttatgttagttccaaatattaatggaactgtatcagttacattacagcagcgtgagctcaagtcgctgaacaagcaatatgcagtcagtattctgcagatgttcgcaccattctctatgtaccatgattgtacctcagaataaactgacagtactccaattctaccaagcttcaaaggcttacgatt

SEQ ID NO: 11694 - DNA, 1374 bp, Zea Mays
gaaagctacaggcaaattggcttctggatcattcgaatgctgaataccatgccaatatgccatgaatcaatctgctcaggcagctgcataactgttctgagagctttgggctgctataagtacagacagaacgagaagcaccggctctaacaccattcatctcagattcagaagccttcaacttcaaatccttgcattttgaagttttctgactcttgaggatggaggctattcttgaaagaccgaagtacgagtgcttgctgtttgatcttgatgacactctgtaccccttcagtgctggcatcaatctagcttgtcgcaaaaacatacaagattacatgcggcaccacctgcatattgaagaaaggcaggttgcagatatgtgcctggacctgtacaaggaatatggcaccacaatggctggccttaaggcattaggctacgaatttgacaacgatgagttccatgcaactgttcatggtaccttgccatatcacaacctgaggcctgaccctgttttgaggaccctcctactttcaattccacagagaaaaatagtgttcacaaattctgacaaagctcacgcggaggaagctctgtgcagacttggtttacagggttgcttcgatggcgtgatctgcttcgagacactgaatccctgcaatggtccgagcgcgttccgagacggcaacggcatgctgttcccagatgaaacgttccccgactcggctgatctgaatgaatccgatgggttcagacccatatcacccatcctctgcaagccctccattgaagccatggaagctgtaactcggattgcaaacgttgatcccaagaaaacaatattttttgacgacagcactcggaacatagcttcgggaaaggcagcaggcttccatactgtgattgttggcaggccgacacttgttccaggggctgaccatgctttggagagcattcacaacatgaaggaagctctacccgagatatgggacggccaggatcggtctgagtctgatgctcttctttctcccactgctgtcgagactccggtggctgcttgaatctgggggctatgtatccttcctgcgctaccatgagacctgctaccaatagttttgggtttggatagtggatgcagaaggtgtaccctagtagcttcattaatgagaaatagcattgcactcttatgttagttccaaatattaatggaactgtatcagttacattacagcagcgtgagctcaagtcgctgaacaagcaatatgcagtcagtattctgcagatgttcgcaccattctctatgtaccatgattgtacctcagaataaactgacagtactccaattctaccaagcttcaaaggcttacgatt

SEQ ID NO: 11695 - DNA, 1671 bp, Zea Mays
ggacgatggatcgtgccgttacccgtcacggggttccgctgtttcaagtccttctggttttcacagccgtgattgagatccaatggtccactgtatccagcatttactgcaaggacatgccgccgaacgtgtatcggcctcacagtgtcacaataactgaatttggtgccgttggggatggtgtcaccctcaatacaaaggcattccagaatgcaatcttctatctcaattcatttgcggacaagggtggcgcgcagcttttcgtgcctgcgggaaggtggttgacggggagttttcatcttatcagccatctcactttatcactggacaaggatgcaataataattggatctccggattcatctcattggccagttatcgatcctcttccatcctatggtcgaggtagagaccttcctggaaaaagacatcagagtctgatttttggattaaatctgacggatgtaattataactggtgctaatggttcaattgatggtcaaggagctatttggtggggctggttccacaaccacacattgaattatactagaccacatcttgtggagttgatgtattctaccaatgtcgtcatatctaatctaaccttcaagaactcgccgttttggaatatccaccctgtgtactgcagccaagtgcttgtccggcatgtcacaatcctagcgcctttgaattcgccaaacaccgacggcgttactccagactcttccacgaatgtgtgtatcaatcattgctatgtaagaaatggcggtgatgttattgtcattaaaagtggctgggatgaatatggcatttcatttgctcaaccaagctccaatatcagcataagcgacatcacaggggagacaaggggtggttcagggattgcctttggaagtgagatgtcaggtggcatatcggaagtacgggctgtgggcctccgcattgtcaactcccttcacgggatcagaatcaagacggccccggggcgcggagggtacgtggagaatgtgtacatagcagatgtgagcatggacaatgtttcgatggccatcaggatcactggaaactatggtgaacatcctgatgacaaatatgacagcactgctctccctgtgataagcaatattacaatcaaggatgttgttggcgttaacattggggttgctggtatattggaaggcattcagggggacaatttcagcaacatttgtctgtccaatgtttccctcagtgtgcaatctgcacatccatggaattgttcacttattgaagggtattcgaactcggtgatcccagaatcatgcgaacagctcagaagcaattgtagacagacatccatttgctacgatggaagcagttcttcagtaatgagtgtgcagcaaccaagacatacatcgcccaccagccggttgctagatctttttactggagttggcttcattttagtgtaggtagagctgtgcttgttcttgctgcaaagggggcttgcttcatgtagtgagagccctattagtcatgtatatctgattcttgcaattatttgtgattagagtgccacttgcttcatgtatatagctgttgagatgactgtcggtgtatctttgcctgttttgttccaatttttggtatgtgaatgcaatctgcataactttatggttttgaacacac

SEQ ID NO: 11696 - DNA, 1881 bp, Zea Mays
actgctctctgcctcaatgcccgccccagcctcccaccctctcactccagtcagtccctcccagcggctcgccagccacctgctcctccagtcctctctccatccctctccggctctccgcctctccccctcgtgaggaggtgaggagaggagaagcaacagagggggccgcggcgaccgaccgaccgaccgacgtgtcctgagtcctggtgctggtggtgggtgcttctcgttcctggcgggtccatacacggcggggtgctagctaagggagaggtgccggcgtcggcgtcggctgcgaggagcaggagcagcaggccaccgacggattcggagatctcgccggagaagatgaagagatctgcatctctgtttcaagtccttctggttttcacagccgtgattgagatccaatggtccactgtatccagcatttactgcaaggacatgccgccgaacgtgtatcggcctcacagtgtcacaataactgaatttggtgccgttggggatggtgtcaccctcaatacaaaggcattccagaatgcaatcttctatctcaattcatttgcggacaagggtggcgcgcagcttttcgtgcctgcgggaaggtggttgacggggagttttcatcttatcagccatctcactttatcactggacaaggatgcaataataattggatctccggtgctaatggttcaattgatggtcaaggagctatttggtggggctggttccacaaccacacattgaattatactagaccacatcttgtggagttgatgtattctaccaatgtcgtcatatctaatctaaccttcaagaactcgccgttttggaatatccaccctgtgtactgcagccaagtgcttgtccggcatgtcacaatcctagcgcctttgaattcgccaaacaccgacggcgttactccagactcttccacgaatgtgtgtatcaatcattgctatgtaagaaatggcggtgatgttattgtcattaaaagtggctgggatgaatatggcatttcatttgctcaaccaagctccaatatcagcataagcgacatcacaggggagacaaggggtggttcagggattgcctttggaagtgagatgtcaggtggcatatcggaagtacgggctgtgggcctccgcattgtcaactcccttcacgggatcagaatcaagacggccccggggcgcggagggtacgtggagaatgtgtacatagcagatgtgagcatggacaatgtttcgatggccatcaggatcactggaaactatggtgaacatcctgatgacaaatatgacagcactgctctccctgtgataagcaatattacaatcaaggatgttgttggcgttaacattggggttgctggtatattggaaggcattcagggggacaatttcagcaacatttgtctgtccaatgtttccctcagtgtgcaatctgcacatccatggaattgttcacttattgaagggtattcgaactcggtgatcccagaatcatgcgaacagctcagaagcaattgtagacagacatccatttgctacgatggaagcagttcttcagtaatgagtgtgcagcaaccaagacatacatcgcccaccagccggttgctagatctttttactggagttggcttcattttagtgtaggtagagctgtgcttgttcttgctgcaaagggggcttgcttcatgtagtgagagccctattagtcatgtatatctgattcttgcaattatttgtgattagagtgccacttgcttcatgtatatagctgttgagatgactgtcggtgtatctttgcctgttttgttccaatttttggtatgtgaatgcaatctgcataactttatggttttgaacacac

SEQ ID NO: 11697 - DNA, 765 bp, Zea Mays
actattcgtaatctgcattttctctagtgaggaaggcaagcttaagaaacttggtgatcttatgaacgagagccattacagctgcagcgtgctatacgaatgcagttgccctgagctggaggagcttgtgaaggtctgcagagacaacggagcactgggagcacgtctgacaggagctgggtggggtggctgcgcggttgctctggtcaaggagcccatcgtccctcagttcattctgaaactaaaggaaatgtactacaaatcaaggattgacaggggagtaatcaagcagggcgatgtgggcctatacgtgttcgcatccaagccgtcgagcggcgcggccatactgaggttgtaggcaggcaggaaggcagaggcagccgctattcttttcacgagtgtggtggccctgtaaaacatggaataaagttgccatgaacaccgaacccttgtagtagcgttgaattatctcagacaacacgcgcattaaattgatatctatctacaggagtaacacacgagcgaaccatgctgttttaaatcctctttcttgctattctcgtttttcgttggttcaccggccatttcgtggagttgtttccagtaacgtaaaatataacgatacgtagataaaactatcaccctcgaagtataattttcttttcttagatatttaagtaatcctgtcactcatcttgagttggtaatcgatccatgcattgtcctataaaattcggtctcagtgagaattacacataagtttta

SEQ ID NO: 11698 - DNA, 1660 bp, Zea Mays
gtccttccctgctactcgagcgcagtgggagcagttgactagcaggacagttcgagcgacccgattgcagtaaatagtggacttgtaaattccagtagtttcttggccgtgctgcaggcaatgtattcttgtgtcaggaaattgacgtaaaaaatcacaaatgggggcactatttcatgtgtggatacaagggagtttatgaatactgtagatcaaaagggatagatctgggcaaacctgttgcgcttgacgtcgttgttgatggcacagttcctcaaggctctggactgtcaagctcagcagcatttgtctgttcagcaacaattgctatcatgggaatccttgacaaaaactttccaaagaaagaagttgctcaattcacttgtctgtctgagcgccacattggaacgcaatctggcggcatggatcaggctatatctatcatggcgaaacctggattcgctgagttgatagattttaatccaatccatgcaactgacgtccaactaccttcaggtggtacatttgtgatcgcccattgtttggccgagtccaagaaagcagagacagctgcaacaaattataataaccgtgttgtggagtgtcgcttagcagcgattgttcttgccatcaaacttgggatggataggaaaaaggctatctcctccgttacaaccctctccgatgttgaggggctatgtgtttcttttgctgggagagaaggttcatctgatcctgcagtagctgtgaagaaacttctgcatgaggacccatatacagctggagaaatagagaaaattacaggagaaggcctgacatctgtcttccagggctctcagacgtcattggatgttataaaagcggcaaagcactacaagctatttcagcgtgcgacccatgtctactctgaagcaaggagggtttatgctttcagggatactgtctcttcaaaactcagtgaggaaggcaagcttaagaaacttggtgatcttatgaacgagagccattacagctgcagcgtgctatacgaatgcagagacaacggagcactgggagcacgtctgacaggagctgggtggggtggctgcgcggttgctctggtcaaggagcccatcgtccctcagttcattctgaaactaaaggaaatgtactacaaatcaaggattgacaggggagtaatcaagcagggcgatgtgggcctatacgtgttcgcatccaagccgtcgagcggcgcggccatactgaggttgtaggcaggcaggaaggcagaggcagccgctattcttttcacgagtgtggtggccctgtaaaacatggaataaagttgccatgaacaccgaacccttgtagtagcgttgaattatctcagacaacacgcgcattaaattgatatctatctacaggagtaacacacgagcgaaccatgctgttttaaatcctctttcttgctattctcgtttttcgttggttcaccggccatttcgtggagttgtttccagtaacgtaaaatataacgatacgtagataaaactatcaccctcgaagtataattttcttttcttagatatttaagtaatcctgtcactcatcttgagttggtaatcgatccatgcattgtcctataaaattcggtctcagtgagaattacacataagtttta

SEQ ID NO: 11699 - DNA, 1714 bp, Zea Mays
ctgctttggacttgaaaggtccttccctgctactcgagcgcagtgggagcagttgactagcaggacagttcgagcgacccgattgcagtaaatagtggacttgtaaattccagtagtttcttggccgtgctgcaggcaatgtattcttgtgtcaggaaattgacgtaaaaaatcacaaatgggggcactatttcatgtgtggatacaagggagtttatgaatactgtagatcaaaagggatagatctgggcaaacctgttgcgcttgacgtcgttgttgatggcacagttcctcaaggctctggactgtcaagctcagcagcatttgtctgttcagcaacaattgctatcatgggaatccttgacaaaaactttccaaagaaagaagttgctcaattcacttgtctgtctgagcgccacattggaacgcaatctggcggcatggatcaggctatatctatcatggcgaaacctggattcgctgagttgatagattttaatccaatccatgcaactgacgtccaactaccttcaggtggtacatttgtgatcgcccattgtttggccgagtccaagaaagcagagacagctgcaacaaattataataaccgtgttgtggagtgtcgcttagcagcgattgttcttgccatcaaacttgggatggataggaaaaaggctatctcctccgttacaaccctctccgatgttgaggggctatgtgtttcttttgctgggagagaaggttcatctgatcctgcagtagctgtgaagaaacttctgcatgaggacccatatacagctggagaaatagagaaaattacaggagaaggcctgacatctgtcttccagggctctcagacgtcattggatgttataaaagcggcaaagcactacaagctatttcagcgtgcgacccatgtctactctgaagcaaggagggtttatgctttcagggatactgtctcttcaaaactcagtgaggaaggcaagcttaagaaacttggtgatcttatgaacgagagccattacagctgcagcgtgctatacgaatgcagttgccctgagctggaggagcttgtgaaggtctgcagagacaacggagcactgggagcacgtctgacaggagctgggtggggtggctgcgcggttgctctggtcaaggagcccatcgtccctcagttcattctgaaactaaaggaaatgtactacaaatcaaggattgacaggggagtaatcaagcagggcgatgtgggcctatacgtgttcgcatccaagccgtcgagcggcgcggccatactgaggttgtaggcaggcaggaaggcagaggcagccgctattcttttcacgagtgtggtggccctgtaaaacatggaataaagttgccatgaacaccgaacccttgtagtagcgttgaattatctcagacaacacgcgcattaaattgatatctatctacaggagtaacacacgagcgaaccatgctgttttaaatcctctttcttgctattctcgtttttcgttggttcaccggccatttcgtggagttgtttccagtaacgtaaaatataacgatacgtagataaaactatcaccctcgaagtataattttcttttcttagatatttaagtaatcctgtcactcatcttgagttggtaatcgatccatgcattgtcctataaaattcggtctcagtgagaattacacataagtttta

SEQ ID NO: 11700 - DNA, 1947 bp, Zea Mays
gtgggagcctccggcactgggtactatgactgcataggacaaaatggtatattgaagaagggtcgagaagttatgctcacaggatgttgtcttcgtacagccatggagggatctggccatgctcgtattttgccaacagaatacatggtgatattactggatgaggaacaagatgaagatgccttgctacttgctgcacaattttgcaactattcattctcttctttgattctagaggaaagtagaaacaatgttccgtactcattttatgccaggattgaaaagattgagtccttggaaccatttagatgcgcagaaagaatgcagataattcttgaagacaatgacaatgcgaagatgaagttagttttatggggagagcagacttcacttgcaaatctgtgcagtgtagggagcatgcttgcactggacagacctttcatagcaaattttatagacaataatcatgaggattctcaggaactgtgccttgaatatggcagtgcaacacaggtttacatggtgccaatcgctcaacaagaggaacaggtgccttttacacctacccaagtaaagagccaaggacctcggctgtcatgtgttctgactgataatgtagcttcgcaagtaacattaccacgtgatttgtatggttcagttgatttcagcaaatacccgtttcgagcatatgtaagtgaccttcatgataaaatggtgggaatcagtctgtttggtaccgtaactagtgtttgcaaagtaagcacatcagggactacgttctatttggagttggaagacacaacaggagttgttctgatgaagcttatctttgttggaccctggtcattaggtagagtaggagttgggcatatggtgtacatctccggtttgacttgtgccttgagttcaacaaatatccttgaagtctcatggcgtgaaaaggagccagggtctctgtttgttaacttaagcttgctgccagcactcctaaactcatcgtgcctgcataatttatcacccttgtcagatcttccccgttcgacaaacagaacacatatatcccatgttcggttagatggcatcgattgtgacagtttaaaggtgtcgctgttccacaacatttgcggcagtgttgtgaatgaacattcaggtgtactccagtgttcattctgtaagtgtgcctgcgaaagtgtatgtgcgcgtggctttcagctgcacttgaccatcgcagacgacagtgcagatgtcttggcttggtgcgttgggcaaacggctgtcgagttccttcagatatctcctgacgaatacctagagctccccgaggatgaacgggcaatgtatctctacactctccagaacgaaagctttgtggtggctatcgcgaataccaggaagcgagtcgatggatgtgctgtgggtgatgaagccgtcccagcttgggagatcacgagagcccagaaatgcgaatgagttcgtatagcgctcgagaaagaaatgctgatgctgaaaagttactgtaacacgtgtttcaacctccgtttttcatcaaccaattcgtcgttcagcaatgcagccatatgcatgagttgtccattgactccaaatgatgcttaagcacgatggttaggatgggttcttcgttgacaaagtccgagagtaagacgtcgacgaaggcatagcgtttaactttaagatgggttcactactgaaaaatttcggttgttcttcattcatgttgacaataggttatttgcttggcaacgtagccagccgacttcagatttatctgaaactgtgccttttacatctagggacttgtacccagcaaacaaacgctgcccaccgcggttgagttacggagtgtttggttgtctgattaaaaggttattttgtgtcacattaaatatttaaattttaattatgagttttaaatataagcttaattag

SEQ ID NO: 11701 - DNA, 2520 bp, Zea Mays
atttcccagaccccactcatgtgggagcctccggcactgggtactatgactgcataggacaaaatggtatattgaagaagggtcgagaagttatgctcacaggatgttgtcttcgtacagccatggagggatctggccatgctcgtattttgccaacagaatacatggtgatattactggatgaggaacaagatgaagatgccttgctacttgctgcacaattttgcaactattcattctcttctttgattctagaggaaagtagaaacaatgttccgtactcattttatgccaggattgaaaagattgagtccttggaaccatttagatgcgcagaaagaatgcagataattcttgaagacaatgacaatgcgaagatgaagttagttttatggggagagcagacttcacttgcaaatctgtgcagtgtagggagcatgcttgcactggacagacctttcatagcaaattttatagacaataatcatgaggattctcaggaactgtgccttgaatatggcagtgcaacacaggtttacatggtgccaatcgctcaacaagaggaacaggtgccttttacacctacccaagtaaagagccaaggacctcggctgtcatgtgttctgactgataatgtagcttcgcaagtaacattaccacgtgatttgtatggttcagttgatttcagcaaatacccgtttcgagtatgtaacttaccttcattcatttagggtcttctcagaagatagattttgcaaccatgatgattctcggaacctgaatacttaccactttagccttcaacaactgattctgctgatcctttaatctctatttactactgatctatatttgtctgcttgtgatactatcatgtttacctaaacatactgctgagtttgccagtgtaaaactggaagcaaagcattgatctcttactagctattgtgtctcattcttctcaataaatattgcgcttttattccaccaactttctgcttaatcaataagtggtgtgtgtttatgtgctcactgcttacactttttagaacattggttccagaagttccttagtatgcacatgcaaatattttcttccattagtattgctgtttccctttttattcttttcataagtagaaaaaatacttcttgataggaacacctgatctttcatgctttctcattgttttttgtttctcaaacttcaaacatcatgttttcttcatgcttttgtataacattcctattctttaggcatatgtaagtgaccttcatgataaaatggtgggaatcagtctgtttggtaccgtaactagtgtttgcaaagtaagcacatcagggactacgttctatttggagttggaagacacaacaggagttgttctgatgaagcttatctttgttggaccctggtcattaggtagagtaggagttgggcatatggtgtacatctccggtttgacttgtgccttgagttcaacaaatatccttgaagtctcatggcgtgaaaaggagccagggtctctgtttgttaacttaagcttgctgccagcactcctaaactcatcgtgcctgcataatttatcacccttgtcagatcttccccgttcgacaaacagaacacatatatcccatgttcggttagatggcatcgattgtgacagtttaaaggtgtcgctgttccacaacatttgcggcagtgttgtgaatgaacattcaggtgtactccagtgttcattctgtaagtgtgcctgcgaaagtgtatgtgcgcgtggctttcagctgcacttgaccatcgcagacgacagtgcagatgtcttggcttggtgcgttgggcaaacggctgtcgagttccttcagatatctcctgacgaatacctagagctccccgaggatgaacgggcaatgtatctctacactctccagaacgaaagctttgtggtggctatcgcgaataccaggaagcgagtcgatggatgtgctgtgggtgatgaagccgtcccagcttgggagatcacgagagcccagaaatgcgaatgagttcgtatagcgctcgagaaagaaatgctgatgctgaaaagttactgtaacacgtgtttcaacctccgtttttcatcaaccaattcgtcgttcagcaatgcagccatatgcatgagttgtccattgactccaaatgatgcttaagcacgatggttaggatgggttcttcgttgacaaagtccgagagtaagacgtcgacgaaggcatagcgtttaactttaagatgggttcactactgaaaaatttcggttgttcttcattcatgttgacaataggttatttgcttggcaacgtagccagccgacttcagatttatctgaaactgtgccttttacatctagggacttgtacccagcaaacaaacgctgcccaccgcggttgagttacggagtgtttggttgtctgattaaaaggttattttgtgtcacattaaatatttaaattttaattatgagttttaaatataagcttaattag

SEQ ID NO: 11702 - DNA, 1894 bp, Zea Mays
atccatttcccagaccccactcatgtgggagcctccggcactgggtactatgactgcataggacaaaatggtatattgaagaagggtcgagaagttatgctcacaggatgttgtcttcgtacagccatggagggatctggccatgctcgtattttgccaacagaatacatggtgatattactggatgaggaacaagatgaagatgccttgctacttgctgcacaattttgcaactattcattctcttctttgattctagaggaaagtagaaacaatgttccgtactcattttatgccaggattgaaaagattgagtccttggaaccatttagatgcgcagaaagaatgcagataattcttgaagacaatgacaatgcgaagatgaagttagttttatggggagagcagacttcacttgcaaatctgtgcagggagcatgcttgcactggacagacctttcatagcaaattttatagacaataatcatgaggattctcaggaactgtgccttgaatatggcagtgcaacacaggtttacatggtgccaatcgctcaacaagaggaacaggtgccttttacacctacccaagtaaagagccaaggacctcggctgtcatgtgttctgactgataatgtagcttcgcaagtaacattaccacgtgatttgtatggttcagttgatttcagcaaatacccgtttcgagcatatgtaagtgaccttcatgataaaatggtgggaatcagtctgtttggtaccgtaactagtgtttgcaaagtaagcacatcagggactacgttctatttggagttggaagacacaacaggagttgttctgatgaagcttatctttgttggaccctggtcattaggtagagtaggagttgggcatatggtgtacatctccggtttgacttgtgccttgagttcaacaaatatccttgaagtctcatggcgtgaaaaggagccagggtctctgtttgttaacttaagcttgctgccagcactcctaaactcatcgtgcctgcataatttatcacccttgtcagatcttccccgttcgacaaacagaacacatatatcccatgttcggttagatggcatcgattgtgacagtttaaaggtgtcgctgttccacaacatttgcggcagtgttgtgaatgaacattcaggtgtactccagtgttcattctatgtcttggcttggtgcgttgggcaaacggctgtcgagttccttcagatatctcctgacgaatacctagagctccccgaggatgaacgggcaatgtatctctacactctccagaacgaaagctttgtggtggctatcgcgaataccaggaagcgagtcgatggatgtgctgtgggtgatgaagccgtcccagcttgggagatcacgagagcccagaaatgcgaatgagttcgtatagcgctcgagaaagaaatgctgatgctgaaaagttactgtaacacgtgtttcaacctccgtttttcatcaaccaattcgtcgttcagcaatgcagccatatgcatgagttgtccattgactccaaatgatgcttaagcacgatggttaggatgggttcttcgttgacaaagtccgagagtaagacgtcgacgaaggcatagcgtttaactttaagatgggttcactactgaaaaatttcggttgttcttcattcatgttgacaataggttatttgcttggcaacgtagccagccgacttcagatttatctgaaactgtgccttttacatctagggacttgtacccagcaaacaaacgctgcccaccgcggttgagttacggagtgtttggttgtctgattaaaaggttattttgtgtcacattaaatatttaaattttaattatgagttttaaatataagcttaattag

SEQ ID NO: 11703 - DNA, 2438 bp, Zea Mays
ggttgtagcggcgccattactttcgttcacttgttctcactcagctcttcccgtttcccgccctcgctcctcctggactagggttcatggatcccgacaccgccgtggcctccgcagacggggggccattcctagagttcgtagactatgccatctccatgctctcctcgtccgctggcgacggcgatggctatgagtctccgggggacgggccggcgccggcgcggccgccctgggggtgggcggtggcgcagctgctcaagtcctgctgcgcctactccagcggcgtcaccgccgccatccttctctccgacctcttccaatcttggacagaacagcggaaatccctgaccctgaagaggaaggtcaagctgcccaaacttataaacacgaagaataagaggaggaggcttccaaatactgtcacgatcgattctatccacgagaagaacttcctttctcccaatagtgtccttgaagttgttgtcattgccgtgtttgtccttcctggtacaaacatatacatgcttaccttgggagacatgtggagcgcatccacaatcgacatatatctacaccgaaggtactatgactgcataggacaaaatggtatattgaagaagggtcgagaagttatgctcacaggatgttgtcttcgtacagccatggagggatctggccatgctcgtattttgccaacagaatacatggtgatattactggatgaggaacaagatgaagatgccttgctacttgctgcacaattttgcaactattcattctcttctttgattctagaggaaagtagaaacaatgttccgtactcattttatgccaggattgaaaagattgagtccttggaaccatttagatgcgcagaaagaatgcagataattcttgaagacaatgacaatgcgaagatgaagttagttttatggggagagcagacttcacttgcaaatctgtgcagtgtagggagcatgcttgcactggacagacctttcatagcaaattttatagacaataatcatgaggattctcaggaactgtgccttgaatatggcagtgcaacacaggtttacatggtgccaatcgctcaacaagaggaacaggtgccttttacacctacccaagtaaagagccaaggacctcggctgtcatgtgttctgactgataatgtagcttcgcaagtaacattaccacgtgatttgtatggttcagttgatttcagcaaatacccgtttcgagcatatgtaagtgaccttcatgataaaatggtgggaatcagtctgtttggtaccgtaactagtgtttgcaaagtaagcacatcagggactacgttctatttggagttggaagacacaacaggagttgttctgatgaagcttatctttgttggaccctggtcattaggtagagtaggagttgggcatatggtgtacatctccggtttgacttgtgccttgagttcaacaaatatccttgaagtctcatggcgtgaaaaggagccagggtctctgtttgttaacttaagcttgctgccagcactcctaaactcatcgtgcctgcataatttatcacccttgtcagatcttccccgttcgacaaacagaacacatatatcccatgttcggttagatggcatcgattgtgacagtttaaaggtgtcgctgttccacaacatttgcggcagtgttgtgaatgaacattcaggtgtactccagtgttcattctatgtcttggcttggtgcgttgggcaaacggctgtcgagttccttcagatatctcctgacgaatacctagagctccccgaggatgaacgggcaatgtatctctacactctccagaacgaaagctttgtggtggctatcgcgaataccaggaagcgagtcgatggatgtgctgtgggtgatgaagccgtcccagcttgggagatcacgagagcccagaaatgcgaatgagttcgtatagcgctcgagaaagaaatgctgatgctgaaaagttactgtaacacgtgtttcaacctccgtttttcatcaaccaattcgtcgttcagcaatgcagccatatgcatgagttgtccattgactccaaatgatgcttaagcacgatggttaggatgggttcttcgttgacaaagtccgagagtaagacgtcgacgaaggcatagcgtttaactttaagatgggttcactactgaaaaatttcggttgttcttcattcatgttgacaataggttatttgcttggcaacgtagccagccgacttcagatttatctgaaactgtgccttttacatctagggacttgtacccagcaaacaaacgctgcccaccgcggttgagttacggagtgtttggttgtctgattaaaaggttattttgtgtcacattaaatatttaaattttaattatgagttttaaatataagcttaattag

SEQ ID NO: 11704 - DNA, 3474 bp, Zea Mays
ggttgtagcggcgccattactttcgttcacttgttctcactcagctcttcccgtttcccgccctcgctcctcctggactagggttcatggatcccgacaccgccgtggcctccgcagacggggggccattcctagagttcgtagactatgccatctccatgctctcctcgtccgctggcgacggcgatggctatgagtctccgggggacgggccggcgccggcgcggccgccctgggggtgggcggtggcgcagctgctcaagtcctgctgcgcctactccagcggcgtcaccgccgccatccttctctccgacctcttccaagttacgttgtttcgactcgctgcgtggtagtcattggatcgattttttatctgtaccgagtccatgctacgtctcaatttgcacacatttccgtaagctggcgcgggcatttgtttatgctttgtgttcggctcgaatttgaagcaaatgtcaatgccatgaaggagttttaagctctgcagcaataacagcttcggctgctgctgcagcagcttctgctgcctggttatatagaaaggaaatactgtagcgatagtgtacatttgcagctgcaaccctttgaaaaccagcagccgaacagcttctacagaaaatttgtacaaaggcaatatgaaccgttttttggttattactatttttttttgtacagccgaaagtaggattgaatcttggcttctcttgttagtcttggacagaacagcggaaatccctgaccctgaagaggaaggtcaagctgcccaaacttataaacacgaagaataagaggaggaggcttccaaatactgtcacgatcgattctatccacgagaagaacttcctttctcccaatagtgtccttgaagttgttgtcattgccgtgtttgtccttcctggtacaaacatatacatgcttaccttgggagacatgtggagcgcatccacaatcgacatatatctacaccgaaggtactatgactgcataggacaaaatggtatattgaagaagggtcgagaagttatgctcacaggatgttgtcttcgtacagccatggagggatctggccatgctcgtattttgccaacagaatacatggtgatattactggatgaggaacaagatgaagatgccttgctacttgctgcacaattttgcaactattcattctcttctttgattctagaggaaagtagaaacaatgttccgtactcattttatgccaggattgaaaagattgagtccttggaaccatttagatgcgcagaaagaatgcagataattcttgaagacaatgacaatgcgaagatgaagttagttttatggggagagcagacttcacttgcaaatctgtgcagggagcatgcttgcactggacagacctttcatagcaaattttatagacaataatcatgaggattctcaggaactgtgccttgaatatggcagtgcaacacaggtttacatggtgccaatcgctcaacaagaggaacaggtgccttttacacctacccaagtaaagagccaaggacctcggctgtcatgtgttctgactgataatgtagcttcgcaagtaacattaccacgtgatttgtatggttcagttgatttcagcaaatacccgtttcgagcatatgtaagtgaccttcatgataaaatggtgggaatcagtctgtttggtaccgtaactagtgtttgcaaagtaagcacatcagggactacgttctatttggagttggaagacacaacaggagttgttctgatgaagcttatctttgttggaccctggtacttttgcacttaagtgatggcctatctatttattttctccatgcattcctttctccgtctcgaaacttgcactagttgtacctacatgccctttgatatcttctatgaaaaacttctcactagttatagctctaatcatgccatctaaggattctccagaagtctcttagcactctcaccgtgatctattttgggggcatacatgttaattatgttcaagattaaatcactcgcgtcaagtttgactaagataaccctatcaccttgcctcctcacatccaacaatactgttcttgatgctcttatcaatcaaaacttctactcgaattctctgtatactaaaacttgaagccggtattatccacctccttcgccttctaacccttcaattaaatctcttggacgcataagatatttatatgcctcctagtcgttgtctcaactaactcttttaacttaccttaataataaccactatattgtcttcgctattccagatttcatcattcctacccaccattctcatatctgttattttgacatatttttttgcttcctatgccaattgaactgtttatgtccatcatgcacctgaattctataacagtatatgaatgtcttttaatctgcaggtcattaggtagagtaggagttgggcatatggtgtacatctccggtttgacttgtgccttgagttcaacaaatatccttgaagtctcatggcgtgaaaaggagccagggtctctgtttgttaacttaagcttgctgccagcactcctaaactcatcgtgcctgcataatttatcacccttgtcagatcttccccgttcgacaaacagaacacatatatcccatgttcggttagatggcatcgattgtgacagtttaaaggtgtcgctgttccacaacatttgcggcagtgttgtgaatgaacattcaggtgtactccagtgttcattctatgtcttggcttggtgcgttgggcaaacggctgtcgagttccttcagatatctcctgacgaatacctagagctccccgaggatgaacgggcaatgtatctctacactctccagaacgaaagctttgtggtggctatcgcgaataccaggaagcgagtcgatggatgtgctgtgggtgatgaagccgtcccagcttgggagatcacgagagcccagaaatgcgaatgagttcgtatagcgctcgagaaagaaatgctgatgctgaaaagttactgtaacacgtgtttcaacctccgtttttcatcaaccaattcgtcgttcagcaatgcagccatatgcatgagttgtccattgactccaaatgatgcttaagcacgatggttaggatgggttcttcgttgacaaagtccgagagtaagacgtcgacgaaggcatagcgtttaactttaagatgggttcactactgaaaaatttcggttgttcttcattcatgttgacaataggttatttgcttggcaacgtagccagccgacttcagatttatctgaaactgtgccttttacatctagggacttgtacccagcaaacaaacgctgcccaccgcggttgagttacggagtgtttggttgtctgattaaaaggttattttgtgtcacattaaatatttaaattttaattatgagttttaaatataagcttaattag

SEQ ID NO: 11705 - DNA, 2500 bp, Zea Mays
ggttgtagcggcgccattactttcgttcacttgttctcactcagctcttcccgtttcccgccctcgctcctcctggactagggttcatggatcccgacaccgccgtggcctccgcagacggggggccattcctagagttcgtagactatgccatctccatgctctcctcgtccgctggcgacggcgatggctatgagtctccgggggacgggccggcgccggcgcggccgccctgggggtgggcggtggcgcagctgctcaagtcctgctgcgcctactccagcggcgtcaccgccgccatccttctctccgacctcttccaaaacagcggaaatccctgaccctgaagaggaaggtcaagctgcccaaacttataaacacgaagaataagaggaggaggcttccaaatactgtcacgatcgattctatccacgagaagaacttcctttctcccaatagtgtccttgaagttgttgtcattgccgtgtttgtccttcctggtacaaacatatacatgcttaccttgggagacatgtggagcgcatccacaatcgacatatatctacaccgaaggtactatgactgcataggacaaaatggtatattgaagaagggtcgagaagttatgctcacaggatgttgtcttcgtacagccatggagggatctggccatgctcgtattttgccaacagaatacatggtgatattactggatgaggaacaagatgaagatgccttgctacttgctgcacaattttgcaactattcattctcttctttgattctagaggaaagtagaaacaatgttccgtactcattttatgccaggattgaaaagattgagtccttggaaccatttagatgcgcagaaagaatgcagataattcttgaagacaatgacaatgcgaagatgaagttagttttatggggagagcagacttcacttgcaaatctgtgcagtgtagggagcatgcttgcactggacagacctttcatagcaaattttatagacaataatcatgaggattctcaggaactgtgccttgaatatggcagtgcaacacaggtttacatggtgccaatcgctcaacaagaggaacaggtgccttttacacctacccaagtaaagagccaaggacctcggctgtcatgtgttctgactgataatgtagcttcgcaagtaacattaccacgtgatttgtatggttcagttgatttcagcaaatacccgtttcgagcatatgtaagtgaccttcatgataaaatggtgggaatcagtctgtttggtaccgtaactagtgtttgcaaagtaagcacatcagggactacgttctatttggagttggaagacacaacaggagttgttctgatgaagcttatctttgttggaccctggtcattaggtagagtaggagttgggcatatggtgtacatctccggtttgacttgtgccttgagttcaacaaatatccttgaagtctcatggcgtgaaaaggagccagggtctctgtttgttaacttaagcttgctgccagcactcctaaactcatcgtgcctgcataatttatcacccttgtcagatcttccccgttcgacaaacagaacacatatatcccatgttcggttagatggcatcgattgtgacagtttaaaggtgtcgctgttccacaacatttgcggcagtgttgtgaatgaacattcaggtgtactccagtgttcattctgtaagtgtgcctgcgaaagtgtatgtgcgcgtggctttcagctgcacttgaccatcgcagacgacagtgcagatgtcttggcttggtgcgttgggcaaacggctgtcgagttccttcagatatctcctgacgaatacctagagctccccgaggatgaacgggcaatgtatctctacactctccagaacgaaagctttgtggtggctatcgcgaataccaggaagcgagtcgatggatgtgctgtgggtgatgaagccgtcccagcttgggagatcacgagagcccagaaatgcgaatgagttcgtatagcgctcgagaaagaaatgctgatgctgaaaagttactgtaacacgtgtttcaacctccgtttttcatcaaccaattcgtcgttcagcaatgcagccatatgcatgagttgtccattgactccaaatgatgcttaagcacgatggttaggatgggttcttcgttgacaaagtccgagagtaagacgtcgacgaaggcatagcgtttaactttaagatgggttcactactgaaaaatttcggttgttcttcattcatgttgacaataggttatttgcttggcaacgtagccagccgacttcagatttatctgaaactgtgccttttacatctagggacttgtacccagcaaacaaacgctgcccaccgcggttgagttacggagtgtttggttgtctgattaaaaggttattttgtgtcacattaaatatttaaattttaattatgagttttaaatataagcttaattag

SEQ ID NO: 11706 - DNA, 3551 bp, Zea Mays
ggttgtagcggcgccattactttcgttcacttgttctcactcagctcttcccgtttcccgccctcgctcctcctggactagggttcatggatcccgacaccgccgtggcctccgcagacggggggccattcctagagttcgtagactatgccatctccatgctctcctcgtccgctggcgacggcgatggctatgagtctccgggggacgggccggcgccggcgcggccgccctgggggtgggcggtggcgcagctgctcaagtcctgctgcgcctactccagcggcgtcaccgccgccatccttctctccgacctcttccaagttacgttgtttcgactcgctgcgtggtagtcattggatcgattttttatctgtaccgagtccatgctacgtctcaatttgcacacatttccgtaagctggcgcgggcatttgtttatgctttgtgttcggctcgaatttgaagcaaatgtcaatgccatgaaggagttttaagctctgcagcaataacagcttcggctgctgctgcagcagcttctgctgcctggttatatagaaaggaaatactgtagcgatagtgtacatttgcagctgcaaccctttgaaaaccagcagccgaacagcttctacagaaaatttgtacaaaggcaatatgaaccgttttttggttattactatttttttttgtacagccgaaagtaggattgaatcttggcttctcttgttagtcttggacagaacagcggaaatccctgaccctgaagaggaaggtcaagctgcccaaacttataaacacgaagaataagaggaggaggcttccaaatactgtcacgatcgattctatccacgagaagaacttcctttctcccaatagtgtccttgaagttgttgtcattgccgtgtttgtccttcctggtacaaacatatacatgcttaccttgggagacatgtggagcgcatccacaatcgacatatatctacaccgaaggtactatgactgcataggacaaaatggtatattgaagaagggtcgagaagttatgctcacaggatgttgtcttcgtacagccatggagggatctggccatgctcgtattttgccaacagaatacatggtgatattactggatgaggaacaagatgaagatgccttgctacttgctgcacaattttgcaactattcattctcttctttgattctagaggaaagtagaaacaatgttccgtactcattttatgccaggattgaaaagattgagtccttggaaccatttagatgcgcagaaagaatgcagataattcttgaagacaatgacaatgcgaagatgaagttagttttatggggagagcagacttcacttgcaaatctgtgcagtgtagggagcatgcttgcactggacagacctttcatagcaaattttatagacaataatcatgaggattctcaggaactgtgccttgaatatggcagtgcaacacaggtttacatggtgccaatcgctcaacaagaggaacaggtgccttttacacctacccaagtaaagagccaaggacctcggctgtcatgtgttctgactgataatgtagcttcgcaagtaacattaccacgtgatttgtatggttcagttgatttcagcaaatacccgtttcgagcatatgtaagtgaccttcatgataaaatggtgggaatcagtctgtttggtaccgtaactagtgtttgcaaagtaagcacatcagggactacgttctatttggagttggaagacacaacaggagttgttctgatgaagcttatctttgttggaccctggtacttttgcacttaagtgatggcctatctatttattttctccatgcattcctttctccgtctcgaaacttgcactagttgtacctacatgccctttgatatcttctatgaaaaacttctcactagttatagctctaatcatgccatctaaggattctccagaagtctcttagcactctcaccgtgatctattttgggggcatacatgttaattatgttcaagattaaatcactcgcgtcaagtttgactaagataaccctatcaccttgcctcctcacatccaacaatactgttcttgatgctcttatcaatcaaaacttctactcgaattctctgtatactaaaacttgaagccggtattatccacctccttcgccttctaacccttcaattaaatctcttggacgcataagatatttatatgcctcctagtcgttgtctcaactaactcttttaacttaccttaataataaccactatattgtcttcgctattccagatttcatcattcctacccaccattctcatatctgttattttgacatatttttttgcttcctatgccaattgaactgtttatgtccatcatgcacctgaattctataacagtatatgaatgtcttttaatctgcaggtcattaggtagagtaggagttgggcatatggtgtacatctccggtttgacttgtgccttgagttcaacaaatatccttgaagtctcatggcgtgaaaaggagccagggtctctgtttgttaacttaagcttgctgccagcactcctaaactcatcgtgcctgcataatttatcacccttgtcagatcttccccgttcgacaaacagaacacatatatcccatgttcggttagatggcatcgattgtgacagtttaaaggtgtcgctgttccacaacatttgcggcagtgttgtgaatgaacattcaggtgtactccagtgttcattctgtaagtgtgcctgcgaaagtgtatgtgcgcgtggctttcagctgcacttgaccatcgcagacgacagtgcagatgtcttggcttggtgcgttgggcaaacggctgtcgagttccttcagatatctcctgacgaatacctagagctccccgaggatgaacgggcaatgtatctctacactctccagaacgaaagctttgtggtggctatcgcgaataccaggaagcgagtcgatggatgtgctgtgggtgatgaagccgtcccagcttgggagatcacgagagcccagaaatgcgaatgagttcgtatagcgctcgagaaagaaatgctgatgctgaaaagttactgtaacacgtgtttcaacctccgtttttcatcaaccaattcgtcgttcagcaatgcagccatatgcatgagttgtccattgactccaaatgatgcttaagcacgatggttaggatgggttcttcgttgacaaagtccgagagtaagacgtcgacgaaggcatagcgtttaactttaagatgggttcactactgaaaaatttcggttgttcttcattcatgttgacaataggttatttgcttggcaacgtagccagccgacttcagatttatctgaaactgtgccttttacatctagggacttgtacccagcaaacaaacgctgcccaccgcggttgagttacggagtgtttggttgtctgattaaaaggttattttgtgtcacattaaatatttaaattttaattatgagttttaaatataagcttaattag

SEQ ID NO: 11707 - DNA, 2505 bp, Zea Mays
ggttgtagcggcgccattactttcgttcacttgttctcactcagctcttcccgtttcccgccctcgctcctcctggactagggttcatggatcccgacaccgccgtggcctccgcagacggggggccattcctagagttcgtagactatgccatctccatgctctcctcgtccgctggcgacggcgatggctatgagtctccgggggacgggccggcgccggcgcggccgccctgggggtgggcggtggcgcagctgctcaagtcctgctgcgcctactccagcggcgtcaccgccgccatccttctctccgacctcttccaatcttggacagaacagcggaaatccctgaccctgaagaggaaggtcaagctgcccaaacttataaacacgaagaataagaggaggaggcttccaaatactgtcacgatcgattctatccacgagaagaacttcctttctcccaatagtgtccttgaagttgttgtcattgccgtgtttgtccttcctggtacaaacatatacatgcttaccttgggagacatgtggagcgcatccacaatcgacatatatctacaccgaaggtactatgactgcataggacaaaatggtatattgaagaagggtcgagaagttatgctcacaggatgttgtcttcgtacagccatggagggatctggccatgctcgtattttgccaacagaatacatggtgatattactggatgaggaacaagatgaagatgccttgctacttgctgcacaattttgcaactattcattctcttctttgattctagaggaaagtagaaacaatgttccgtactcattttatgccaggattgaaaagattgagtccttggaaccatttagatgcgcagaaagaatgcagataattcttgaagacaatgacaatgcgaagatgaagttagttttatggggagagcagacttcacttgcaaatctgtgcagggagcatgcttgcactggacagacctttcatagcaaattttatagacaataatcatgaggattctcaggaactgtgccttgaatatggcagtgcaacacaggtttacatggtgccaatcgctcaacaagaggaacaggtgccttttacacctacccaagtaaagagccaaggacctcggctgtcatgtgttctgactgataatgtagcttcgcaagtaacattaccacgtgatttgtatggttcagttgatttcagcaaatacccgtttcgagcatatgtaagtgaccttcatgataaaatggtgggaatcagtctgtttggtaccgtaactagtgtttgcaaagtaagcacatcagggactacgttctatttggagttggaagacacaacaggagttgttctgatgaagcttatctttgttggaccctggtcattaggtagagtaggagttgggcatatggtgtacatctccggtttgacttgtgccttgagttcaacaaatatccttgaagtctcatggcgtgaaaaggagccagggtctctgtttgttaacttaagcttgctgccagcactcctaaactcatcgtgcctgcataatttatcacccttgtcagatcttccccgttcgacaaacagaacacatatatcccatgttcggttagatggcatcgattgtgacagtttaaaggtgtcgctgttccacaacatttgcggcagtgttgtgaatgaacattcaggtgtactccagtgttcattctgtaagtgtgcctgcgaaagtgtatgtgcgcgtggctttcagctgcacttgaccatcgcagacgacagtgcagatgtcttggcttggtgcgttgggcaaacggctgtcgagttccttcagatatctcctgacgaatacctagagctccccgaggatgaacgggcaatgtatctctacactctccagaacgaaagctttgtggtggctatcgcgaataccaggaagcgagtcgatggatgtgctgtgggtgatgaagccgtcccagcttgggagatcacgagagcccagaaatgcgaatgagttcgtatagcgctcgagaaagaaatgctgatgctgaaaagttactgtaacacgtgtttcaacctccgtttttcatcaaccaattcgtcgttcagcaatgcagccatatgcatgagttgtccattgactccaaatgatgcttaagcacgatggttaggatgggttcttcgttgacaaagtccgagagtaagacgtcgacgaaggcatagcgtttaactttaagatgggttcactactgaaaaatttcggttgttcttcattcatgttgacaataggttatttgcttggcaacgtagccagccgacttcagatttatctgaaactgtgccttttacatctagggacttgtacccagcaaacaaacgctgcccaccgcggttgagttacggagtgtttggttgtctgattaaaaggttattttgtgtcacattaaatatttaaattttaattatgagttttaaatataagcttaattag

SEQ ID NO: 11708 - DNA, 2767 bp, Zea Mays
gtgccacacacacagccacgcccgtcggcccgctaggccgctactacccagaaggatggcggcggcggtggtggtgaggcgtgccgctggccttatccctctcctctcctcgcggttcggtgctcgcatgcccctccaccgggcgctatcccagatccctccgcctcgcttctgtcgcctactatcgcagcaaaccaagcccttctccgcctccgcgtcgaatggcgcggctacggacagaacccgcgagctgcgtctgtacaacaccaagtcgcggaagaaggagcagtttcggccgcgcattccaggcagggaggtcggcatgtacgtctgcggtgtcaccccctacgatgacagtcacatcggccatgcccgcgcatacgtagcctttgacgtcctctacaggtacttgcgctatttggactatgaagttcgctatgttcggaacttcaccgacattgatgacaaggaaacctgagttgcacttctggaattatgtagataattgcaagagcaaatcagctgggggaagatccttttagcttaagcaaaaggttctctgatgacttcttgtcagacatggccaatcttcaatgtctaccaccatccgtggagccccgtgtttcagatcatgttgatgagattataaatatgattaaacagatccttgataaccgttgcgcatatgtagtgggtggggatgtttatttctctgtagacaattttcctgagtacggagaattatctggtagaaagttagatgataatagagctggtgagagggttgctgttgatgagaggaagagaaatccagctgattttgctctatggaaggctgcaaaagatggggagccatggtgggatagcccatggggcccaggaaggccaggatggcacatagaatgcagtgccatgagtgcacattatttgggtcattcttttgacatacatggtggtggggaggatctcatctttccacaccatgagaatgagattgctcagagtcgtgcggcatgttgtgacagtaccataaattactggatacacaacggttttgtgaatgtaaacagccaaaaaatgtctaaatcacttggtaattttgttaccatacgtaaggttatagagatgtaccacccgctggctttgagaatgttcttacttggcacacactataggtccccaattaactacaccatagaacaactcaatgttgcatcagatagattgtactacacgtatcagaccttgcgtgattgtgaagagatctgtcagcatcaacaaagcaacactggaaatccattgcctgctaataccttaaattacatccagaaacttcatgatgaatttgagacctcaatgtcagatgatcttcacacttcagtggcattggctgctatgtctgagccattgaaagttatgaatgatctgctgcacactcgcaaggctttgcaacagctgcgggataaagcactgagacgagcttccatcactgaggagcttgtggtacagaagattgaagagaggactgcagcaaggaaggcgaagcagtatgaaaaatccgacgagatccggaaggaattggctgctgttggaatcgccctcatggatggccccgacggaacaacttggaggccatctttaccacttccagaggaggaagcggtgcttgctaaaacatgatgtgcgccgactttaggatcgagtcgagtatataggggtgattaatcttgttttaaaaagttaaatgcgtctgctagcagaaataaatgtgaatttagttagttgctctagtcaagactacggctctttatctatactagatctatgcccgtgcgttgccacggaaaacacatgaaatcgttatgtgtggtactacaaatcaaacaaagtgaaaaacattaaatatttattcacacgatattgtaaataaaacaacatatcatagcaacagtgagagatccatccatgccacaaacgagcataggagagagctggagtgtgccttttcatcaccttcttgacactggcagcatctactaacaaacgactactaattaactactactactattattatttatgcctactactcactcactatcatatacttatcataggcctaagagctaaaaaaacaacctggacttgtttcttctctgttgctgtcttcactgtcccctccttaagattacacctctccaaaggtatttcttttttctttgtcaaagcttctctacgctcggttgatagggccggccatcatgtagccatattagtagtcccctgcgcacaacagcccgtcaacacacagattatgaccatcatgattcaggatctatgctggcatatatatgcatcatggtcatggaagcagcagctagcttattattaatggttacagcactatcagaaagataggcacaaggagagctattgttgacacttactcccagattagaggaatggagggccccccttcccctttttttgctctatgcacctcacacatcatagcccaatggcttcatgcccaggagaaaacctggagaaattccgaacagatgtaacagcaaaaaaacaataatctttgatttcttttgctcaccccacatgaattgcttgcaataagagaaactgcatttaggaaagatttaagctagctgctgagaacgtttacctgggcacctgaaagaagcaggagggcgtaggggtccctgaaatccagcaatctggtgggcgacgcgcaatcgccgaactcggctccgcc

SEQ ID NO: 11709 - DNA, 2571 bp, Zea Mays
gtgccacacacacagccacgcccgtcggcccgctaggccgctactacccagaaggatggcggcggcggtggtggtgaggcgtgccgctggccttatccctctcctctcctcgcggttcggtgctcgcatgcccctccaccgggcgctatcccagatccctccgcctcgcttctgtcgcctactatcgcagcaaaccaagcccttctccgcctccgcgtcgaatggcgcggctacggacagaacccgcgagctgcgtctgtacaacaccaagtcgcggaagaaggagcagtttcggccgcgcattccaggcagggaggtcggcatgtacgtctgcggtgtcaccccctacgatgacagtcacatcggccatgcccgcgcatacgtagcctttgacgtcctctacaggtacttgcgctatttggactatgaagttcgctatgttcggaacttcaccgacattgatgacaagataattgcaagagcaaatcagctgggggaagatccttttagcttaagcaaaaggttctctgatgacttcttgtcagacatggccaatcttcaatgtctaccaccatccgtggagccccgtgtttcagatcatgttgatgagattataaatatgattaaacagatccttgataaccgttgcgcatatgtagtgggtggggatgtttatttctctgtagacaattttcctgagtacggagaattatctggtagaaagttagatgataatagagctggtgagagggttgctgttgatgagaggaagagaaatccagctgattttgctctatggaaggctgcaaaagatggggagccatggtgggatagcccatggggcccaggaaggccaggatggcacatagaatgcagtgccatgagtgcacattatttgggtcattcttttgacatacatggtggtggggaggatctcatctttccacaccatgagaatgagattgctcagagtcgtgcggcatgttgtgacagtaccataaattactggatacacaacggttttgtgaatgtaaacagccaaaaaatgtctaaatcacttggtaattttgttaccatacgtaaggttatagagatgtaccacccgctggctttgagaatgttcttacttggcacacactataggtccccaattaactacaccatagaacaactcaatgttgcatcagatagattgtactacacgtatcagaccttgcgtgattgtgaagagatctgtcagcatcaacaaagcaacactggaaatccattgcctgctaataccttaaattacatccagaaacttcatgatgaatttgagacctcaatgtcagatgatcttcacacttcagtggcattggctgctatgtctgagccattgaaagttatgaatgatctgctgcacactcgcaaggctttgcaacagctgcgggataaagcactgagacgagcttccatcactgaggagcttgtggtacagaagattgaagagaggactgcagcaaggaaggcgaagcagtatgaaaaatccgacgagatccggaaggaattggctgctgttggaatcgccctcatggatggccccgacggaacaacttggaggccatctttaccacttccagaggaggaagcggtgcttgctaaaacatgatgtgcgccgactttaggatcgagtcgagtatataggggtgattaatcttgttttaaaaagttaaatgcgtctgctagcagaaataaatgtgaatttagttagttgctctagtcaagactacggctctttatctatactagatctatgcccgtgcgttgccacggaaaacacatgaaatcgttatgtgtggtactacaaatcaaacaaagtgaaaaacattaaatatttattcacacgatattgtaaataaaacaacatatcatagcaacagtgagagatccatccatgccacaaacgagcataggagagagctggagtgtgccttttcatcaccttcttgacactggcagcatctactaacaaacgactactaattaactactactactattattatttatgcctactactcactcactatcatatacttatcataggcctaagagctaaaaaaacaacctggacttgtttcttctctgttgctgtcttcactgtcccctccttaagattacacctctccaaaggtatttcttttttctttgtcaaagcttctctacgctcggttgatagggccggccatcatgtagccatattagtagtccctcccagattagaggaatggagggccccccttcccctttttttgctctatgcacctcacacatcatagcccaatggcttcatgcccaggagaaaacctggagaaattccgaacagatgtaacagcaaaaaaacaataatctttgatttcttttgctcaccccacatgaattgcttgcaataagagaaactgcatttaggaaagatttaagctagctgctgagaacgtttacctgggcacctgaaagaagcaggagggcgtaggggtccctgaaatccagcaatctggtgggcgacgcgcaatcgccgaactcggctccgcc

SEQ ID NO: 11710 - DNA, 2688 bp, Zea Mays
gccttctgtgcgcctgtgccacacacacagccacgcccgtcggcccgctaggccgctactacccagaaggatggcggcggcggtggtggtgaggcgtgccgctggccttatccctctcctctcctcgcggttcggtgctcgcatgcccctccaccgggcgctatcccagatccctccgcctcgcttctgtcgcctactatcgcagcaaaccaagcccttctccgcctccgcgtcgaatggcgcggctacggacagaacccgcgagctgcgtctgtacaacaccaagtcgcggaagaaggagcagtttcggccgcgcattccaggcagggaggtcggcatgtacgtctgcggtgtcaccccctacgatgacagtcacatcggccatgcccgcgcatacgtagcctttgacgtcctctacaggtacttgcgctatttggactatgaagttcgctatgttcggaacttcaccgacattgatgacaagataattgcaagagcaaatcagctgggggaagatccttttagcttaagcaaaaggttctctgatgacttcttgtcagacatggccaatcttcaatgtctaccaccatccgtggagccccgtgtttcagatcatgttgatgagattataaatatgattaaacagatccttgataaccgttgcgcatatgtagtgggtggggatgtttatttctctgtagacaattttcctgagtacggagaattatctggtagaaagttagatgataatagagctggtgagagggttgctgttgatgagaggaagagaaatccagctgattttgctctatggaaggctgcaaaagatggggagccatggtgggatagcccatggggcccaggaaggccaggatggcacatagaatgcagtgccatgagtgcacattatttgggtcattcttttgacatacatggtggtggggaggatctcatctttccacaccatgagaatgagattgctcagagtcgtgcggcatgttgtgacagtaccataaattactggatacacaacggttttgtgaatgtaaacagccaaaaaatgtctaaatcacttggtaattttgttaccatacgtaaggttatagagatgtaccacccgctggctttgagaatgttcttacttggcacacactataggtccccaattaactacaccatagaacaactcaatgttgcatcagatagattgtactacacgtatcagaccttgcgtgattgtgaagagatctgtcagcatcaacaaagcaacactggaaatccattgcctgctaataccttaaattacatccagaaacttcatgatgaatttgagacctcaatgtcagatgatcttcacacttcagtggcattggctgctatgtctgagccattgaaagttatgaatgatctgctgcacactcgcaagggaaagaaacaggacaagaggttggaatcgctttccgccttagaagagaaaataagagtagttctctctgttctaggattgctaccttcaagttatcatgaggctttgcaacagctgcgggataaagcactgagacgagcttccatcactgaggagcttgtggtacagaagattgaagagaggactgcagcaaggaaggcgaagcagtatgaaaaatccgacgagatccggaaggaattggctgctgttggaatcgccctcatggatggccccgacggaacaacttggaggccatctttaccacttccagaggaggaagcggtgcttgctaaaacatgatgtgcgccgactttaggatcgagtcgagtatataggggtgattaatcttgttttaaaaagttaaatgcgtctgctagcagaaataaatgtgaatttagttagttgctctagtcaagactacggctctttatctatactagatctatgcccgtgcgttgccacggaaaacacatgaaatcgttatgtgtggtactacaaatcaaacaaagtgaaaaacattaaatatttattcacacgatattgtaaataaaacaacatatcatagcaacagtgagagatccatccatgccacaaacgagcataggagagagctggagtgtgccttttcatcaccttcttgacactggcagcatctactaacaaacgactactaattaactactactactattattatttatgcctactactcactcactatcatatacttatcataggcctaagagctaaaaaaacaacctggacttgtttcttctctgttgctgtcttcactgtcccctccttaagattacacctctccaaaggtatttcttttttctttgtcaaagcttctctacgctcggttgatagggccggccatcatgtagccatattagtagtccctcccagattagaggaatggagggccccccttcccctttttttgctctatgcacctcacacatcatagcccaatggcttcatgcccaggagaaaacctggagaaattccgaacagatgtaacagcaaaaaaacaataatctttgatttcttttgctcaccccacatgaattgcttgcaataagagaaactgcatttaggaaagatttaagctagctgctgagaacgtttacctgggcacctgaaagaagcaggagggcgtaggggtccctgaaatccagcaatctggtgggcgacgcgcaatcgccgaactcggctccgcc

SEQ ID NO: 11711 - DNA, 2720 bp, Zea Mays
gccttctgtgcgcctgtgccacacacacagccacgcccgtcggcccgctaggccgctactacccagaaggatggcggcggcggtggtggtgaggcgtgccgctggccttatccctctcctctcctcgcggttcggtgctcgcatgcccctccaccgggcgctatcccagatccctccgcctcgcttctgtcgcctactatcgcagcaaaccaagcccttctccgcctccgcgtcgaatggcgcggctacggacagaacccgcgagctgcgtctgtacaacaccaagtcgcggaagaaggagcagtttcggccgcgcattccaggcagggaggtcggcatgtacgtctgcggtgtcaccccctacgatgacagtcacatcggccatgcccgcgcatacgtagcctttgacgtcctctacaggtacttgcgctatttggactatgaagttcgctatgttcggaacttcaccgacattgatgacaaggaaacctgagttgcacttctggaattatgtagataattgcaagagcaaatcagctgggggaagatccttttagcttaagcaaaaggttctctgatgacttcttgtcagacatggccaatcttcaatgtctaccaccatccgtggagccccgtgtttcagatcatgttgatgagattataaatatgattaaacagatccttgataaccgttgcgcatatgtagtgggtggggatgtttatttctctgtagacaattttcctgagtacggagaattatctggtagaaagttagatgataatagagctggtgagagggttgctgttgatgagaggaagagaaatccagctgattttgctctatggaaggctgcaaaagatggggagccatggtgggatagcccatggggcccaggaaggccaggatggcacatagaatgcagtgccatgagtgcacattatttgggtcattcttttgacatacatggtggtggggaggatctcatctttccacaccatgagaatgagattgctcagagtcgtgcggcatgttgtgacagtaccataaattactggatacacaacggttttgtgaatgtaaacagccaaaaaatgtctaaatcacttggtaattttgttaccatacgtaaggttatagagatgtaccacccgctggctttgagaatgttcttacttggcacacactataggtccccaattaactacaccatagaacaactcaatgttgcatcagatagattgtactacacgtatcagaccttgcgtgattgtgaagagatctgtcagcatcaacaaagcaacactggaaatccattgcctgctaataccttaaattacatccagaaacttcatgatgaatttgagacctcaatgtcagatgatcttcacacttcagtggcattggctgctatgtctgagccattgaaagttatgaatgatctgctgcacactcgcaagggaaagaaacaggacaagaggttggaatcgctttccgccttagaagagaaaataagagtagttctctctgttctaggattgctaccttcaagttatcatgaggctttgcaacagctgcgggataaagcactgagacgagcttccatcactgaggagcttgtggtacagaagattgaagagaggactgcagcaaggaaggcgaagcagtatgaaaaatccgacgagatccggaaggaattggctgctgttggaatcgccctcatggatggccccgacggaacaacttggaggccatctttaccacttccagaggaggaagcggtgcttgctaaaacatgatgtgcgccgactttaggatcgagtcgagtatataggggtgattaatcttgttttaaaaagttaaatgcgtctgctagcagaaataaatgtgaatttagttagttgctctagtcaagactacggctctttatctatactagatctatgcccgtgcgttgccacggaaaacacatgaaatcgttatgtgtggtactacaaatcaaacaaagtgaaaaacattaaatatttattcacacgatattgtaaataaaacaacatatcatagcaacagtgagagatccatccatgccacaaacgagcataggagagagctggagtgtgccttttcatcaccttcttgacactggcagcatctactaacaaacgactactaattaactactactactattattatttatgcctactactcactcactatcatatacttatcataggcctaagagctaaaaaaacaacctggacttgtttcttctctgttgctgtcttcactgtcccctccttaagattacacctctccaaaggtatttcttttttctttgtcaaagcttctctacgctcggttgatagggccggccatcatgtagccatattagtagtccctcccagattagaggaatggagggccccccttcccctttttttgctctatgcacctcacacatcatagcccaatggcttcatgcccaggagaaaacctggagaaattccgaacagatgtaacagcaaaaaaacaataatctttgatttcttttgctcaccccacatgaattgcttgcaataagagaaactgcatttaggaaagatttaagctagctgctgagaacgtttacctgggcacctgaaagaagcaggagggcgtaggggtccctgaaatccagcaatctggtgggcgacgcgcaatcgccgaactcggctccgcc

SEQ ID NO: 11712 - DNA, 1416 bp, Zea Mays
ccgcatcgatcaccctcctcgctcccggtcaacagcagcggcgcagagcacgacaccgacacgcgccatggcggcggtgaggcaccggcagctggaggccaacggcatcacgatgcacgtcgcggaggccggccccgtgaacgcctccgcgccggcggtgctgttcgtgcacggcttcccggagctctggtactcgtggcgccaccagatgggctacctcgccgcgcgcggctaccgctgcgtggcacccgacctccgaggctacggcggcaccaccgcgccgccggaaccgaactcctacaccgtcttccatatcgtcggcgacatcgtcgcgctcctcgacgccctccacctcccgcaggtgttcgttgtcggccacgactggggcgccatcgtgtcgtggaacctctgcctgctgcggccggatcgggtgcgcgcgctcgtcaacctcagcgttgccttcatgccccggaggcccggcgtcaagcctcttgagtacttccgcgccgcatacggggatgagtactacgtctgccgattccaggaaccaggactcgaagcagaatttgctacgtttgacttgaagagtttcttcacattggcattgactcttcgggcaacaggttcttcagctatggaccttcgaaaaatgcaaacttacagtaagcaaatggtgctaccttcttggctatctgaggaagatgtcagttaccttgcaagtgtgtactcaaaaactggatttgctggtggagtaaattactatcgctgcttggacctgagcaaaggtgcaagttccaaccaagttcatcgttggggacggtgacctggcgtaccatcaccctggagtgaagaggtacatccacaagggcgggttcaagagggacgtgcccatgcttgaggaggtggtggtcatcaagggcgctgggcacttcatccagcaggaaagagcgcaggaaatcagtgagcacatccatgactacatcaagaagttcgaagcttgtggtctgccgccactgagagtttcaaagctgtgagagacctgatggcttctgtacataactcaaatggtctgggagctattgtagttgtttgtagtgctgcagatctatatattatgaatggtatgaagtactgacgatctattcaagggacccacgttgcgttgtgctgtgtggggggcactggtccccacttaattttcttgtttcagtggacatcttattttatttgatgtagctacaaaggttcattagggcatgtacaatccaaaaaataatttgtatcatatgaaatctaagagggtaagtgaaaaaacaggatatgtatattggttaaaggacgtttttagcacggttctctaagagcaactctaaaagactgctaaaaatttattcctaaaaactatgtattaaaaac

SEQ ID NO: 11713 - DNA, 1301 bp, Zea Mays
ccgcatcgatcaccctcctcgctcccggtcaacagcagcggcgcagagcacgacaccgacacgcgccatggcggcggtgaggcaccggcagctggaggccaacggcatcacgatgcacgtcgcggaggccggccccgtgaacgcctccgcgccggcggtgctgttcgtgcacggcttcccggagctctggtactcgtggcgccaccagatgggctacctcgccgcgcgcggctaccgctgcgtggcacccgacctccgaggctacggcggcaccaccgcgccgccggaaccgaactcctacaccgtcttccatatcgtcggcgacatcgtcgcgctcctcgacgccctccacctcccgcaggtgttcgttgtcggccacgactggggcgccatcgtgtcgtggaacctctgcctgctgcggccggatcgggtgcgcgcgctcgtcaacctcagcgttgccttcatgccccggaggcccggcgtcaagcctcttgagtacttccgcgccgcatacggggatgagtactacgtctgccgattccaggaaccaggactcgaagcagaatttgctacgtttgacttgaagagtttcttcacattggcattgactcttcgggcaacaggttcttcagctatggaccttcgaaaaatgcaaacttacagagcaaaggtgcaagttccaaccaagttcatcgttggggacggtgacctggcgtaccatcaccctggagtgaagaggtacatccacaagggcgggttcaagagggacgtgcccatgcttgaggaggtggtggtcatcaagggcgctgggcacttcatccagcaggaaagagcgcaggaaatcagtgagcacatccatgactacatcaagaagttcgaagcttgtggtctgccgccactgagagtttcaaagctgtgagagacctgatggcttctgtacataactcaaatggtctgggagctattgtagttgtttgtagtgctgcagatctatatattatgaatggtatgaagtactgacgatctattcaagggacccacgttgcgttgtgctgtgtggggggcactggtccccacttaattttcttgtttcagtggacatcttattttatttgatgtagctacaaaggttcattagggcatgtacaatccaaaaaataatttgtatcatatgaaatctaagagggtaagtgaaaaaacaggatatgtatattggttaaaggacgtttttagcacggttctctaagagcaactctaaaagactgctaaaaatttattcctaaaaactatgtattaaaaac

SEQ ID NO: 11714 - DNA, 1905 bp, Zea Mays
gttcttcaatggtgctcggagtcagagagggatgctatctttgatgttctacagccacatttgcttaccctttcttgcaagaaatatgccgtttttcttgtaaagaagcttatagaactcgcctctaaaaaacagtttgccagtttcatatcttcccttcatggtcgtgttgccaaccttcttcatcatactattggagctgcagtcgttgattatgcatttcagcgaggaacacaacgtcagaaaaggcaattgttagttgaactgtactcccctgaacttcagctattcaaggatctgactgtgcaaagttcctcctgtttgatagatacaatttccaagcttgggttgcagatatcatctgtcctgcttcatatgactattgtgattgataaaatcttggagaaaggtactgttgagtacttaatagtgcacacggccatattggagtactttacaattgcagataagacctcagcctcggatgctatttgtcaacttatcccccttcttactcaaggggcattaatcatagatggagatgaacctacaaacgctccagaactaccaaagaaagcaaaagctaagaagaaaaggtcgaaagagccacttattgttcggatcatgcagacaagggaaggattaaaactaggaattagttgcgtcaagtatggcagtgcaaaggacaggaagaagattattaaaagtttgaagggccacattatgaagcttgctctaagtgattttggatgtctttttcttatctgcattatttctattgttgatgacacaaagcttgttaataagattgtcattcaagagctggtaaaacatttaaagcagctcatttttgacaagaatgggagacggccattgctgcaactacttcaccctttttgctcacgctatctttctccgaatgatctagcttgtctgaactacaatgtgccttctcttagttcaacagaggttgagacatcagagagtgctataggagttataacagaaaataaattagatgatgtgactgctcaagatcccaatggcttagaaggcaagcaaattgtgtttgagagcaagaaggatccattacaaaggcgacatgaactgttgataaaaagtgagcttgccgaggctctcgttcagtcatgcattgaaaatgttggagaattacttcgaacaaattttggcaaagaagtattgtatgagatggctgttggtggtaaagacaacgttctggatggcctcaccgataggatccacatgttgcacgatgcaatagcgtctgatgcggcccaaccgaagactgaagatacggaacatgcatttgaaaacttcttttccagccgtgtaatcagaagaatggtaatcgattgcccagcgtttgcagtcactctctggagaaaggctcttcaggggaagtgcaagatatgggctgaaggacacagttcgaaggtggttgcgagtttcctggagtcgccaagtacggaggtcaaggatcttgcaaaacctgagttgcagccgctggttgatgctggcatccttaaagtgccagaccctaaggttgttcaaaaatgactcgtgcgcgggggcctttttgcgccagtaaatgactcgaggaccatcccttgtttaagggatacggataggttttttgaagctcgttctgccgataaaaattgttaaatcactcgttcgtgtgtacgccagtccgttgtacacataccctggatatatggtgaatcggatacgttattttgttttaaactcggaatgctcctttttatctataaatttttttaggagatttgtgttcttgtcctgctttggaaggccaaaaattattttactcttgtttttttttaaaaaaatccgaggttcttgtaagctcactaaacgttgaag

SEQ ID NO: 11715 - DNA, 2597 bp, Zea Mays
gatagggcatgtcgggtctggtgggaaaccctttcatcgtcctcctgcgtcgccagagcggagcaacgaggggcgcgcgcgatggcaggcggcggtctccagggagcgaagaagcgcaagcgcgagcacgcggaagggaaggcaaagcctcggaagcaagtcaagggaggcggggacggagcgaagcggaagagccactcggccgccggcggctacacggcccatggcggcgccggcgaagttgtcgcgaggaagaagaccccggttacccccaaggagaagcgcctcgcggccaaggaaatgtcggaggccaggaagatgaagaggaggcagcattacagccttgagaaggaactaacgaaattgtgggaaaagatgagatgtcacgatgtgagcaaagaggagaggtccaaggcagtaagtcaggctatccataaaatggatgggaaatatttggacattgccacatcacatgttactgcacgtgttcttcaaacatgtgtaaagtggtgctcggagtcagagagggatgctatctttgatgttctacagccacatttgcttaccctttcttgcaagaaatatgccgtttttcttgtaaagaagcttatagaactcgcctctaaaaaacagtttgccagtttcatatcttcccttcatggtcgtgttgccaaccttcttcatcatactattggagctgcagtcgttgattatgcatttcagcgaggaacacaacgtcagaaaaggcaattgttagttgaactgtactcccctgaacttcagctattcaaggatctgactgtgcaaagttcctcctgtttgatagatacaatttccaagcttgggttgcagatatcatctgtcctgcttcatatgactattgtgattgataaaatcttggagaaaggtactgttgagtacttaatagtgcacacggccatattggagtactttacaattgcagataagacctcagcctcggatgctatttgtcaacttatcccccttcttactcaaggggcattaatcatagatggagatgaacctacaaacgctccagaactaccaaagaaagcaaaagctaagaagaaaaggtcgaaagagccacttattgttcggatcatgcagacaagggaaggattaaaactaggaattagttgcgtcaagtatggcagtgcaaaggacaggaagaagattattaaaagtttgaagggccacattatgaagcttgctctaagtgattttggatgtcttgtgagtaatgactgtatttatttacaattattttggctcttaaattggtaatattgttacctgttgcatttctcccttttctagacaagattcaagttcttgtgaatggattcgatttaccctcagtcctctgctaacacatcactttcttatccagtttcttatctgcattatttctattgttgatgacacaaagcttgttaataagattgtcattcaagagctggtaaaacatttaaagcagctcatttttgacaagaatgggagacggccattgctgcaactacttcaccctttttgctcacgctatctttctccgaatgatctagcttgtctgaactacaatgtgccttctcttagttcaacagaggttgagacatcagagagtgctataggagttataacagaaaataaattagatgatgtgactgctcaagatcccaatggcttagaaggcaagcaaattgtgtttgagagcaagaaggatccattacaaaggcgacatgaactgttgataaaaaccatggatatagaaaggaagcaaattaagtgggagataaatctgtggagtagctctcgttcagtcatgcattgaaaatgttggagaattacttcgaacaaattttggcaaagaagtattgtatgagatggctgttggtggtaaagacaacgttctggatggcctcaccgataggatccacatgttgcacgatgcaatagcgtctgatgcggcccaaccgaagactgaagatacggaacatgcatttgaaaacttcttttccagccgtgtaatcagaagaatggtaatcgattgcccagcgtttgcagtcactctctggagaaaggctcttcaggggaagtgcaagatatgggctgaaggacacagttcgaaggtggttgcgagtttcctggagtcgccaagtacggaggtcaaggatcttgcaaaacctgagttgcagccgctggttgatgctggcatccttaaagtgccagaccctaaggttgttcaaaaatgactcgtgcgcgggggcctttttgcgccagtaaatgactcgaggaccatcccttgtttaagggatacggataggttttttgaagctcgttctgccgataaaaattgttaaatcactcgttcgtgtgtacgccagtccgttgtacacataccctggatatatggtgaatcggatacgttattttgttttaaactcggaatgctcctttttatctataaatttttttaggagatttgtgttcttgtcctgctttggaaggccaaaaattattttactcttgtttttttttaaaaaaatccgaggttcttgtaagctcactaaacgttgaag

SEQ ID NO: 11716 - DNA, 2786 bp, Zea Mays
gatagggcatgtcgggtctggtgggaaaccctttcatcgtcctcctgcgtcgccagagcggagcaacgaggggcgcgcgcgatggcaggcggcggtctccagggagcgaagaagcgcaagcgcgagcacgcggaagggaaggcaaagcctcggaagcaagtcaagggaggcggggacggagcgaagcggaagagccactcggccgccggcggctacacggcccatggcggcgccggcgaagttgtcgcgaggaagaagaccccggttacccccaaggagaagcgcctcgcggccaaggaaatgtcggaggccaggaagatgaagaggaggcagcattacagccttgagaaggaactaacgaaattgtgggaaaagatgagatgtcacgatgtgagcaaagaggagaggtccaaggcagtaagtcaggctatccataaaatggatgggaaatatttggacattgccacatcacatgttactgcacgtgttcttcaaacatgtgtaaagtggtgctcggagtcagagagggatgctatctttgatgttctacagccacatttgcttaccctttcttgcaagaaatatgccgtttttcttgtaaagaagcttatagaactcgcctctaaaaaacagtttgccagtttcatatcttcccttcatggtcgtgttgccaaccttcttcatcatactattggagctgcagtcgttgattatgcatttcagcgaggaacacaacgtcagaaaaggcaattgttagttgaactgtactcccctgaacttcagctattcaaggatctgactgtgcaaagttcctcctgatacaatttccaagcttgggttgcagatatcatctgtcctgcttcatatgactattgtgattgataaaatcttggagaaaggtactgttgagtacttaatagtgcacacggccatattggagtactttacaattgcagataagacctcagcctcggatgctatttgtcaacttatcccccttcttactcaaggggcattaatcatagatggagatgaacctacaaacgctccagaactaccaaagaaagcaaaagctaagaagaaaaggtcgaaagagccacttattgttcggatcatgcagacaagggaaggattaaaactaggaattagttgcgtcaagtatggcagtgcaaaggtatatctgcacaagttattatattttaacttcaggtcaaacacgttctccgctactatccactggtgttttattcagtgttgctttagttttgtaaattttgtggtgcttgtatatctttgcaaattgaattatgcactacaccgtaccgagtagtccttattgtgaatttattttctactgcatgtactgtcttcattaacaagactaagtgggcgcgagaatgtatttcaggacaggaagaagattattaaaagtttgaagggccacattatgaagcttgctctaagtgattttggatgtcttgtgagtaatgactgtatttatttacaattattttggctcttaaattggtaatattgttacctgttgcatttctcccttttctagacaagattcaagttcttgtgaatggattcgatttaccctcagtcctctgctaacacatcactttcttatccagtttcttatctgcattatttctattgttgatgacacaaagcttgttaataagattgtcattcaagagctggtaaaacatttaaagcagctcatttttgacaagaatgggagacggccattgctgcaactacttcaccctttttgctcacgctatctttctccgaatgatctagcttgtctgaactacaatgtgccttctcttagttcaacagaggttgagacatcagagagtgctataggagttataacagaaaataaattagatgatgtgactgctcaagatcccaatggcttagaaggcaagcaaattgtgtttgagagcaagaaggatccattacaaaggcgacatgaactgttgataaaaagtgagcttgccgaggctctcgttcagtcatgcattgaaaatgttggagaattacttcgaacaaattttggcaaagaagtattgtatgagatggctgttggtggtaaagacaacgttctggatggcctcaccgataggatccacatgttgcacgatgcaatagcgtctgatgcggcccaaccgaagactgaagatacggaacatgcatttgaaaacttcttttccagccgtgtaatcagaagaatggtaatcgattgcccagcgtttgcagtcactctctggagaaaggctcttcaggggaagtgcaagatatgggctgaaggacacagttcgaaggtggttgcgagtttcctggagtcgccaagtacggaggtcaaggatcttgcaaaacctgagttgcagccgctggttgatgctggcatccttaaagtgccagaccctaaggttgttcaaaaatgactcgtgcgcgggggcctttttgcgccagtaaatgactcgaggaccatcccttgtttaagggatacggataggttttttgaagctcgttctgccgataaaaattgttaaatcactcgttcgtgtgtacgccagtccgttgtacacataccctggatatatggtgaatcggatacgttattttgttttaaactcggaatgctcctttttatctataaatttttttaggagatttgtgttcttgtcctgctttggaaggccaaaaattattttactcttgtttttttttaaaaaaatccgaggttcttgtaagctcactaaacgttgaag

SEQ ID NO: 11717 - DNA, 2622 bp, Zea Mays
gatagggcatgtcgggtctggtgggaaaccctttcatcgtcctcctgcgtcgccagagcggagcaacgaggggcgcgcgcgatggcaggcggcggtctccagggagcgaagaagcgcaagcgcgagcacgcggaagggaaggcaaagcctcggaagcaagtcaagggaggcggggacggagcgaagcggaagagccactcggccgccggcggctacacggcccatggcggcgccggcgaagttgtcgcgaggaagaagaccccggttacccccaaggagaagcgcctcgcggccaaggaaatgtcggaggccaggaagatgaagaggaggcagcattacagccttgagaaggaactaacgaaattgtgggaaaagatgagatgtcacgatgtgagcaaagaggagaggtccaaggcagtaagtcaggctatccataaaatggatgggaaatatttggacattgccacatcacatgttactgcacgtgttcttcaaacatgtgtaaagtggtgctcggagtcagagagggatgctatctttgatgttctacagccacatttgcttaccctttcttgcaagaaatatgccgtttttcttgtaaagaagcttatagaactcgcctctaaaaaacagtttgccagtttcatatcttcccttcatggtcgtgttgccaaccttcttcatcatactattggagctgcagtcgttgattatgcatttcagcgaggaacacaacgtcagaaaaggcaattgttagttgaactgtactcccctgaacttcagctattcaaggatctgactgtgcaaagttcctcctgatacaatttccaagcttgggttgcagatatcatctgtcctgcttcatatgactattgtgattgataaaatcttggagaaaggtactgttgagtacttaatagtgcacacggccatattggagtactttacaattgcagataagcctcggatgctatttgtcaacttatcccccttcttactcaaggggcattaatcatagatggagatgaacctacaaacgctccagaactaccaaagaaagcaaaagctaagaagaaaaggtcgaaagagccacttattgttcggatcatgcagacaagggaaggattaaaactaggaattagttgcgtcaagtatggcagtgcaaaggtatatctgcacaagttattatattttaacttcaggtcaaacacgttctccgctactatccactggtgttttattcagtgttgctttagttttgtaaattttgtggtgcttgtatatctttgcaaattgaattatgcactacaccgtaccgagtagtccttattgtgaatttattttctactgcatgtactgtcttcattaacaagactaagtgggcgcgagaatgtatttcaggacaggaagaagattattaaaagtttgaagggccacattatgaagcttgctctaagtgattttggatgtctttttcttatctgcattatttctattgttgatgacacaaagcttgttaataagattgtcattcaagagctggtaaaacatttaaagcagctcatttttgacaagaatgggagacggccattgctgcaactacttcaccctttttgctcacgctatctttctccgaatgatctagcttgtctgaactacaatgtgccttctcttagttcaacagaggttgagacatcagagagtgctataggagttataacagaaaataaattagatgatgtgactgctcaagatcccaatggcttagaaggcaagcaaattgtgtttgagagcaagaaggatccattacaaaggcgacatgaactgttgataaaaagtgagcttgccgaggctctcgttcagtcatgcattgaaaatgttggagaattacttcgaacaaattttggcaaagaagtattgtatgagatggctgttggtggtaaagacaacgttctggatggcctcaccgataggatccacatgttgcacgatgcaatagcgtctgatgcggcccaaccgaagactgaagatacggaacatgcatttgaaaacttcttttccagccgtgtaatcagaagaatggtaatcgattgcccagcgtttgcagtcactctctggagaaaggctcttcaggggaagtgcaagatatgggctgaaggacacagttcgaaggtggttgcgagtttcctggagtcgccaagtacggaggtcaaggatcttgcaaaacctgagttgcagccgctggttgatgctggcatccttaaagtgccagaccctaaggttgttcaaaaatgactcgtgcgcgggggcctttttgcgccagtaaatgactcgaggaccatcccttgtttaagggatacggataggttttttgaagctcgttctgccgataaaaattgttaaatcactcgttcgtgtgtacgccagtccgttgtacacataccctggatatatggtgaatcggatacgttattttgttttaaactcggaatgctcctttttatctataaatttttttaggagatttgtgttcttgtcctgctttggaaggccaaaaattattttactcttgtttttttttaaaaaaatccgaggttcttgtaagctcactaaacgttgaag

SEQ ID NO: 11718 - DNA, 2397 bp, Zea Mays
gatagggcatgtcgggtctggtgggaaaccctttcatcgtcctcctgcgtcgccagagcggagcaacgaggggcgcgcgcgatggcaggcggcggtctccagggagcgaagaagcgcaagcgcgagcacgcggaagggaaggcaaagcctcggaagcaagtcaagggaggcggggacggagcgaagcggaagagccactcggccgccggcggctacacggcccatggcggcgccggcgaagttgtcgcgaggaagaagaccccggttacccccaaggagaagcgcctcgcggccaaggaaatgtcggaggccaggaagatgaagaggaggcagcattacagccttgagaaggaactaacgaaattgtgggaaaagatgagatgtcacgatgtgagcaaagaggagaggtccaaggcagtaagtcaggctatccataaaatggatgggaaatatttggacattgccacatcacatgttactgcacgtgttcttcaaacatgtgtaaagtggtgctcggagtcagagagggatgctatctttgatgttctacagccacatttgcttaccctttcttgcaagaaatatgccgtttttcttgtaaagaagcttatagaactcgcctctaaaaaacagtttgccagtttcatatcttcccttcatggtcgtgttgccaaccttcttcatcatactattggagctgcagtcgttgattatgcatttcagcgaggaacacaacgtcagaaaaggcaattgttagttgaactgtactcccctgaacttcagctattcaaggatctgactgtgcaaagttcctcctgatatcatctgtcctgcttcatatgactattgtgattgataaaatcttggagaaaggtactgttgagtacttaatagtgcacacggccatattggagtactttacaattgcagataagacctcagcctcggatgctatttgtcaacttatcccccttcttactcaaggggcattaatcatagatggagatgaacctacaaacgctccagaactaccaaagaaagcaaaagctaagaagaaaaggtcgaaagagccacttattgttcggatcatgcagacaagggaaggattaaaactaggaattagttgcgtcaagtatggcagtgcaaagactaagtgggcgcgagaatgtatttcaggacaggaagaagattattaaaagtttgaagggccacattatgaagcttgctctaagtgattttggatgtctttttcttatctgcattatttctattgttgatgacacaaagcttgttaataagattgtcattcaagagctggtaaaacatttaaagcagctcatttttgacaagaatgggagacggccattgctgcaactacttcaccctttttgctcacgctatctttctccgaatgatctagcttgtctgaactacaatgtgccttctcttagttcaacagaggttgagacatcagagagtgctataggagttataacagaaaataaattagatgatgtgactgctcaagatcccaatggcttagaaggcaagcaaattgtgtttgagagcaagaaggatccattacaaaggcgacatgaactgttgataaaaagtgagcttgccgaggctctcgttcagtcatgcattgaaaatgttggagaattacttcgaacaaattttggcaaagaagtattgtatgagatggctgttggtggtaaagacaacgttctggatggcctcaccgataggatccacatgttgcacgatgcaatagcgtctgatgcggcccaaccgaagactgaagatacggaacatgcatttgaaaacttcttttccagccgtgtaatcagaagaatggtaatcgattgcccagcgtttgcagtcactctctggagaaaggctcttcaggggaagtgcaagatatgggctgaaggacacagttcgaaggtggttgcgagtttcctggagtcgccaagtacggaggtcaaggatcttgcaaaacctgagttgcagccgctggttgatgctggcatccttaaagtgccagaccctaaggttgttcaaaaatgactcgtgcgcgggggcctttttgcgccagtaaatgactcgaggaccatcccttgtttaagggatacggataggttttttgaagctcgttctgccgataaaaattgttaaatcactcgttcgtgtgtacgccagtccgttgtacacataccctggatatatggtgaatcggatacgttattttgttttaaactcggaatgctcctttttatctataaatttttttaggagatttgtgttcttgtcctgctttggaaggccaaaaattattttactcttgtttttttttaaaaaaatccgaggttcttgtaagctcactaaacgttgaag

SEQ ID NO: 11719 - DNA, 2389 bp, Zea Mays
gatagggcatgtcgggtctggtgggaaaccctttcatcgtcctcctgcgtcgccagagcggagcaacgaggggcgcgcgcgatggcaggcggcggtctccagggagcgaagaagcgcaagcgcgagcacgcggaagggaaggcaaagcctcggaagcaagtcaagggaggcggggacggagcgaagcggaagagccactcggccgccggcggctacacggcccatggcggcgccggcgaagttgtcgcgaggaagaagaccccggttacccccaaggagaagcgcctcgcggccaaggaaatgtcggaggccaggaagatgaagaggaggcagcattacagccttgagaaggaactaacgaaattgtgggaaaagatgagatgtcacgatgtgagcaaagaggagaggtccaaggcagtaagtcaggctatccataaaatggatgggaaatatttggacattgccacatcacatgttactgcacgtgttcttcaaacatgtgtaaagtggtgctcggagtcagagagggatgctatctttgatgttctacagccacatttgcttaccctttcttgcaagaaatatgccgtttttcttgtaaagaagcttatagaactcgcctctaaaaaacagtttgccagtttcatatcttcccttcatggtcgtgttgccaaccttcttcatcatactattggagctgcagtcgttgattatgcatttcagcgaggaacacaacgtcagaaaaggcaattgttagttgaactgtactcccctgaacttcagctattcaaggatctgactgtgcaaagttcctcctgtttgatagatacaatttccaagcttgggttgcagatatcatctgtcctgcttcatatgactattgtgattgataaaatcttggagaaaggtactgttgagtacttaatagtgcacacggccatattggagtactttacaattgcagataagacctcagcctcggatgctatttgtcaacttatcccccttcttactcaaggggcattaatcatagatggagatgaacctacaaacgctccagaactaccaaagaaagcaaaagctaagaagaaaaggtcgaaagagccacttattgttcggatcatgcagacaagggaaggattaaaactaggaattagttgcgtcaagtatggcagtgcaaaggacaggaagaagattattaaaagtttgaagggccacattatgaagcttgctctaagtgattttggatgtctttttcttatctgcattatttctattgttgatgacacaaagcttgttaataagattgtcattcaagagctggtaaaacatttaaagcagctcatttttgacaagaatgggagacggccattgctgcaactacttcaccctttttgctcacgctatctttctccgaatgatctagcttgtctgaactacaatgtgccttctcttagttcaacagaggttgagacatcagagagtgctataggagttataacagaaaataaattagatgatgtgactgctcaagatcccaatggcttagaaggcaagcaaattgtgtttgagagcaagaaggatccattacaaaggcgacatgaactgttgataaaaagctctcgttcagtcatgcattgaaaatgttggagaattacttcgaacaaattttggcaaagaagtattgtatgagatggctgttggtggtaaagacaacgttctggatggcctcaccgataggatccacatgttgcacgatgcaatagcgtctgatgcggcccaaccgaagactgaagatacggaacatgcatttgaaaacttcttttccagccgtgtaatcagaagaatggtaatcgattgcccagcgtttgcagtcactctctggagaaaggctcttcaggggaagtgcaagatatgggctgaaggacacagttcgaaggtggttgcgagtttcctggagtcgccaagtacggaggtcaaggatcttgcaaaacctgagttgcagccgctggttgatgctggcatccttaaagtgccagaccctaaggttgttcaaaaatgactcgtgcgcgggggcctttttgcgccagtaaatgactcgaggaccatcccttgtttaagggatacggataggttttttgaagctcgttctgccgataaaaattgttaaatcactcgttcgtgtgtacgccagtccgttgtacacataccctggatatatggtgaatcggatacgttattttgttttaaactcggaatgctcctttttatctataaatttttttaggagatttgtgttcttgtcctgctttggaaggccaaaaattattttactcttgtttttttttaaaaaaatccgaggttcttgtaagctcactaaacgttgaag

SEQ ID NO: 11720 - DNA, 2589 bp, Zea Mays
gatagggcatgtcgggtctggtgggaaaccctttcatcgtcctcctgcgtcgccagagcggagcaacgaggggcgcgcgcgatggcaggcggcggtctccagggagcgaagaagcgcaagcgcgagcacgcggaagggaaggcaaagcctcggaagcaagtcaagggaggcggggacggagcgaagcggaagagccactcggccgccggcggctacacggcccatggcggcgccggcgaagttgtcgcgaggaagaagaccccggttacccccaaggagaagcgcctcgcggccaaggaaatgtcggaggccaggaagatgaagaggaggcagcattacagccttgagaaggaactaacgaaattgtgggaaaagatgagatgtcacgatgtgagcaaagaggagaggtccaaggcagtaagtcaggctatccataaaatggatgggaaatatttggacattgccacatcacatgttactgcacgtgttcttcaaacatgtgtaaagtggtgctcggagtcagagagggatgctatctttgatgttctacagccacatttgcttaccctttcttgcaagaaatatgccgtttttcttgtaaagaagcttatagaactcgcctctaaaaaacagtttgccagtttcatatcttcccttcatggtcgtgttgccaaccttcttcatcatactattggagctgcagtcgttgattatgcatttcagcgaggaacacaacgtcagaaaaggcaattgttagttgaactgtactcccctgaacttcagctattcaaggatctgactgtgcaaagttcctcctgatatcatctgtcctgcttcatatgactattgtgattgataaaatcttggagaaaggtactgttgagtacttaatagtgcacacggccatattggagtactttacaattgcagataagacctcagcctcggatgctatttgtcaacttatcccccttcttactcaaggggcattaatcatagatggagatgaacctacaaacgctccagaactaccaaagaaagcaaaagctaagaagaaaaggtcgaaagagccacttattgttcggatcatgcagacaagggaaggattaaaactaggaattagttgcgtcaagtatggcagtgcaaaggtatatctgcacaagttattatattttaacttcaggtcaaacacgttctccgctactatccactggtgttttattcagtgttgctttagttttgtaaattttgtggtgcttgtatatctttgcaaattgaattatgcactacaccgtaccgagtagtccttattgtgaatttattttctactgcatgtactgtcttcattaacaagactaagtgggcgcgagaatgtatttcaggacaggaagaagattattaaaagtttgaagggccacattatgaagcttgctctaagtgattttggatgtctttttcttatctgcattatttctattgttgatgacacaaagcttgttaataagattgtcattcaagagctggtaaaacatttaaagcagctcatttttgacaagaatgggagacggccattgctgcaactacttcaccctttttgctcacgctatctttctccgaatgatctagcttgtctgaactacaatgtgccttctcttagttcaacagaggttgagacatcagagagtgctataggagttataacagaaaataaattagatgatgtgactgctcaagatcccaatggcttagaaggcaagcaaattgtgtttgagagcaagaaggatccattacaaaggcgacatgaactgttgataaaaagctctcgttcagtcatgcattgaaaatgttggagaattacttcgaacaaattttggcaaagaagtattgtatgagatggctgttggtggtaaagacaacgttctggatggcctcaccgataggatccacatgttgcacgatgcaatagcgtctgatgcggcccaaccgaagactgaagatacggaacatgcatttgaaaacttcttttccagccgtgtaatcagaagaatggtaatcgattgcccagcgtttgcagtcactctctggagaaaggctcttcaggggaagtgcaagatatgggctgaaggacacagttcgaaggtggttgcgagtttcctggagtcgccaagtacggaggtcaaggatcttgcaaaacctgagttgcagccgctggttgatgctggcatccttaaagtgccagaccctaaggttgttcaaaaatgactcgtgcgcgggggcctttttgcgccagtaaatgactcgaggaccatcccttgtttaagggatacggataggttttttgaagctcgttctgccgataaaaattgttaaatcactcgttcgtgtgtacgccagtccgttgtacacataccctggatatatggtgaatcggatacgttattttgttttaaactcggaatgctcctttttatctataaatttttttaggagatttgtgttcttgtcctgctttggaaggccaaaaattattttactcttgtttttttttaaaaaaatccgaggttcttgtaagctcactaaacgttgaag

SEQ ID NO: 11721 - DNA, 2637 bp, Zea Mays
gatagggcatgtcgggtctggtgggaaaccctttcatcgtcctcctgcgtcgccagagcggagcaacgaggggcgcgcgcgatggcaggcggcggtctccagggagcgaagaagcgcaagcgcgagcacgcggaagggaaggcaaagcctcggaagcaagtcaagggaggcggggacggagcgaagcggaagagccactcggccgccggcggctacacggcccatggcggcgccggcgaagttgtcgcgaggaagaagaccccggttacccccaaggagaagcgcctcgcggccaaggaaatgtcggaggccaggaagatgaagaggaggcagcattacagccttgagaaggaactaacgaaattgtgggaaaagatgagatgtcacgatgtgagcaaagaggagaggtccaaggcagtaagtcaggctatccataaaatggatgggaaatatttggacattgccacatcacatgttactgcacgtgttcttcaaacatgtgtaaagtggtgctcggagtcagagagggatgctatctttgatgttctacagccacatttgcttaccctttcttgcaagaaatatgccgtttttcttgtaaagaagcttatagaactcgcctctaaaaaacagtttgccagtttcatatcttcccttcatggtcgtgttgccaaccttcttcatcatactattggagctgcagtcgttgattatgcatttcagcgaggaacacaacgtcagaaaaggcaattgttagttgaactgtactcccctgaacttcagctattcaaggatctgactgtgcaaagttcctcctgtttgatagatacaatttccaagcttgggttgcagatatcatctgtcctgcttcatatgactattgtgattgataaaatcttggagaaaggtactgttgagtacttaatagtgcacacggccatattggagtactttacaattgcagataagacctcagcctcggatgctatttgtcaacttatcccccttcttactcaaggggcattaatcatagatggagatgaacctacaaacgctccagaactaccaaagaaagcaaaagctaagaagaaaaggtcgaaagagccacttattgttcggatcatgcagacaagggaaggattaaaactaggaattagttgcgtcaagtatggcagtgcaaaggtatatctgcacaagttattatattttaacttcaggtcaaacacgttctccgctactatccactggtgttttattcagtgttgctttagttttgtaaattttgtggtgcttgtatatctttgcaaattgaattatgcactacaccgtaccgagtagtccttattgtgaatttattttctactgcatgtactgtcttcattaacaagactaagtgggcgcgagaatgtatttcaggacaggaagaagattattaaaagtttgaagggccacattatgaagcttgctctaagtgattttggatgtctttttcttatctgcattatttctattgttgatgacacaaagcttgttaataagattgtcattcaagagctggtaaaacatttaaagcagctcatttttgacaagaatgggagacggccattgctgcaactacttcaccctttttgctcacgctatctttctccgaatgatctagcttgtctgaactacaatgtgccttctcttagttcaacagaggttgagacatcagagagtgctataggagttataacagaaaataaattagatgatgtgactgctcaagatcccaatggcttagaaggcaagcaaattgtgtttgagagcaagaaggatccattacaaaggcgacatgaactgttgataaaaagtgagcttgccgaggctctcgttcagtcatgcattgaaaatgttggagaattacttcgaacaaattttggcaaagaagtattgtatgagatggctgttggtggtaaagacaacgttctggatggcctcaccgataggatccacatgttgcacgatgcaatagcgtctgatgcggcccaaccgaagactgaagatacggaacatgcatttgaaaacttcttttccagccgtgtaatcagaagaatggtaatcgattgcccagcgtttgcagtcactctctggagaaaggctcttcaggggaagtgcaagatatgggctgaaggacacagttcgaaggtggttgcgagtttcctggagtcgccaagtacggaggtcaaggatcttgcaaaacctgagttgcagccgctggttgatgctggcatccttaaagtgccagaccctaaggttgttcaaaaatgactcgtgcgcgggggcctttttgcgccagtaaatgactcgaggaccatcccttgtttaagggatacggataggttttttgaagctcgttctgccgataaaaattgttaaatcactcgttcgtgtgtacgccagtccgttgtacacataccctggatatatggtgaatcggatacgttattttgttttaaactcggaatgctcctttttatctataaatttttttaggagatttgtgttcttgtcctgctttggaaggccaaaaattattttactcttgtttttttttaaaaaaatccgaggttcttgtaagctcactaaacgttgaag

SEQ ID NO: 11722 - DNA, 2431 bp, Zea Mays
gatagggcatgtcgggtctggtgggaaaccctttcatcgtcctcctgcgtcgccagagcggagcaacgaggggcgcgcgcgatggcaggcggcggtctccagggagcgaagaagcgcaagcgcgagcacgcggaagggaaggcaaagcctcggaagcaagtcaagggaggcggggacggagcgaagcggaagagccactcggccgccggcggctacacggcccatggcggcgccggcgaagttgtcgcgaggaagaagaccccggttacccccaaggagaagcgcctcgcggccaaggaaatgtcggaggccaggaagatgaagaggaggcagcattacagccttgagaaggaactaacgaaattgtgggaaaagatgagatgtcacgatgtgagcaaagaggagaggtccaaggcagtaagtcaggctatccataaaatggatgggaaatatttggacattgccacatcacatgttactgcacgtgttcttcaaacatgtgtaaagtggtgctcggagtcagagagggatgctatctttgatgttctacagccacatttgcttaccctttcttgcaagaaatatgccgtttttcttgtaaagaagcttatagaactcgcctctaaaaaacagtttgccagtttcatatcttcccttcatggtcgtgttgccaaccttcttcatcatactattggagctgcagtcgttgattatgcatttcagcgaggaacacaacgtcagaaaaggcaattgttagttgaactgtactcccctgaacttcagctattcaaggatctgactgtgcaaagttcctcctgtttgatagatacaatttccaagcttgggttgcagatatcatctgtcctgcttcatatgactattgtgattgataaaatcttggagaaaggtactgttgagtacttaatagtgcacacggccatattggagtactttacaattgcagataagacctcagcctcggatgctatttgtcaacttatcccccttcttactcaaggggcattaatcatagatggagatgaacctacaaacgctccagaactaccaaagaaagcaaaagctaagaagaaaaggtcgaaagagccacttattgttcggatcatgcagacaagggaaggattaaaactaggaattagttgcgtcaagtatggcagtgcaaagactaagtgggcgcgagaatgtatttcaggacaggaagaagattattaaaagtttgaagggccacattatgaagcttgctctaagtgattttggatgtctttttcttatctgcattatttctattgttgatgacacaaagcttgttaataagattgtcattcaagagctggtaaaacatttaaagcagctcatttttgacaagaatgggagacggccattgctgcaactacttcaccctttttgctcacgctatctttctccgaatgatctagcttgtctgaactacaatgtgccttctcttagttcaacagaggttgagacatcagagagtgctataggagttataacagaaaataaattagatgatgtgactgctcaagatcccaatggcttagaaggcaagcaaattgtgtttgagagcaagaaggatccattacaaaggcgacatgaactgttgataaaaagtgagcttgccgaggctctcgttcagtcatgcattgaaaatgttggagaattacttcgaacaaattttggcaaagaagtattgtatgagatggctgttggtggtaaagacaacgttctggatggcctcaccgataggatccacatgttgcacgatgcaatagcgtctgatgcggcccaaccgaagactgaagatacggaacatgcatttgaaaacttcttttccagccgtgtaatcagaagaatggtaatcgattgcccagcgtttgcagtcactctctggagaaaggctcttcaggggaagtgcaagatatgggctgaaggacacagttcgaaggtggttgcgagtttcctggagtcgccaagtacggaggtcaaggatcttgcaaaacctgagttgcagccgctggttgatgctggcatccttaaagtgccagaccctaaggttgttcaaaaatgactcgtgcgcgggggcctttttgcgccagtaaatgactcgaggaccatcccttgtttaagggatacggataggttttttgaagctcgttctgccgataaaaattgttaaatcactcgttcgtgtgtacgccagtccgttgtacacataccctggatatatggtgaatcggatacgttattttgttttaaactcggaatgctcctttttatctataaatttttttaggagatttgtgttcttgtcctgctttggaaggccaaaaattattttactcttgtttttttttaaaaaaatccgaggttcttgtaagctcactaaacgttgaag

SEQ ID NO: 11723 - DNA, 2623 bp, Zea Mays
gatagggcatgtcgggtctggtgggaaaccctttcatcgtcctcctgcgtcgccagagcggagcaacgaggggcgcgcgcgatggcaggcggcggtctccagggagcgaagaagcgcaagcgcgagcacgcggaagggaaggcaaagcctcggaagcaagtcaagggaggcggggacggagcgaagcggaagagccactcggccgccggcggctacacggcccatggcggcgccggcgaagttgtcgcgaggaagaagaccccggttacccccaaggagaagcgcctcgcggccaaggaaatgtcggaggccaggaagatgaagaggaggcagcattacagccttgagaaggaactaacgaaattgtgggaaaagatgagatgtcacgatgtgagcaaagaggagaggtccaaggcagtaagtcaggctatccataaaatggatgggaaatatttggacattgccacatcacatgttactgcacgtgttcttcaaacatgtgtaaagtggtgctcggagtcagagagggatgctatctttgatgttctacagccacatttgcttaccctttcttgcaagaaatatgccgtttttcttgtaaagaagcttatagaactcgcctctaaaaaacagtttgccagtttcatatcttcccttcatggtcgtgttgccaaccttcttcatcatactattggagctgcagtcgttgattatgcatttcagcgaggaacacaacgtcagaaaaggcaattgttagttgaactgtactcccctgaacttcagctattcaaggatctgactgtgcaaagttcctcctgtttgatagatacaatttccaagcttgggttgcagatatcatctgtcctgcttcatatgactattgtgattgataaaatcttggagaaaggtactgttgagtacttaatagtgcacacggccatattggagtactttacaattgcagataagacctcagcctcggatgctatttgtcaacttatcccccttcttactcaaggggcattaatcatagatggagatgaacctacaaacgctccagaactaccaaagaaagcaaaagctaagaagaaaaggtcgaaagagccacttattgttcggatcatgcagacaagggaaggattaaaactaggaattagttgcgtcaagtatggcagtgcaaaggtatatctgcacaagttattatattttaacttcaggtcaaacacgttctccgctactatccactggtgttttattcagtgttgctttagttttgtaaattttgtggtgcttgtatatctttgcaaattgaattatgcactacaccgtaccgagtagtccttattgtgaatttattttctactgcatgtactgtcttcattaacaagactaagtgggcgcgagaatgtatttcaggacaggaagaagattattaaaagtttgaagggccacattatgaagcttgctctaagtgattttggatgtctttttcttatctgcattatttctattgttgatgacacaaagcttgttaataagattgtcattcaagagctggtaaaacatttaaagcagctcatttttgacaagaatgggagacggccattgctgcaactacttcaccctttttgctcacgctatctttctccgaatgatctagcttgtctgaactacaatgtgccttctcttagttcaacagaggttgagacatcagagagtgctataggagttataacagaaaataaattagatgatgtgactgctcaagatcccaatggcttagaaggcaagcaaattgtgtttgagagcaagaaggatccattacaaaggcgacatgaactgttgataaaaagctctcgttcagtcatgcattgaaaatgttggagaattacttcgaacaaattttggcaaagaagtattgtatgagatggctgttggtggtaaagacaacgttctggatggcctcaccgataggatccacatgttgcacgatgcaatagcgtctgatgcggcccaaccgaagactgaagatacggaacatgcatttgaaaacttcttttccagccgtgtaatcagaagaatggtaatcgattgcccagcgtttgcagtcactctctggagaaaggctcttcaggggaagtgcaagatatgggctgaaggacacagttcgaaggtggttgcgagtttcctggagtcgccaagtacggaggtcaaggatcttgcaaaacctgagttgcagccgctggttgatgctggcatccttaaagtgccagaccctaaggttgttcaaaaatgactcgtgcgcgggggcctttttgcgccagtaaatgactcgaggaccatcccttgtttaagggatacggataggttttttgaagctcgttctgccgataaaaattgttaaatcactcgttcgtgtgtacgccagtccgttgtacacataccctggatatatggtgaatcggatacgttattttgttttaaactcggaatgctcctttttatctataaatttttttaggagatttgtgttcttgtcctgctttggaaggccaaaaattattttactcttgtttttttttaaaaaaatccgaggttcttgtaagctcactaaacgttgaag

SEQ ID NO: 11724 - DNA, 2135 bp, Zea Mays
gatagggcatgtcgggtctggtgggaaaccctttcatcgtcctcctgcgtcgccagagcggagcaacgaggggcgcgcgcgatggcaggcggcggtctccagggagcgaagaagcgcaagcgcgagcacgcggaagggaaggcaaagcctcggaagcaagtcaagggaggcggggacggagcgaagcggaagagccactcggccgccggcggctacacggcccatggcggcgccggcgaagttgtcgcgaggaagaagaccccggttacccccaaggagaagcgcctcgcggccaaggaaatgtcggaggccaggaagatgaagaggaggcagcattacagccttgagaagcctctaaaaaacagtttgccagtttcatatcttcccttcatggtcgtgttgccaaccttcttcatcatactattggagctgcagtcgttgattatgcatttcagcgaggaacacaacgtcagaaaaggcaattgttagttgaactgtactcccctgaacttcagctattcaaggatctgactgtgcaaagttcctcctgtttgatagatacaatttccaagcttgggttgcagatatcatctgtcctgcttcatatgactattgtgattgataaaatcttggagaaaggtactgttgagtacttaatagtgcacacggccatattggagtactttacaattgcagataagacctcagcctcggatgctatttgtcaacttatcccccttcttactcaaggggcattaatcatagatggagatgaacctacaaacgctccagaactaccaaagaaagcaaaagctaagaagaaaaggtcgaaagagccacttattgttcggatcatgcagacaagggaaggattaaaactaggaattagttgcgtcaagtatggcagtgcaaaggacaggaagaagattattaaaagtttgaagggccacattatgaagcttgctctaagtgattttggatgtctttttcttatctgcattatttctattgttgatgacacaaagcttgttaataagattgtcattcaagagctggtaaaacatttaaagcagctcatttttgacaagaatgggagacggccattgctgcaactacttcaccctttttgctcacgctatctttctccgaatgatctagcttgtctgaactacaatgtgccttctcttagttcaacagaggttgagacatcagagagtgctataggagttataacagaaaataaattagatgatgtgactgctcaagatcccaatggcttagaaggcaagcaaattgtgtttgagagcaagaaggatccattacaaaggcgacatgaactgttgataaaaagtgagcttgccgaggctctcgttcagtcatgcattgaaaatgttggagaattacttcgaacaaattttggcaaagaagtattgtatgagatggctgttggtggtaaagacaacgttctggatggcctcaccgataggatccacatgttgcacgatgcaatagcgtctgatgcggcccaaccgaagactgaagatacggaacatgcatttgaaaacttcttttccagccgtgtaatcagaagaatggtaatcgattgcccagcgtttgcagtcactctctggagaaaggctcttcaggggaagtgcaagatatgggctgaaggacacagttcgaaggtggttgcgagtttcctggagtcgccaagtacggaggtcaaggatcttgcaaaacctgagttgcagccgctggttgatgctggcatccttaaagtgccagaccctaaggttgttcaaaaatgactcgtgcgcgggggcctttttgcgccagtaaatgactcgaggaccatcccttgtttaagggatacggataggttttttgaagctcgttctgccgataaaaattgttaaatcactcgttcgtgtgtacgccagtccgttgtacacataccctggatatatggtgaatcggatacgttattttgttttaaactcggaatgctcctttttatctataaatttttttaggagatttgtgttcttgtcctgctttggaaggccaaaaattattttactcttgtttttttttaaaaaaatccgaggttcttgtaagctcactaaacgttgaag

SEQ ID NO: 11725 - DNA, 2284 bp, Zea Mays
gatagggcatgtcgggtctggtgggaaaccctttcatcgtcctcctgcgtcgccagagcggagcaacgaggggcgcgcgcgatggcaggcggcggtctccagggagcgaagaagcgcaagcgcgagcacgcggaagggaaggcaaagcctcggaagcaagtcaagggaggcggggacggagcgaagcggaagagccactcggccgccggcggctacacggcccatggcggcgccggcgaagttgtcgcgaggaagaagaccccggttacccccaaggagaagcgcctcgcggccaaggaaatgtcggaggccaggaagatgaagaggaggcagcattacagccttgagaaggaactaacgaaattgtgggaaaagatgagatgtcacgatgtgagcaaagaggagaggtccaaggcagtaagtcaggctatccataaaatggatgggaaatatttggacattgccacatcacatgttactgcacgtgttcttcaaacatgtgtaaagtggtgctcggagtcagagagggatgctatctttgatgttctacagccacatttgcttaccctttcttgcaagaaatatgccgtttttcttgtaaagaagcttatagaactcgcctctaaaaaacagtttgccagtttcatatcttcccttcatggtcgtgttgccaaccttcttcatcatactattggagctgcagtcgttgattatgcatttcagcgaggaacacaacgtcagaaaaggcaattgttagttgaactgtactcccctgaacttcagctattcaaggatctgactgtgcaaagttcctcctgatacaatttccaagcttgggttgcagatatcatctgtcctgcttcatatgactattgtgattgataaaatcttggagaaaggggcattaatcatagatggagatgaacctacaaacgctccagaactaccaaagaaagcaaaagctaagaagaaaaggtcgaaagagccacttattgttcggatcatgcagacaagggaaggattaaaactaggaattagttgcgtcaagtatggcagtgcaaaggacaggaagaagattattaaaagtttgaagggccacattatgaagcttgctctaagtgattttggatgtctttttcttatctgcattatttctattgttgatgacacaaagcttgttaataagattgtcattcaagagctggtaaaacatttaaagcagctcatttttgacaagaatgggagacggccattgctgcaactacttcaccctttttgctcacgctatctttctccgaatgatctagcttgtctgaactacaatgtgccttctcttagttcaacagaggttgagacatcagagagtgctataggagttataacagaaaataaattagatgatgtgactgctcaagatcccaatggcttagaaggcaagcaaattgtgtttgagagcaagaaggatccattacaaaggcgacatgaactgttgataaaaagtgagcttgccgaggctctcgttcagtcatgcattgaaaatgttggagaattacttcgaacaaattttggcaaagaagtattgtatgagatggctgttggtggtaaagacaacgttctggatggcctcaccgataggatccacatgttgcacgatgcaatagcgtctgatgcggcccaaccgaagactgaagatacggaacatgcatttgaaaacttcttttccagccgtgtaatcagaagaatggtaatcgattgcccagcgtttgcagtcactctctggagaaaggctcttcaggggaagtgcaagatatgggctgaaggacacagttcgaaggtggttgcgagtttcctggagtcgccaagtacggaggtcaaggatcttgcaaaacctgagttgcagccgctggttgatgctggcatccttaaagtgccagaccctaaggttgttcaaaaatgactcgtgcgcgggggcctttttgcgccagtaaatgactcgaggaccatcccttgtttaagggatacggataggttttttgaagctcgttctgccgataaaaattgttaaatcactcgttcgtgtgtacgccagtccgttgtacacataccctggatatatggtgaatcggatacgttattttgttttaaactcggaatgctcctttttatctataaatttttttaggagatttgtgttcttgtcctgctttggaaggccaaaaattattttactcttgtttttttttaaaaaaatccgaggttcttgtaagctcactaaacgttgaag

SEQ ID NO: 11726 - DNA, 2390 bp, Zea Mays
gatagggcatgtcgggtctggtgggaaaccctttcatcgtcctcctgcgtcgccagagcggagcaacgaggggcgcgcgcgatggcaggcggcggtctccagggagcgaagaagcgcaagcgcgagcacgcggaagggaaggcaaagcctcggaagcaagtcaagggaggcggggacggagcgaagcggaagagccactcggccgccggcggctacacggcccatggcggcgccggcgaagttgtcgcgaggaagaagaccccggttacccccaaggagaagcgcctcgcggccaaggaaatgtcggaggccaggaagatgaagaggaggcagcattacagccttgagaaggaactaacgaaattgtgggaaaagatgagatgtcacgatgtgagcaaagaggagaggtccaaggcagtaagtcaggctatccataaaatggatgggaaatatttggacattgccacatcacatgttactgcacgtgttcttcaaacatgtgtaaagtggtgctcggagtcagagagggatgctatctttgatgttctacagccacatttgcttaccctttcttgcaagaaatatgccgtttttcttgtaaagaagcttatagaactcgcctctaaaaaacagtttgccagtttcatatcttcccttcatggtcgtgttgccaaccttcttcatcatactattggagctgcagtcgttgattatgcatttcagcgaggaacacaacgtcagaaaaggcaattgttagttgaactgtactcccctgaacttcagctattcaaggatctgactgtgcaaagttcctcctgatacaatttccaagcttgggttgcagatatcatctgtcctgcttcatatgactattgtgattgataaaatcttggagaaaggtactgttgagtacttaatagtgcacacggccatattggagtactttacaattgcagataagacctcagcctcggatgctatttgtcaacttatcccccttcttactcaaggggcattaatcatagatggagatgaacctacaaacgctccagaactaccaaagaaagcaaaagctaagaagaaaaggtcgaaagagccacttattgttcggatcatgcagacaagggaaggattaaaactaggaattagttgcgtcaagtatggcagtgcaaaggaagaagattattaaaagtttgaagggccacattatgaagcttgctctaagtgattttggatgtctttttcttatctgcattatttctattgttgatgacacaaagcttgttaataagattgtcattcaagagctggtaaaacatttaaagcagctcatttttgacaagaatgggagacggccattgctgcaactacttcaccctttttgctcacgctatctttctccgaatgatctagcttgtctgaactacaatgtgccttctcttagttcaacagaggttgagacatcagagagtgctataggagttataacagaaaataaattagatgatgtgactgctcaagatcccaatggcttagaaggcaagcaaattgtgtttgagagcaagaaggatccattacaaaggcgacatgaactgttgataaaaagtgagcttgccgaggctctcgttcagtcatgcattgaaaatgttggagaattacttcgaacaaattttggcaaagaagtattgtatgagatggctgttggtggtaaagacaacgttctggatggcctcaccgataggatccacatgttgcacgatgcaatagcgtctgatgcggcccaaccgaagactgaagatacggaacatgcatttgaaaacttcttttccagccgtgtaatcagaagaatggtaatcgattgcccagcgtttgcagtcactctctggagaaaggctcttcaggggaagtgcaagatatgggctgaaggacacagttcgaaggtggttgcgagtttcctggagtcgccaagtacggaggtcaaggatcttgcaaaacctgagttgcagccgctggttgatgctggcatccttaaagtgccagaccctaaggttgttcaaaaatgactcgtgcgcgggggcctttttgcgccagtaaatgactcgaggaccatcccttgtttaagggatacggataggttttttgaagctcgttctgccgataaaaattgttaaatcactcgttcgtgtgtacgccagtccgttgtacacataccctggatatatggtgaatcggatacgttattttgttttaaactcggaatgctcctttttatctataaatttttttaggagatttgtgttcttgtcctgctttggaaggccaaaaattattttactcttgtttttttttaaaaaaatccgaggttcttgtaagctcactaaacgttgaag

SEQ ID NO: 11727 - DNA, 1884 bp, Zea Mays
gatagggcatgtcgggtctggtgggaaaccctttcatcgtcctcctgcgtcgccagagcggagcaacgaggggcgcgcgcgatggcaggcggcggtctccagggagcgaagaagcgcaagcgcgagcacgcggaagggaaggcaaagcctcggaagcaagtcaagggaggcggggacggagcgaagcggaagagccactcggccgccggcggctacacggcccatggcggcgccggcgaagttgtcgcgaggaagaagaccccggttacccccaaggagaagcgcctcgcggccaaggaaatgtcggaggccaggaagatgaagaggaggcagcattacagccttgagaaggaactaacgaaattgtgggaaaagatgagatgtcacgatgtgagcaaagaggagaggtccaaggcagtaagtcaggctatccataaaatggatgggaaatatttggacattgccacatcacatgttactgcacgtgttcttcaaacatgtgtaaagtggtgctcggagtcagagagggatgctatctttgatgttctacagccacatttgcttaccctttcttgcaagaaatatgccgtttttcttgtaaagaagcttatagaactcgcctctaaaaaacagtttgccagtttcatatcttcccttcatggtcgtgttgccaaccttcttcatcatactattggagctgcagtcgttgattatgcatttcagcgaggaacacaacgtcagaaaaggcaattgttagttgaactgtactcccctgaacttcagctattcaaggatctgactgtgcaaagttcctcctgtttgatagatacaatttccaagcttgggttgcagatatcatctgtcctgcttcatatgactattgtgattgataaaatcttggagaaaggtactgttgagtacttaatagtgcacacggccatattggagtactttacaattgcagataagcctcggatgctatttgtcaacttatcccccttcttactcaaggggcattaatcatagatggagatgaacctacaaacgctccagaactaccaaagaaagcaaaagctaagaagaaaaggtcgaaagagccacttattgttcggatcatgcagacaagggaaggattaaaactaggaattagttgcgtcaagtatggcagtgcaaaggtatatctgcacaagttattatattttaacttcaggtcaaacacgttctccgctactatccactggtgttttattcagtgttgctttagttttgtaaattttgtggtgcttgtatatctttgcaaattgaattatgcactacaccgtaccgagtagtccttattgtgaatttattttctactgcatgtactgtcttcattaacaagactaagtgggcgcgagaatgtatttcaggacaggaagaagattattaaaagtttgaagggccacattatgaagcttgctctaagtgattttggatgtctttttcttatctgcattatttctattgttgatgacacaaagcttgttaataagattgtcattcaagagctggtaaaacatttaaagcagctcatttttgacaagaatgggagacggccattgctgcaactacttcaccctttttgctcacgctatctttctccgaatgatctagcttgtctgaactacaatgtgccttctcttagttcaacagaggttgagacatcagagagtgctataggagttataacagaaaataaattagatgatgtgactgctcaagatcccaatggcttagaaggcaagcaaattgtgtttgagagcaagaaggatccattacaaaggcgacatgaactgttgataaaaagtgagcttgccgagccatggatatagaaaggaagcaaat

SEQ ID NO: 11728 - DNA, 1678 bp, Zea Mays
gatagggcatgtcgggtctggtgggaaaccctttcatcgtcctcctgcgtcgccagagcggagcaacgaggggcgcgcgcgatggcaggcggcggtctccagggagcgaagaagcgcaagcgcgagcacgcggaagggaaggcaaagcctcggaagcaagtcaagggaggcggggacggagcgaagcggaagagccactcggccgccggcggctacacggcccatggcggcgccggcgaagttgtcgcgaggaagaagaccccggttacccccaaggagaagcgcctcgcggccaaggaaatgtcggaggccaggaagatgaagaggaggcagcattacagccttgagaaggaactaacgaaattgtgggaaaagatgagatgtcacgatgtgagcaaagaggagaggtccaaggcagtaagtcaggctatccataaaatggatgggaaatatttggacattgccacatcacatgttactgcacgtgttcttcaaacatgtgtaaagtggtgctcggagtcagagagggatgctatctttgatgttctacagccacatttgcttaccctttcttgcaagaaatatgccgtttttcttgtaaagaagcttatagaactcgcctctaaaaaacagtttgccagtttcatatcttcccttcatggtcgtgttgccaaccttcttcatcatactattggagctgcagtcgttgattatgcatttcagcgaggaacacaacgtcagaaaaggcaattgttagttgaactgtactcccctgaacttcagctattcaaggatctgactgtgcaaagttcctcctgtttgatagatacaatttccaagcttgggttgcagatatcatctgtcctgcttcatatgactattgtgattgataaaatcttggagaaaggtactgttgagtacttaatagtgcacacggccatattggagtactttacaattgcagataagcctcggatgctatttgtcaacttatcccccttcttactcaaggggcattaatcatagatggagatgaacctacaaacgctccagaactaccaaagaaagcaaaagctaagaagaaaaggtcgaaagagccacttattgttcggatcatgcagacaagggaaggattaaaactaggaattagttgcgtcaagtatggcagtgcaaagactaagtgggcgcgagaatgtatttcaggacaggaagaagattattaaaagtttgaagggccacattatgaagcttgctctaagtgattttggatgtctttttcttatctgcattatttctattgttgatgacacaaagcttgttaataagattgtcattcaagagctggtaaaacatttaaagcagctcatttttgacaagaatgggagacggccattgctgcaactacttcaccctttttgctcacgctatctttctccgaatgatctagcttgtctgaactacaatgtgccttctcttagttcaacagaggttgagacatcagagagtgctataggagttataacagaaaataaattagatgatgtgactgctcaagatcccaatggcttagaaggcaagcaaattgtgtttgagagcaagaaggatccattacaaaggcgacatgaactgttgataaaaagtgagcttgccgagccatggatatagaaaggaagcaaat

SEQ ID NO: 11729 - DNA, 1677 bp, Zea Mays
gatagggcatgtcgggtctggtgggaaaccctttcatcgtcctcctgcgtcgccagagcggagcaacgaggggcgcgcgcgatggcaggcggcggtctccagggagcgaagaagcgcaagcgcgagcacgcggaagggaaggcaaagcctcggaagcaagtcaagggaggcggggacggagcgaagcggaagagccactcggccgccggcggctacacggcccatggcggcgccggcgaagttgtcgcgaggaagaagaccccggttacccccaaggagaagcgcctcgcggccaaggaaatgtcggaggccaggaagatgaagaggaggcagcattacagccttgagaaggaactaacgaaattgtgggaaaagatgagatgtcacgatgtgagcaaagaggagaggtccaaggcagtaagtcaggctatccataaaatggatgggaaatatttggacattgccacatcacatgttactgcacgtgttcttcaaacatgtgtaaagtggtgctcggagtcagagagggatgctatctttgatgttctacagccacatttgcttaccctttcttgcaagaaatatgccgtttttcttgtaaagaagcttatagaactcgcctctaaaaaacagtttgccagtttcatatcttcccttcatggtcgtgttgccaaccttcttcatcatactattggagctgcagtcgttgattatgcatttcagcgaggaacacaacgtcagaaaaggcaattgttagttgaactgtactcccctgaacttcagctattcaaggatctgactgtgcaaagttcctcctgatacaatttccaagcttgggttgcagatatcatctgtcctgcttcatatgactattgtgattgataaaatcttggagaaaggtactgttgagtacttaatagtgcacacggccatattggagtactttacaattgcagataagacctcagcctcggatgctatttgtcaacttatcccccttcttactcaaggggcattaatcatagatggagatgaacctacaaacgctccagaactaccaaagaaagcaaaagctaagaagaaaaggtcgaaagagccacttattgttcggatcatgcagacaagggaaggattaaaactaggaattagttgcgtcaagtatggcagtgcaaagactaagtgggcgcgagaatgtatttcaggacaggaagaagattattaaaagtttgaagggccacattatgaagcttgctctaagtgattttggatgtctttttcttatctgcattatttctattgttgatgacacaaagcttgttaataagattgtcattcaagagctggtaaaacatttaaagcagctcatttttgacaagaatgggagacggccattgctgcaactacttcaccctttttgctcacgctatctttctccgaatgatctagcttgtctgaactacaatgtgccttctcttagttcaacagaggttgagacatcagagagtgctataggagttataacagaaaataaattagatgatgtgactgctcaagatcccaatggcttagaaggcaagcaaattgtgtttgagagcaagaaggatccattacaaaggcgacatgaactgttgataaaaagtgagcttgccgagccatggatatagaaaggaagcaaat

SEQ ID NO: 11730 - DNA, 2083 bp, Zea Mays
atggaggcacggaatttgtacggtgccagcccaaaggtaggcaaagatagcttcccagatgcagctgtgcagcggttgatccccccaaagccagggcatgctggcgtaggagggtcacaatctgcaagaacaatgagagtaagaactctacatgcaacagatgtgaaatctgaagttgcgtctataggggcaaaatgtcacgcgggtggccattgccatctgcccgaggcaaaagtaaaacccctatggcgctacaagtcacttagtatttacccttgcaaggcgttgctaggcaatggaatgtcaaaaaacaggcatcgagatccttcagtgttggccctgttggaattctatatatggggtacctgcaatcggaagcatgaggatgaaaccagtaacgtatagaatcatagcaacaccaggttagcagcgttgctcttctacacaggctgtatcttatgctggaatccagcacagtaggcaagccattgttaggcattgcaactggtaggcatcctctgcatgggccaacacagttggcaaatgtcataactctgaccatcgcaacagcatcgttctagtttctacaaatcaaaatggggtgtacagaaaaaaagaagcatgacattaaggcaatgaaactagatgttagcattaaggcaaccaacttaatggtggtatcttctgaaaacatcaagcagctcatagacaacagctaaaacacaagaaaacattggccttcaaaaattattcaacacattttattttcaagtggaagctagaagacagcattgacctcagaactagagcaatagcacaagacatatcatacatcatggtgagtccagcaatacaaaatcatatttcatcacggccttaccattgagaaaatgcaagtaaaaatcgagtgaacaaaagataactacgatagaaacataccatgcaacagacatccagctcgatggcagcagatcacagcttttgaacgtcttcagagctggaaatctatgtgcaagagttgatgcctgaaacccatgcatagttacattctatacacaggccatctttagtaagcattagttcaaataaagaaaaaaatgtaccttgtctgtcagaggctctctaccatatggaggatccctctccatatactcaaatattggaaagcttgaagatgcatcacctttaccatcatcacttcgtacgccaccattttccaatcgatgtgtaccttctagtaatgatgagactcttagccgctcaacatcattctcaatgctgctctcactgctagtatccatagattccccatcactttcatccccaggacgccttaagtaagcgagaaaattaactagaaaaagttatacactatcaaagacatcaccaaggtgataaaagcaaccatactgaacgtcatgctggttgtagctatctactcagaacttctctcatttgtttatttcatttaatttctttgcatatatgcccaccaaattaaagtcacatgtaccaatgcctagtgaacatcaggtgatacaaaaataacaactctcatctcagtgttcttgcaagttaacagagaacaaatctgcaaaatgtggtcacatatagaatttcttgataaaatcatgttagtaaacctcagcaacgcataacacaatttgcctcggtagggcataggccaatataactacaatgaaaagcttggaatgcttaatctgccttaagctcttatttactttcatacagatttagatgtacaaaaattcgaaagcatggagcaccattccatcagtattcaacctagttttatgtatatgtatatatgtacgtatgtatatacatatatatgaaaataacaaaggtcaaactaagcatagcaaagacaaacaatgaacccattttggtacacaggttggcccccttaaggtttaagttcaatggaaactttctagacatcatgactctttgtaattgtgaaacagaataggatgtacctgtttcttgaagctggtctagatgggtccgcaaatagttggatagcagaaagatatggcacataatactgaataacagagtc

SEQ ID NO: 11731 - DNA, 2303 bp, Zea Mays
ggcggcctgacggccagccagcgcggcacgcggccagcccggcgttcctgcaagcagcacagcaccctgtgacccgccctgacgcggccatggctagaggccagttctcctcttcagcggccgagctcgctcctgcccaagtgtttttcgggtgcggcaaccatgcgcgcggccagccgccgcgagatccaccctggccagcgagccaccatcgctcggagtctctgcgctccgcgtttcgcgtagaagaaaccaccgtgtgcgttttcagccaaggaagaaagtagaaatgacgtggggtccactctacatggccgcatgcacgcaaatcccaccaccgtacacacatcgtgcaacaaccgcatgcatgagccccttgcatgtgatgcaaacgacacctccgtatgtgcttgcaaattgcctggccccacccacatgcatccacgagatcctagaaaccagccctcacaatggatcccacatcttctatgaccgtttttcatgtggtccatcgtatggttagccttccaccaatagaatcgtgccacgtagtctaaattcaagaaacactagttattcaatatatatgttgcgctgcgagtccgtctcgactcgtttcagtcgtagcaacttcgtaataacctcaactacatgttagtaatattatttggtcgtaacgcatgttttcgttaattaggtagttaaactgaggtttatttgaacttaaaattaaggtatagttttaaatggtgattttatagatgcaaattaatgtggttaatgccgactcagatgttttcaactaatatttgtttaatgtaaatgtaacgtctgtttagcttttctcgcgtatcgcgcgtgtcgttcgcgcgtgtcgtgcgtgctgtttcacacgtgttgtccgcacgtatcgcgtgtgaggatcgtgcgtgttcgcacgtcgtcgcgcattgttcgcgcactatcgctttgctcgcacgttgccgcgcgagtgttcgcgtgtcattcgcgcgctgtttgcgcgtcgttgtcacttccttcgcgcgttcgtgtcgcacgtctagttcgtgtgtcgcgcggcgtctgcgcgtaataaattgttgtcacttgtaaacgctcatgttaataacgttaattcgtcaggtcacatattttggataattaacttaaagtctgctcgactaatatgtattagattaatattctaattagattaaatatgtagtgttcaactcgtgcttgtagaataaacattaacatggataatattaacttaactacttattaaataattatttagtataaacgcgtcacgtatttagtctttctcgcctgttgcacgagttgttccgcacgtggtgtcgtgctgattcgcgcgtcgttcgcgctggtcgcacacactgtttcgtgtgtcgtcagtgtgctatggcgcacgtgtccgcgtgtcgttcgcacgctgccgtgatgtttcgctcatcgtaaattcgcctcgcttagaatctctcgttttaattaaattattggtttaattgatagctgctagtgtagcaggttaagcgaaactaaatattagatataacttatattgggtaatatcgaattaaatgttataattgatattgatttagcgtaaacacgatatcttcccgaccgtagcttcgagttcgataattcttttttcctcgcgtgaccgtagtaacgcactctatttcgttttgcatattttattatgttcttattttaatggtgtaatgttcttatgcatatatatatatgtttgtttgtacctgtttgtattcgttgtgcgtcgcgaatagattgcgatccgtttctgagctttgagggatcaaagatcaagagttggcgaccaagtgatctggttcttcgagttctacgagattcaagaccctgagcatctgtttggtgaagacaagtgtcctctgacccattatgtctcatttactttataatacactgtcccgcatactatgaacaacctaaggatttactagctttctatttaccttgtccttgatttaccttttgggttagtatggttagctacatgctagcgctttactttaatcaatgaacatgatgagatacaatgatgatactatgattttattctggatatgatgatatacttgtggcatttaaggggactaaggctgtttcccgagtacctctccgtaaggacctgttcgttgagagaccacctgggataacagtgcaatcatgagggtgaaatgggatgcccttagctaattaattagaggaactagaggtgtagttgcttcgcc

SEQ ID NO: 11732 - DNA, 1281 bp, Zea Mays
gacgagattctgttaagggggtttgatctgtaacaccctgattttaggggtataaaatttctttttaaatatccaccaaattcaggtgttactctctcagctcttcgctcttcttctctttttcctaaaagtggagaattattttgttttatataggcattaacttagtgaaataaaagcctagctagagaagctttgattgttgtattcatgtcgttgcatattgtttatgggtgtaaaaggtttttgaaacataaaaagattatctcgacagtgtttttagggattgctgggactttcgaaatgtttctccgagtattaaaatatgaatttttagtctttctaatattaattaaataccaaaaatgtagtagttgcaaaaactataagtttttttggaaactcgataatatgtatatatatttctcttcctctcgtcgatccgttcccgatctcgtgctctttttcatgagatcatcgaactgcttcttctcgcgaacggcatgctgctcgcgtcatcgacataatccttgtctatccccgtctaccccttcgccttccacccgtcatctcggatccgcgagccagctctaaccattttcgtctaattttatctaaccctttctaccatccgtctgactcagcctccgtcgtacactgtatcgcgcaactcgtcgcgtgaccatcttttttcgctcggccatgacgcggcatgcgacaaattttacaaccgtcttccacatcctctctcttctataaatacatccctagccgtcagaaagctcctcgtctcaccccagatccatgaagggcagcggttaccagattgcgatccgtttctgagctttgagggatcaaagatcaagagttggcgaccaagtgatctggttcttcgagttctacgagattcaagaccctgagcatctgtttggtgaagacaagtgtcctctgacccattatgtctcatttactttataatacactgtcccgcatactatgaacaacctaaggatttactagctttctatttaccttgtccttgatttaccttttgggttagtatggttagctacatgctagcgctttactttaatcaatgaacatgatgagatacaatgatgatactatgattttattctggatatgatgatatacttgtggcatttaaggggactaaggctgtttcccgagtacctctccgtaaggacctgttcgttgagagaccacctgggataacagtgcaatcatgagggtgaaatgggatgcccttagctaattaat

SEQ ID NO: 11733 - DNA, 1433 bp, Zea Mays
gatgaatctactcccatttctctgcacgcagctcagtctcgtccatccagtgctgtagaattttctttggtctgttggcaaggcagccatgaaaccccctcagctgccggcaggggagggggcctcctgggctcacgaggtcaagcaggccctccgtgagaaactccggcgctcctacggcgccggagctgcctccgccacaccggaggccaggccggccggcgaaccaagccgtggcgctgagtgccgcggctcggcggccgaggaccccataaggagagtcatgttcttggctccctggggtcacacataagaacacaaaccggccggccgagatctgggcatgcaagcttgcatggccatgtcttggtcagtcagatctgcaaacaaccaaactgtaaaaaagaactggagcctgtcttgtaaatcatggagcttgctgctgcttgcacccatgaaaaacatgaacgcatggagagctggttaactagctaggtagatagatatatcatatatgggtatgatggtgtggatgagaataaaaaacaaggtacgtagtccatgtctctggtcttggggagtggctgtgagcctgtgagatcctgggaagttcatgcatggcatgagtcatgggtgtggtgggctcaagagggagatctgaaacttgtgtagccactacgaacttgttttccagaaatcttgtaagtaggggagcctgtgaataatctagaaaacaaatcttcctgctctgcgtgtccacctttgcttccaggttcagaagattcttcttctagtgaaacgtctagaaactgacatggctggcaaaataatgcaacggctttgcatgtcaaggaaccatgaatccagccagctacgtgcccacggaagattaatgatctcaacacttgcaaatttgaagcaacaaacctcaaaagatctcgggagttcagtgaagatcaaagacaaaacctattaaaagctgcaccctgcgataaagctgagagcttcttttccaaatatatctttgcactatcatatggtttgctatatgtgcagtatcatttcgttgctataatttggacagaacacagaagtcacccaggaaaaaagaagaataaaaggagaccctttataaaactggactcctcttttcctatggattaatggcctaagaatcctattctaaacaataatgcaaaagactgtctcccacttgcaggggcaagccaaacccagtgggggccagtccccttgcttactttctcgagcaccttatcttatctccagatatacacaaagaaatcactacgatattagcagaaacaaaagacttcgccaatctgatatgctgcaaaattatcacgtaaatcatgacagcgtattgccagcctaaagaaaagctatcagaaactaatttttaggggccacacatt

SEQ ID NO: 11734 - DNA, 2784 bp, Zea Mays
ctgccttccgtgtctcccttccattctacggccacctcggcagggagcgttaaaagcgtcgcccgcgaagaacgtgggccagcgtcggctcgccgtctccctccctccttccagatctcggcgcgagttcacccttcagatttccatttccaacacgacggcgaagaagagctgcgatccggaggagtaaaccctacccgccggttgcccggtgcgcgggcgagatccgggcggagatctagggcgcggcgccggccatggcgagctccggactcgcttaccccgaccgcttctacgctgccgcggcttacgctgggttcggagccggcggggccacctcctccgcagctatctcccgcttccagaacgacgtcgccctcctcctctacggcctgcaccagcaggccacggttgggccatgcaatgtgcccaagccaagggcgtggaaccccgtggagcagagcaaatggactagctggcatgggcttggaagcatgccttcagcggaggcgatgcgtctttttgtcaaaatcctagaggaagaagatcctggatggtactctagggtccctgagttcaaccctgagcctgttgtagatattcagatgcataaaccaaaagacgagccacaaagtgtaccggcttcaacaaatggaacatcaatttcagaaccaaaaatcatttctgaaaatggaagttctgtggagactcaggacaaagatgttattctggaaggccttagtactgttatttctcatgatgagtggactccattatctgtcagtggtctccgtccgaagcctcgttatgagcatggagcaactgtgttgcaaaataagatgtatatatttggtggaaaccataatggacgttaccttagtgaccttcaggctttggatctgaagagtttgatctggtccaaggttgataccaaatttcaagcagaacctgctgactccactataaccacacaaattgctccatgtgctggtcattctttgatttcttggggtaacaaatttttatctattgctgggcatacaaaagatccatctgaaggcattacagtgaaggaatttgatccgcatacttgtacctggtcaattgtcaagacttatgggaaaccaccggtgtctcgtggaggtcaaacagtgactcttgttggaacgacactagttttgtttggtggtgaagatgcaaaacggtgtctcttgaatgacttgcacatccttgatcttgaaaccatgacatgggatgatgtggatgcaataggcaaccctccttctccaaggtcagatcatgctgctgcttgccatgctgaccgctatcttttaatttttggtggggggtctcatgcaacatgtttcaatgacctacatgtccttgatttgcagacgatggaatggtcaagacccaaacaacaaggcctgactccaagcccaagagctggacatgcaggtgcaactgtcggtgagaactggtacatagttgggggtggcaataataaaagtggtaagatgtcttaacttgctatgtgaacatgcttgccgataactactgtgtggtcatatttgtgtgaacatgttactagcacactttgcctcctgatagcttgtaccattgtgaccttgtttggatttgttgggattccacccaatgtcaaacatacccaaacagtgacccgttatctttttcttcgtatttctatgtcaagcacttaagcataactcatacacttgcctctacaggtgtttctgaaacactagtgctcaatatgtcaactctgacatggtcagttgttagcactgtggaaggacgtgttcctcttgccagtgagggcatgactttagtgcatagcaattacaatggttatgattatctcgtctcttttggaggatacaatggacgatacagcaacgaggtttacactcttaaactcagcctcaaatcagattcacagccaattgtagaagaagaaactgtctcagatactatatctagggtcagagaacctgagaccgaaatttctcaagatgggaggatacgcgagattgccatggacagtgccgattcagacctgaaatgatgaagcaagtgaacagcttgtagcagatcttaaagctcagaaagaggaactagaagcaacaattaacagggaacagctgcaaactgtgcaacttaaagaagacattgctcaagcagagaccagaaatgcagagctgacaaaggaacttcaagctgtccgtggccaacttgcttctgagcaatcaagatgtttcaaacttgaggttgacgttgcggaacttcgacaaaagcttcagagtatggacgccctggaaaaggaggtcgagctgcttcggcgacagaaagccgcttcggagcaagcggcgctggacgcaaagcagaggcaaggttcgggtggtatgtggggttggctcgctggaagcccgccaccatcacagtagttcgtacaggccgtggttcatatattttacttgtaacattacatatcatttgacatttgtctacattttttttttgtcacatggcattcgtgtttcgttttgaccacacaaagaacaacgtgctctggcgagagttatattgtgctcatagagaatcgttaggttgccccctcacaatcactcaaatgtatcattaggttttaacaatgtactgatcatgtatgaacttccatttgacgttgtgctggttgcctataggtagtttatttttcaaggttgccttgtttttttttcgtgaatctgttgttgacgtgcaaat

SEQ ID NO: 11735 - DNA, 2792 bp, Zea Mays
ctgccttccgtgtctcccttccattctacggccacctcggcagggagcgttaaaagcgtcgcccgcgaagaacgtgggccagcgtcggctcgccgtctccctccctccttccagatctcggcgcgagttcacccttcagatttccatttccaacacgacggcgaagaagagctgcgatccggaggagtaaaccctacccgccggttgcccggtgcgcgggcgagatccgggcggagatctagggcgcggcgccggccatggcgagctccggactcgcttaccccgaccgcttctacgctgccgcggcttacgctgggttcggagccggcggggccacctcctccgcagctatctcccgcttccagaacgacgtcgccctcctcctctacggcctgcaccagcaggccacggttgggccatgcaatgtgcccaagccaagggcgtggaaccccgtggagcagagcaaatggactagctggcatgggcttggaagcatgccttcagcggaggcgatgcgtctttttgtcaaaatcctagaggaagaagatcctggatggtactctagggtccctgagttcaaccctgagcctgttgtagatattcagatgcataaaccaaaagacgagccacaaagtgtaccggcttcaacaaatggaacatcaatttcagaaccaaaaatcatttctgaaaatggaagttctgtggagactcaggacaaagatgttattctggaaggccttagtactgttatttctcatgatgagtggactccattatctgtcagtggtctccgtccgaagcctcgttatgagcatggagcaactgtgttgcaaaataagatgtatatatttggtggaaaccataatggacgttaccttagtgaccttcaggctttggatctgaagagtttgatctggtccaaggttgataccaaatttcaagcagaacctgctgactccactataaccacacaaattgctccatgtgctggtcattctttgatttcttggggtaacaaatttttatctattgctgggcatacaaaagatccatctgaaggcattacagtgaaggaatttgatccgcatacttgtacctggtcaattgtcaagacttatgggaaaccaccggtgtctcgtggaggtcaaacagtgactcttgttggaacgacactagttttgtttggtggtgaagatgcaaaacggtgtctcttgaatgacttgcacatccttgatcttgaaaccatgacatgggatgatgtggatgcaataggcaaccctccttctccaaggtcagatcatgctgctgcttgccatgctgaccgctatcttttaatttttggtggggggtctcatgcaacatgtttcaatgacctacatgtccttgatttgcagacgatggaatggtcaagacccaaacaacaaggcctgactccaagcccaagagctggacatgcaggtgcaactgtcggtgagaactggtacatagttgggggtggcaataataaaagtggtaagatgtcttaacttgctatgtgaacatgcttgccgataactactgtgtggtcatatttgtgtgaacatgttactagcacactttgcctcctgatagcttgtaccattgtgaccttgtttggatttgttgggattccacccaatgtcaaacatacccaaacagtgacccgttatctttttcttcgtatttctatgtcaagcacttaagcataactcatacacttgcctctacaggtgtttctgaaacactagtgctcaatatgtcaactctgacatggtcagttgttagcactgtggaaggacgtgttcctcttgccagtgagggcatgactttagtgcatagcaattacaatggttatgattatctcgtctcttttggaggatacaatggacgatacagcaacgaggtttacactcttaaactcagcctcaaatcagattcacagccaattgtagaagaagaaactgtctcagatactatatctagggtcagagaacctgagaccgaaatttctcaagatgggaggatacgcgagattgccatggacagtgccgattcagacctgaataacagaaatgatgaagcaagtgaacagcttgtagcagatcttaaagctcagaaagaggaactagaagcaacaattaacagggaacagctgcaaactgtgcaacttaaagaagacattgctcaagcagagaccagaaatgcagagctgacaaaggaacttcaagctgtccgtggccaacttgcttctgagcaatcaagatgtttcaaacttgaggttgacgttgcggaacttcgacaaaagcttcagagtatggacgccctggaaaaggaggtcgagctgcttcggcgacagaaagccgcttcggagcaagcggcgctggacgcaaagcagaggcaaggttcgggtggtatgtggggttggctcgctggaagcccgccaccatcacagtagttcgtacaggccgtggttcatatattttacttgtaacattacatatcatttgacatttgtctacattttttttttgtcacatggcattcgtgtttcgttttgaccacacaaagaacaacgtgctctggcgagagttatattgtgctcatagagaatcgttaggttgccccctcacaatcactcaaatgtatcattaggttttaacaatgtactgatcatgtatgaacttccatttgacgttgtgctggttgcctataggtagtttatttttcaaggttgccttgtttttttttcgtgaatctgttgttgacgtgcaaat

SEQ ID NO: 11736 - DNA, 2611 bp, Zea Mays
ccacgtcactgggcccctacataggcccacctgtcaatggcacgtggcggctcccgtcagcagctgccttccgtgtctcccttccattctacggccacctcggcagggagcgttaaaagcgtcgcccgcgaagaacgtgggccagcgtcggctcgccgtctccctccctccttccagatctcggcgcgagttcacccttcagatttccatttccaacacgacggcgaagaagagctgcgatccggaggagtaaaccctacccgccggttgcccggtgcgcgggcgagatccgggcggagatctagggcgcggcgccggccatggcgagctccggactcgcttaccccgaccgcttctacgctgccgcggcttacgctgggttcggagccggcggggccacctcctccgcagctatctcccgcttccagaacgacgtcgccctcctcctctacggcctgcaccagcaggccacggttgggccatgcaatgtgcccaagccaagggcgtggaaccccgtggagcagagcaaatggactagctggcatgggcttggaagcatgccttcagcggaggcgatgcgtctttttgtcaaaatcctagaggaagaagatcctggatggtactctagggtccctgagttcaaccctgagcctgttgtagatattcagatgcataaaccaaaagacgagccacaaagtgtaccggcttcaacaaatggaacatcaatttcagaaccaaaaatcatttctgaaaatggaagttctgtggagactcaggacaaagatgttattctggaaggccttagtactgttatttctcatgatgagtggactccattatctgtcagtggtctccgtccgaagcctcgttatgagcatggagcaactgtgttgcaaaataagatgtatatatttggtggaaaccataatggacgttaccttagtgaccttcaggctttggatctgaagagtttgatctggtccaaggttgataccaaatttcaagcagaacctgctgactccactataaccacacaaattgctccatgtgctggtcattctttgatttcttggggtaacaaatttttatctattgctgggcatacaaaagatccatctgaaggcattacagtgaaggaatttgatccgcatacttgtacctggtcaattgtcaagacttatgggaaaccaccggtgtctcgtggaggtcaaacagtgactcttgttggaacgacactagttttgtttggtggtgaagatgcaaaacggtgtctcttgaatgacttgcacatccttgatcttgaaaccatgacatgggatgatgtggatgcaataggcaaccctccttctccaaggtcagatcatgctgctgcttgccatgctgaccgctatcttttaatttttggtggggggtctcatgcaacatgtttcaatgacctacatgtccttgatttgcagacgatggaatggtcaagacccaaacaacaaggcctgactccaagcccaagagctggacatgcaggtgcaactgtcggtgagaactggtacatagttgggggtggcaataataaaagtggtgtttctgaaacactagtgctcaatatgtcaactctgacatggtcagttgttagcactgtggaaggacgtgttcctcttgccagtgagggcatgactttagtgcatagcaattacaatggttatgattatctcgtctcttttggaggatacaatggacgatacagcaacgaggtttacactcttaaactcagcctcaaatcagattcacagccaattgtagaagaagaaactgtctcagatactatatctagggtcagagaacctgagaccgaaatttctcaagatgggaggatacgcgagattgccatggacagtgccgattcagacctgaaatgatgaagcaagtgaacagcttgtagcagatcttaaagctcagaaagaggaactagaagcaacaattaacagggaacagctgcaaactgtgcaacttaaagaagacattgctcaagcagagaccagaaatgcagagctgacaaaggaacttcaagctgtccgtggccaacttgcttctgagcaatcaagatgtttcaaacttgaggttgacgttgcggaacttcgacaaaagcttcagagtatggacgccctggaaaaggaggtcgagctgcttcggcgacagaaagccgcttcggagcaagcggcgctggacgcaaagcagaggcaaggttcgggtggtatgtggggttggctcgctggaagcccgccaccatcacagtagttcgtacaggccgtggttcatatattttacttgtaacattacatatcatttgacatttgtctacattttttttttgtcacatggcattcgtgtttcgttttgaccacacaaagaacaacgtgctctggcgagagttatattgtgctcatagagaatcgttaggttgccccctcacaatcactcaaatgtatcattaggttttaacaatgtactgatcatgtatgaacttccatttgacgttgtgctggttgcctataggtagtttatttttcaaggttgccttgtttttttttcgtgaatctgttgttgacgtgcaaat

SEQ ID NO: 11737 - DNA, 2178 bp, Zea Mays
cctcactcaggctccaggggaatcgggccacggttgggccatgcaatgtgcccaagccaagggcgtggaaccccgtggagcagagcaaatggactagctggcatgggcttggaagcatgccttcagcggaggcgatgcgtctttttgtcaaaatcctagaggaagaagatcctggatggtactctagggtccctgagttcaaccctgagcctgttgtagatattcagatgcataaaccaaaagacgagccacaaagtgtaccggcttcaacaaatggaacatcaatttcagaaccaaaaatcatttctgaaaatggaagttctgtggagactcaggacaaagatgttattctggaaggccttagtactgttatttctcatgatgagtggactccattatctgtcagtggtctccgtccgaagcctcgttatgagcatggagcaactgtgttgcaaaataagatgtatatatttggtggaaaccataatggacgttaccttagtgaccttcaggctttggatctgaagagtttgatctggtccaaggttgataccaaatttcaagcagaacctgctgactccactataaccacacaaattgctccatgtgctggtcattctttgatttcttggggtaacaaatttttatctattgctgggcatacaaaagatccatctgaaggcattacagtgaaggaatttgatccgcatacttgtacctggtcaattgtcaagacttatgggaaaccaccggtgtctcgtggaggtcaaacagtgactcttgttggaacgacactagttttgtttggtggtgaagatgcaaaacggtgtctcttgaatgacttgcacatccttgatcttgaaaccatgacatgggatgatgtggatgcaataggcaaccctccttctccaaggtcagatcatgctgctgcttgccatgctgaccgctatcttttaatttttggtggggggtctcatgcaacatgtttcaatgacctacatgtccttgatttgcagacgatggaatggtcaagacccaaacaacaaggcctgactccaagcccaagagctggacatgcaggtgcaactgtcggtgagaactggtacatagttgggggtggcaataataaaagtggtgtttctgaaacactagtgctcaatatgtcaactctgacatggtcagttgttagcactgtggaaggacgtgttcctcttgccagtgagggcatgactttagtgcatagcaattacaatggttatgattatctcgtctcttttggaggatacaatggacgatacagcaacgaggtttacactcttaaactcagcctcaaatcagattcacagccaattgtagaagaagaaactgtctcagatactatatctagggtcagagaacctgagaccgaaatttctcaagatgggaggatacgcgagattgccatggacagtgccgattcagacctgaataacagaaatgatgaagcaagtgaacagcttgtagcagatcttaaagctcagaaagaggaactagaagcaacaattaacagggaacagctgcaaactgtgcaacttaaagaagacattgctcaagcagagaccagaaatgcagagctgacaaaggaacttcaagctgtccgtggccaacttgcttctgagcaatcaagatgtttcaaacttgaggttgacgttgcggaacttcgacaaaagcttcagagtatggacgccctggaaaaggaggtcgagctgcttcggcgacagaaagccgcttcggagcaagcggcgctggacgcaaagcagaggcaaggttcgggtggtatgtggggttggctcgctggaagcccgccaccatcacagtagttcgtacaggccgtggttcatatattttacttgtaacattacatatcatttgacatttgtctacattttttttttgtcacatggcattcgtgtttcgttttgaccacacaaagaacaacgtgctctggcgagagttatattgtgctcatagagaatcgttaggttgccccctcacaatcactcaaatgtatcattaggttttaacaatgtactgatcatgtatgaacttccatttgacgttgtgctggttgcctataggtagtttatttttcaaggttgccttgtttttttttcgtgaatctgttgttgacgtgcaaat

SEQ ID NO: 11738 - DNA, 799 bp, Zea Mays
ctcttattaacttaaatttccaagccatctagcatgaactagatcaaggtcgtggcgcctcctgagagaaaatacagtgtttggattggtggctcgatccttgcgtcgctcagtacgttccagcagatgtggatatccaaggatgagtacgatgagtctggccctgctatcgtccaccgaaaatgcttctgagctagctatctgccgcgcctttcatagcgtgtcaagctgttgagatctgcgttgttgagttgagtgtctctatggagtatcacatactttctgcatgaggggggaagagtatacccaactaagcgcatgcctttcggatgccctgcttcgtgattcagatgctgctttctttcaagtgatatgtcgatgtagtgtgcgagcaatgtatttggtttggctacagctgttcctgtcgtctgtgcgtaaaacattagctatgtatctatccatatctgcatatttgaatgtatggtcgttttctcatatggtgtcaagttaaaattcttatgttctcttattaaattttagttacccatatgtggccataatagccatgatatcttgtgaaagggtctttagctgggttggttggttggtctaataagtataatattttgtgaaaggggatttagctgtggtggttggatgatctgaataacacttctcctgtcctgagtttaaaaatatcttgtctgttattctagggacttttttttaatataataccaatgagctatcttatgagtttgttttgcacaaaaaatgaatcaaatttgacaaaagtact

SEQ ID NO: 11739 - DNA, 1965 bp, Zea Mays
gtcatacccggataatcggaagcagaaatggatttgatatgcggtggaggcgcttgttactagtcctgggtggctagatctcatctcatggttctggtttcaagtggaaagtccgttactcgtgggaaacgaatgactcgcatagtttttcgttggatgtttttgctcatcgcgtggatagccgtgggcccacaatagtttctgtaaatcttgaggccagatcaatggctgacggtgaggatatccagccacttgtgtgtgacaatggcactggaatggtcaaggctggctttgctggtgatgatgcgcccagagcagtgttccctagtatagtcggccgccctcggcacacgggtgtgatggttggaatgggccagaaggacgcctatgtaggtgacgaggcacagtcaaaaagaggtatcttgaccttgaagtaccccattgagcacggtatcgtgaacaactgggatgatatggagaaaatctggcaccacaccttctacaatgaactgcgtgttgctcctgaagagcacccagttctgctgacagaagcacctctgaacccaaaggcaaacagagagaagatgacccaaattatgttcgagacattcaatgcaccagcaatgtatgttgctatccaagctgtcctttccctgtatgccagcggtcgcactacaggtattgtgctcgattctggtgatggtgtgacccacaccgtgccaatctacgagggatacgcgctccctcatgccattcttaggctggatcttgctggccgtgatctgactgactgcctaatgaagatcctcacggaaaggggttattccttcaccacgacggcagaacgggaaatcgtgagagacataaaggagaagctggcctttgtggccctagactacgagcaggagctggagaccgctaagagcagctcctccgtcgagaagagctacgagctgcccgatgggcaggtcatcacgatcggcgcggagaggttcagatgcccagaggtgcttttgcagccgtcgctgatcgggatggaagctcccggcatccacgagaccacctacaactcgatcatgaaatgtgacgttgatatcaggaaggacctgtacgggaacatcgtcctcagtggagggacgaccatgttccctggcatcgctgacaggatgagcaaggagattactgccctcgcgccgagcagcatgaagatcaaggtcgtggcgcctcctgagagaaaatacagtgtttggattggtggctcgatccttgcgtcgctcagtacgttccagcagatgtggatatccaaggatgagtacgatgagtctggccctgctatcgtccaccgaaaatgcttctgagctagctatctgccgcgcctttcatagcgtgtcaagctgttgagatctgcgttgttgagttgagtgtctctatggagtatcacatactttctgcatgaggggggaagagtatacccaactaagcgcatgcctttcggatgccctgcttcgtgattcagatgctgctttctttcaagtgatatgtcgatgtagtgtgcgagcaatgtatttggtttggctacagctgttcctgtcgtctgtgcgtaaaacattagctatgtatctatccatatctgcatatttgaatgtatggtcgttttctcatatggtgtcaagttaaaattcttatgttctcttattaaattttagttacccatatgtggccataatagccatgatatcttgtgaaagggtctttagctgggttggttggttggtctaataagtataatattttgtgaaaggggatttagctgtggtggttggatgatctgaataacacttctcctgtcctgagtttaaaaatatcttgtctgttattctagggacttttttttaatataataccaatgagctatcttatgagtttgttttgcacaaaaaatgaatcaaatttgacaaaagtact

SEQ ID NO: 11740 - DNA, 1754 bp, Zea Mays
gaggaagagatcaatggctgacggtgaggatatccagccacttgtgtgtgacaatggcactggaatggtcaaggctggctttgctggtgatgatgcgcccagagcagtgttccctagtatagtcggccgccctcggcacacgggtgtgatggttggaatgggccagaaggacgcctatgtaggtgacgaggcacagtcaaaaagaggtatcttgaccttgaagtaccccattgagcacggtatcgtgaacaactgggatgatatggagaaaatctggcaccacaccttctacaatgaactgcgtgttgctcctgaagagcacccagttctgctgacagaagcacctctgaacccaaaggcaaacagagagaagatgacccaaattatgttcgagacattcaatgcaccagcaatgtatgttgctatccaagctgtcctttccctgtatgccagcggtcgcactacaggtattgtgctcgattctggtgatggtgtgacccacaccgtgccaatctacgagggatacgcgctccctcatgccattcttaggctggatcttgctggccgtgatctgactgactgcctaatgaagatcctcacggaaaggggttattccttcaccacgacggcagaacgggaaatcgtgagagacataaaggagaagctggcctttgtggccctagactacgagcaggagctggagaccgctaagagcagctcctccgtcgagaagagctacgagctgcccgatgggcaggtcatcacgatcggcgcggagaggttcagatgcccagaggtgcttttgcagccgtcgctgatcgggatggaagctcccggcatccacgagaccacctacaactcgatcatgaaatgtgacgttgatatcaggaaggacctgtacgggaacatcgtcctcagtggagggacgaccatgttccctggcatcgctgacaggatgagcaaggagattactgccctcgcgccgagcagcatgaagatcaaggtcgtggcgcctcctgagagaaaatacagtgtttggattggtggctcgatccttgcgtcgctcagtacgttccagcagatgtggatatccaaggatgagtacgatgagtctggccctgctatcgtccaccgaaaatgcttctgagctagctatctgccgcgcctttcatagcgtgtcaagctgttgagatctgcgttgttgagttgagtgtctctatggagtatcacatactttctgcatgaggggggaagagtatacccaactaagcgcatgcctttcggatgccctgcttcgtgattcagatgctgctttctttcaagtgatatgtcgatgtagtgtgcgagcaatgtatttggtttggctacagctgttcctgtcgtctgtgcgtaaaacattagctatgtatctatccatatctgcatatttgaatgtatggtcgttttctcatatggtgtcaagttaaaattcttatgttctcttattaaattttagttacccatatgtggccataatagccatgatatcttgtgaaagggtctttagctgggttggttggttggtctaataagtataatattttgtgaaaggggatttagctgtggtggttggatgatctgaataacacttctcctgtcctgagtttaaaaatatcttgtctgttattctagggacttttttttaatataataccaatgagctatcttatgagtttgttttgcacaaaaaatgaatcaaatttgacaaaagtact

SEQ ID NO: 11741 - DNA, 1987 bp, Zea Mays
gctatgacaactgtcgccgcgcacataaatgaaacggacgccgttcctcttctcccctcttccatagcatagcagagcaggcgcacggcgcaccgcacacctcactgccgctcccttctcgtctcctctcctctcctctcctcggcggatccggcaccgacccaccgcccctctgctcgctccttccgccggaatcgctgctcctctctgtgctgtcgatttgtgcggcgactgttagtttgatcaatggctgacggtgaggatatccagccacttgtgtgtgacaatggcactggaatggtcaaggctggctttgctggtgatgatgcgcccagagcagtgttccctagtatagtcggccgccctcggcacacgggtgtgatggttggaatgggccagaaggacgcctatgtaggtgacgaggcacagtcaaaaagaggtatcttgaccttgaagtaccccattgagcacggtatcgtgaacaactgggatgatatggagaaaatctggcaccacaccttctacaatgaactgcgtgttgctcctgaagagcacccagttctgctgacagaagcacctctgaacccaaaggcaaacagagagaagatgacccaaattatgttcgagacattcaatgcaccagcaatgtatgttgctatccaagctgtcctttccctgtatgccagcggtcgcactacaggtattgtgctcgattctggtgatggtgtgacccacaccgtgccaatctacgagggatacgcgctccctcatgccattcttaggctggatcttgctggccgtgatctgactgactgcctaatgaagatcctcacggaaaggggttattccttcaccacgacggcagaacgggaaatcgtgagagacataaaggagaagctggcctttgtggccctagactacgagcaggagctggagaccgctaagagcagctcctccgtcgagaagagctacgagctgcccgatgggcaggtcatcacgatcggcgcggagaggttcagatgcccagaggtgcttttgcagccgtcgctgatcgggatggaagctcccggcatccacgagaccacctacaactcgatcatgaaatgtgacgttgatatcaggaaggacctgtacgggaacatcgtcctcagtggagggacgaccatgttccctggcatcgctgacaggatgagcaaggagattactgccctcgcgccgagcagcatgaagatcaaggtcgtggcgcctcctgagagaaaatacagtgtttggattggtggctcgatccttgcgtcgctcagtacgttccagcagatgtggatatccaaggatgagtacgatgagtctggccctgctatcgtccaccgaaaatgcttctgagctagctatctgccgcgcctttcatagcgtgtcaagctgttgagatctgcgttgttgagttgagtgtctctatggagtatcacatactttctgcatgaggggggaagagtatacccaactaagcgcatgcctttcggatgccctgcttcgtgattcagatgctgctttctttcaagtgatatgtcgatgtagtgtgcgagcaatgtatttggtttggctacagctgttcctgtcgtctgtgcgtaaaacattagctatgtatctatccatatctgcatatttgaatgtatggtcgttttctcatatggtgtcaagttaaaattcttatgttctcttattaaattttagttacccatatgtggccataatagccatgatatcttgtgaaagggtctttagctgggttggttggttggtctaataagtataatattttgtgaaaggggatttagctgtggtggttggatgatctgaataacacttctcctgtcctgagtttaaaaatatcttgtctgttattctagggacttttttttaatataataccaatgagctatcttatgagtttgttttgcacaaaaaatgaatcaaatttgacaaaagtact

SEQ ID NO: 11742 - DNA, 1995 bp, Zea Mays
gctatgacaactgtcgccgcgcacataaatgaaacggacgccgttcctcttctcccctcttccatagcatagcagagcaggcgcacggcgcaccgcacacctcactgccgctcccttctcgtctcctctcctctcctctcctcggcggatccggcaccgacccaccgcccctctgctcgctccttccgccggaatcgctgctcctctctgtgctgtcgatttgtgcggcgactgttagtttggttcggtcccatccttctgttgatcaatggctgacggtgaggatatccagccacttgtgtgtgacaatggcactggaatggtcaaggctggctttgctggtgatgatgcgcccagagcagtgttccctagtatagtcggccgccctcggcacacgggtgtgatggttggaatgggccagaaggacgcctatgtaggtgacgaggcacagtcaaaaagaggtatcttgaccttgaagtaccccattgagcacggtatcgtgaacaactgggatgatatggagaaaatctggcaccacaccttctacaatgaactgcgtgttgctcctgaagagcacccagttctgctgacagaagcacctctgaacccaaaggcaaacagagagaagatgacccaaattatgttcgagacattcaatgcaccagcaatgtatgttgctatccaagctgtcctttccctgtatgccagcggtcgcactacaggtattgtgctcgattctggtgatggtgtgacccacaccgtgccaatctacgagggatacgcgctccctcatgccattcttaggctggatcttgctggccgtgatctgactgactgcctaatgaagatcctcacggaaaggggttattccttcaccacgacggcagaacgggaaatcgtgagagacataaaggagaagctggcctttgtggccctagactacgagcaggagctggagaccgctaagagcagctcctccgtcgagaagagctacgagctgcccgatgggcaggtcatcacgatcggcgcggagaggttcagatgcccagaggtgcttttgcagccgtcgctgatcgggatggaagctcccggcatccacgagaccacctacaactcgatcatgaaatgtgacgttgatatcaggaaggacctgtacgggaacatcgtcctcagtggagggacgaccatgttccctggcatcgctgacaggatgagcaaggagattactgccctcgcgccgagcagcatgaagatcaaggtcgtggcgcctcctgagagaaaatacagtgtttggattggtggctcgatccttgcgtcgctcaatgtggatatccaaggatgagtacgatgagtctggccctgctatcgtccaccgaaaatgcttctgagctagctatctgccgcgcctttcatagcgtgtcaagctgttgagatctgcgttgttgagttgagtgtctctatggagtatcacatactttctgcatgaggggggaagagtatacccaactaagcgcatgcctttcggatgccctgcttcgtgattcagatgctgctttctttcaagtgatatgtcgatgtagtgtgcgagcaatgtatttggtttggctacagctgttcctgtcgtctgtgcgtaaaacattagctatgtatctatccatatctgcatatttgaatgtatggtcgttttctcatatggtgtcaagttaaaattcttatgttctcttattaaattttagttacccatatgtggccataatagccatgatatcttgtgaaagggtctttagctgggttggttggttggtctaataagtataatattttgtgaaaggggatttagctgtggtggttggatgatctgaataacacttctcctgtcctgagtttaaaaatatcttgtctgttattctagggacttttttttaatataataccaatgagctatcttatgagtttgttttgcacaaaaaatgaatcaaatttgacaaaagtact

SEQ ID NO: 11743 - DNA, 739 bp, Zea Mays
ataaatgacaagacaagtaaatttgtctcaaatttagtgattgctcctcattgcaattagttcagtcatatagatctaactcggtatgggtatcctcttgttcccagtacgtaacacttcagctatggtctgttttgacagatgcaccagcacatactcacattttactagagcgcaggcgatggtaaaactactgcagaaattgcaccggcggcaacagtttgttatttgctccgacggcacccataagcggagcagcttattagagttaggtttgggatccgaccctaccgccacttcatttcatcattgcagttctccgacaggcgcttcgttgagccacaagaaatggatgaagtcatacagcttagcactcacgcttacctgttcaggcgtcgggttcagccgcctcatatggtctggcctcattcggtccagatggtgaatacaccgagtcctaatctcatggatggatggaagctcctcccgttccatacatgaatttccaggccagtagcacttcaataattcctcaacatgctgtggaacaacgtacgctctctttgattcattgaaagggtgacgacataggagcctttcaccaatctataaacgaatggtaaatcataaaacccaccatctttggacctggctcatcttctccggtcattatatcaaccaacggatacccttctttgccatacaatctgtagcattttttcttacatggtatcgatac

SEQ ID NO: 11744 - DNA, 1259 bp, Zea Mays
agaatggtaggataaatgacaagacaagtaaatttgtctcaaatttagtgattgctcctcattgcaattagttcagtcatatagatctaactcggtatgggtatcctcttgttcccagtacgtaacacttcagctatggtctgttttgacagatgcaccagcacatactcacattttactagagcgcaggcgatggtaaaactactgcagaaattgcaccggcggcaacagtttgttatttgctccgacggcacccataagcggagcagcttattagagttaggtttgggatccgaccctaccgccacttcatttcatcattgcagttctccgacaggcgcttcgttgagccacaagaaatggatgaagtcatacagcttagcactcacgcttacctgttcaggcgtcgggttcagccgcctcatatggtctggcctcattcggtccagatggtgaatacaccgagtcctaatctcatggatggatggaagctcctcccgtgaattcgcttcaccagttgacaaaacaacacatgttgacatcaatggctcccagcttaaataacttaagcaattgtcttatccgtctaacagttcaaactaaaccaggatacgtgtttaactgattcaagtgataattcctacggcaaaaaccctattctatatttggctttggtgattagcatcatacgtgcagtaacaataggtcattttaggtaaatgccaatactagcagcacatcatagtctactgcaatacgcatcagtgtattttgtaaatatgcttcatgaaagacgactagcacggtcaatggagcatgcatgcagcacaagggaaaaataaggagtgatgcagaaattactcaggtgggaggttccatacatgaatttccaggccagtagcacttcaataattcctcaacatgctgtggaacaacgtacgctctctttgattcattgaaagggtgacgacataggagcctttcaccaatctataaacgaatggtaaatcataaaacccaccatctgtttcagatttcgtaaaatagtaactatggcatacaaaatcacaactgaaaaaaataacaagcaaatgttttttttacgcaggctcagtggctcactgactgtatttataagcattgacatgaatattgtttacctttggacctggctcatcttctccggtcattatatcaaccaacggatacccttctttgccatacaatctgtagcattttttcttacatggtatcgatac

SEQ ID NO: 11745 - DNA, 1457 bp, Zea Mays
atgggacttcttgccagccacaacattcaagccaacttcgcatcaaggagcaaccatgtgaagtcaaatccattgaagacgatggtgcgattgggtggactacggtatatcgaaggcgacgtggtagagtcaattcgacagagcctttatgtcacccaacaaccaggctcccaactcaccctcatccgatcagaaaaaatttatagggccattgattgcagggatccgctgaggtgcctcagttgtggtgttggccacaagcgagctggcaaggctgagtacccacgcggcgtgggcctagctaggtggtgttcgaccgacgacaagtacaagcacagtgagaagggccttatgctccagctccctgttcatggtgaccgcatcaactttgactaccatgtttgtctctgcctcgaaggcattcttttgcatgcgtggaacgagggcatcgccaagcgggcggtggctatgagctgcgtgctagactacgtcgagtctcaatcactacaaaaggaggacacaaggacgctcaacctctgggcgtgggcgtggaacccttcagacatcccaaaggtaacttggctaaccattgttggcaggaacatcactgtccacaacatgccatcggcgggacaaagtggcttaaccttcagggtcatcgtccaccttgaccttgtggagggttttccgggcaacgaggatcaaggaagtacgcgtgcgttcgactggaggcttggagttgttgatggcgagagtgctccacgcgacatgcacgaccctccacctcgatgtaacgatcatcaccgagacgacgatgacaacgaccgccgtagacgtcgcctacaacgtgaggtcagttggagcatgcgtcttttccgaagcatctcgcgtgctccaaagggctgtgagcgagagcgctcggggtcgcgtcgtgaccatcgacacaacacttccaggaggtacatgtccggcgacgcgcctggaggtgtaaggcatgtccaacaacctcgccaagctgctgctatgccagcggacgcgtcccatgtcggcatcccagggcgtggcgtggagaacgtgggttcccgtccacacactgggcttgcgcaccagctgcgtgagggctccttgatgacacgtgggcgcagccgcatgcgctatctcccccggggcgctgaaacacctgctgtggccacggctgctgcaacaacagctcagaacattaaacatcgacatgtattcaatctctccgcgcggacacaatgcaacctctgtcgcaagcttggcctcttggcgaatgatggaactcctaattttgataatgctttccaggactttcaggcttggttccagaaaccattatctaaggaggtgaagctatagaagaaacacaggatgagatggacaatctgcaagcggaagcaaggagcaatgctgcagcacatctggtggttgtctga

SEQ ID NO: 11746 - DNA, 3675 bp, Zea Mays
cccgacaatagtgccgttcctccgttgtttctacgcttggacttttttcccaagctccatgcatcatccatctatggggaggagaggagcctcacttctagtctagtacaacttgcttctgcttctgcctctcccggtccaggtctcgctctcctccgctgttctgttctaccactaccactaccagcccgggcggtccaatccaattccccccgctcccacctagtccttcctcctcgtgccaataccagatccacgcgctccattgcgaaataaccttaccaatcgcagaggacaagagaagacgccatgccacatgtgagagcggggagcttaggtttgatctgctagccagctgcctctgcgtctgccatcggccatcgcccatcgccatcggagaaaaataaagggttgaagggaccagaggaggcggccgcccccgaaccgccgggaaggcaaaaagatgcgccctttgcggcgaagctccgggggccttgcggccctcggctgctgcctcttcctcctcccgctgctgtcccgcggcgcggacatgccgctggggtcgaccctctcgccgggcaactcggcgacgtggacgtcgcccaacagcaccttctcgctcggcttcacggcgtccgcgtcctccccgtcgctcttcgtcgccgccatcacctacgccggcggcgtgcccgtctggtccgcgggcaacggcgccgccgttgactcggggagctcgttccgcctctcgtccaacggcgacctccagctcgtcaacggatccggggccgtgctctggtcctccaacacggggggccagaacgtgtccgccgcggccgtccaggagaccggcaacctcgtgctcaaggacaagaccggcgccgcgctgtggcagtcgttcgaccaccccacggacacggtggtcatgtcgcagaacttcacctcgggcatgaacctcacctccgggtcctacgccttctccgtcgacagggccacgggcaacctcacgctccgctggaccggcgccggctccaccgtcacctacttcaacaggggctacaacacctccttcacggggaacaagacgctcaccgcgcccacgctcacgatgcagaccaacggcatcgtctccctcaccgacggcaccctcacctcccccgccgtcgtcgcctacagcagcaactacggcgagagcggggacatgatgcgcttcgtgcgcctcgacgcggacggcaacttccgcgcctacagcgccgcccggggcagcaacgccgccacggaggagtggtcggccgtggcggaccagtgccaggtgttcggctactgcggcagcatgggcgtgtgcagctacaacggcacgtcgccggtctgcggctgcccgtcgctcaacttccagctctccgacccttccaagccgcgcgccggctgcacgcgcaagctcgagctcgccagctgccccggcaactccaccatgctcgagctcgacaacacgcagttcctcacctacccgccggagatcaccacggagcagttcttcgtcggcatcaccgcctgccgcctcaactgcctctccggcggctcctgcgtcgcgtccacagcgctctccgacggctcgggcctctgcttcctcaaggtgtccagcttcgtcagcggctaccagtcggccgcgctgcccagcacgtctttcgtcaaggtctgctccccgccgctgcccaacccggccccgggcagcgcggcggcgccctcggccggcggctccggcttccgcgcctgggtcgtggcggtcgtggtcctgggtgtggtgtccgcgctggtgctctgcgagtgggcgctctggtggttcctgtgccggcacagccccaagtacggcccggcgtcggcgcagtacgcgctgctggagtacgcgtcgggcgcgcccgtgcagttctcgtaccgcgagctgcagcgctccaccaaggggttcaaggagaagctgggcgccggcgggttcggcgcggtgtaccgcggcgtgctggcgaaccggacggtggtggcggtgaagcagctggaagggatcgagcagggggagaagcagttccggatggaggtggccaccatcagcagcacccaccacctcaacctggtccgcctcatcggcttctgctccgagggccggcaccggctgctggtgtacgagttcatgaagaacggatcgctggacgcgttcctgttcggcgacgcgccgccgggcgggaagatgccgtggccgacgcggttcgccgtggccgtgggcacggcgcgcggcatcacgtacctgcacgaggagtgccgcgactgcatcgtgcactgcgacatcaagcccgagaacatcctcctggacgagcacttcaacgccaaggtctccgacttcgggctggccaagctggtcaaccccaaggaccaccgccaccggacgctcaccagcgtgcgcggcaccaggggctacctggcgccggagtggctcgccaacctgcccataacggccaagtccgacgtgtacagctacgggatggtgctgctggagaccgtcagcgggcgacgcaacttcgacgtgtcggaggagacgcgcgggaagaagttctcggtgtgggcgtacgaggagtacgagaggggcaacctcgccggcatcatcgacaggaggctccccgcagaggacctcgacatggcgcaggtggagcgcgcgctgcaggtgagcttctggtgcatccaggagcagccggggcagcgcccgtccatggggaaggtggtgcagatgctggatggggttatggagctcgagaggcctccgcccccgaagtcgtcggacagcttttttagcaccaccacggccagcggcggcaactccagcatggtctcgacagtcgcctcgtcggcggcgcccccggtcgcgccctcgacgtcgccgaacctagagcaggagatggcgttgggacgctccgagtcggctaggaaccgtgaccgggtgacgcggcagctgctgtcgccgcagccgtacatgacgatgtaaaatgtgcgtctgcgtcatcgtcatcctcatccatccatggcagagatcatcatctggatacacgcactcaggcagaatgcctgcttctgtcgtccattccaggtttactacagattgtagagcgattacgagaagaactgctgcgagtctcctgtgtttctcgtcggtcggtcgcatcgcacgggtcggtcaccactcaccacactgctggaattcttctctgttctggaacacgggcaggatctttcagcgaagcatctccgtcagcttctaaaatgcggttcaatgcgaggggcccatcccatggatgaagccatgcatgatgcatccgtcgtgagacaaaggcctgctacatctttgcgcgaagccgccatccctgcaatggcagccaggcggcagctgcaaggttgcaacacattaattaaacaaagccatccgtgctgggtctcgtttatccccttatatgttgttagtgtgtatttggttagtgggttgatgcggtttgcaacgataaggttagtgctcgtcatcggctagacaagtctgctagtcatcacaaatgttacaaattcactgaaatgcattttaatgttattgggatattccttaaattataactgaaatgtaacagtgagacatcatcactaaaaaat

SEQ ID NO: 11747 - DNA, 3517 bp, Zea Mays
gaatgctatacagagagaggctgcgttgcctcgtatccaatctaacggcggataacaccgagtggcgaccgcctgacgcgcccgtgtcggcaagccgccgacgacttgacgtggggcgggggaaacaaaacaacgcgggcagcgctacggcaagcgcgtccctgccacggcgcggacacagagagtggaaaccggaaggggggaagagagatggattcctccacctcggcggcggcggcaggggaggcggccgtgccgccggaggacgacgtctgctccgtctgccacgaccgcttccggatcccgtgtcaggcgaactgctcccattggttctgtggagagtgcatcatccgcgtttggaattatggacctcctgtacaggcttgcaagtgtcccatttgtcgccgccttataaatctactggtgcctgctgcattatcagggcaggaggatggtccacaagctcaacgtattctaggagagattcagcactataactgtatatttggtggagcaccacgcagcctaactcagaggttgcaagacctacccttcttcatccgaagactgttcagagaactaatggacccccagcggaccctcccactcgtgttcagggcgcggatgctgatgatggtcgcactgagtgcaatttatgtgctgagccctgtcgacattcttcccgaaagcatgctgggcctctttggattcgtcgatgacctgctcatcctgctgatcgtgttcctccacctcgccgcggtgtaccggtcgttgctcctgtaccgccacgggggccagtagaagtcgctgtgcataaaccgtttgtttagctggtttccatgtggagttctctgagatcgcagcagcggatttggaagatcgccgactcgccgagtagatggcaacgtcacggacggcttagcctgtccctgctctgtaccattctactacgcctgtttttctgagactctgacacggtgaactgaactttggttggttgatgcaagtgaatttcccttcgttttactcgtcaggaaaagaaagggaaagagtttgcgttcgtttgtctttgtttctgctctttggaagttggaattgaaactgcactgatgtttgcgtttcaggaactgcattgacgtggatcctgctcagttctcttagcatttacttatgggccaagtttgtagaagtttagtgggctgtagacccattggtgtcatgttgggccaccgcgacgagtaaagaagaggtaggggatcgccctggccgggtagttggctcttgcgggagggatgagatgggaatgggatggcgacgggcgggcgtgtgcggctgcaagcggctcggaaggggcacggtggagacgcagcggaccctcgcctcttctcctgctcctgctgctgacctgacgagctgagcccacggacgagaggggagacgaggaggggcacaccacgcaggagaccggaggagagcgcgcgcgcggatccacctcgatgttggcaagaccatcagcaccgcctttggtgactgctcaaactcctgaagtcggcatcttcattacagctcgcaacgtctcgggtgcactggtcgccaagcttcctggtaacaaaaacaagtgtggaggaagatcgaatgtccggcagcggaacatccaacctgggaaaaggggctgtcgtcgggagtggcgggcgctctcagcagctgaccaagcgcaggcttctaccttggacgtagatgaggagtgcaaacgggtgctcactccattgggtttctccagcgaagacgccgagaagatgctgaagaaagcgtttggctggacccactcgccgtactggagcgaggagagggagaaggaggttccgaccgccgaggcggtagctggagtgctggactacatcaggagcctggggctgtcggacgaagaccttggcaggctgctgaagaagttccccgaggttcttgggtgcgacctcgacggcgaggtgaggccgaatgtgggcaagctggacagtgactggggaataaacgggaagaccctgcggagccttctgctgaggaaccccaaggttctgggctacaatgttgactgcagaggggattgcatggcccagtgcacccgctgttgggttaggttctgatgatgattggttttgttcttcgtcgccacatcgttggtcaggaacttgggacttggttttgcttgctggccatttttctgtaagctagcacctgtcgaatgtagcacaatcgctagctgctggatattgggttggccactgttagttcttatgtacgtacaacagattcaagagctaaaccatgctgctgttgtctgtaaaagagttgcaataaatatggccagaattcctgaatggcctgtggtaccgcagtgacttgctattgttcttctgctctggatttccacattgtcttgttgtgatgtgaggtcctgtccttgtgctttgatgcatctcccactgtgctgtcatgtttttgtttgcatgaattacagctgaagtagttcaaagcgatcaaatccatcaaagtacatgtgagcatgtgatccggatcttatctacttgttctacatgctaatgccaattgagtgaggacaaatcattctttgtgtttttttttgggttcttattctgagttcagaaatcgattggtggtgccccgaagagatcaaatccatcaaagtcacaggaatcgagccccactggccagggtgagagcgaccctcgtccgtcgtcgtccagacactgtccttgtccatccatgagcgcgaagccctcgatgtcagaacagctgagagcatcgagcatggtgtccgagaagaactccaagctcgctgcctcggtgtccatcgtcgtcaggcggcgataagagtcggtgccgagtccgccattggcaacattgtgggcagccgcgtcgtcctcgggcggcagcgcgggcgcgtggccgtcgaaggcggcgacgtgggcgaagagcttgtccttccgcgagaaggaggtgccgcaggagcagacccagcggtcgcgtccgcagtgcttctcgtgcgtgcgcaggtcggcgagcacggagaagcgcttgacgttgcagcggcggcaggtgtagctcttgtcgcagtggctgcgccggtagtggttcttgacgcacacggccgtcttgagcggctggaagctgcggtgctcccgcctcccggttgcgcttgcaccccacgaaggggcaggagtagaagcaccgggcggaggaggaggaggacgactgcgccgtggccgcggccgtgggcgatcttctgctccaggaaggtgaggcacgtcagcaccgccctggggtcgtcggagcagcccccggcttgggtcggctcgcgctgccgccgctgagcctccatgacgtcatcgctagggctgcaaacctccatggcgtacggtctgaaccgatcaatgcctgatctcgctggtcgggtgggggtttggctgggccgtgtccgatctctgttcttgcttatgct

SEQ ID NO: 11748 - DNA, 2815 bp, Zea Mays
gaatgctatacagagagaggctgcgttgcctcgtatccaatctaacggcggataacaccgagtggcgaccgcctgacgcgcccgtgtcggcaagccgccgacgacttgacgtggggcgggggaaacaaaacaacgcgggcagcgctacggcaagcgcgtccctgccacggcgcggacacagagagtggaaaccggaaggggggaagagagatggattcctccacctcggcggcggcggcaggggaggcggccgtgccgccggaggacgacgtctgctccgtctgccacgaccgcttccggatcccgtgtcaggcgaactgctcccattggttctgtggagagtgcatcatccgcgtttggaattatggacctcctgtacaggcttgcaagtgtcccatttgtcgccgccttataaatctactggtgcctgctgcattatcagggcaggaggatggtccacaagctcaacgtattctaggagagattcagcactataactgtatatttggtggagcaccacgcagcctaactcagaggttgcaagacctacccttcttcatccgaagactgttcagagaactaatggacccccagcggaccctcccactcgtgttcagggcgcggatgctgatgatggtcgcactgagtgcaatttatgtgctgagccctgtcgacattcttcccgaaagcatgctgggcctctttggattcgtcgatgacctgctcatcctgctgatcgtgttcctccacctcgccgcggtgtaccggtcgttgctcctgtaccgccacgggggccagtagaagtcgctgtgcataaaccgtttgtttagctggtttccatgtggagttctctgagatcgcagcagcggatttggaagatcgccgactcgccgagtagatggcaacgtcacggacggcttagcctgtccctgctctgtaccattctactacgcctgtttttctgagactctgacacggtgaactgaactttggttggttgatgcaagtgaatttcccttcgttttactcgtcaggaaaagaaagggaaagagtttgcgttcgtttgtctttgtttctgctctttggaagttggaattgaaactgcactgatgtttgcgtttcaggaactgcattgacgtggatcctgctcagttctcttagcatttacttatgggccaagtttgtagaagtttagtgggctgtagacccattggtgtcatgttgggccaccgcgacgagtaaagaagaggtaggggatcgccctggccgggtagttggctcttgcgggagggatgagatgggaatgggatggcgacgggcgggcgtgtgcggctgcaagcggctcggaaggggcacggtggagacgcagcggaccctcgcctcttctcctgctcctgctgctgacctgacgagctgagcccacggacgagaggggagacgaggaggggcacaccacgcaggagaccggaggagagcgcgcgcgcggatccacctcgtatacacttcctcttcttctccgtgtccttggctcagatttagttgctgcgccgcttcttaggattgattgctgcttcacccggtgatcgcgtcgtcatcttcgcgtttgcttaatcgcctggttgctgcatcggttttttttttttgtgtgtgtgttgtgtggttgggggtgcgggcacagggtttcctcctgcttagcctggattggtgtaggatttcgatgtgatcgatggcggccgaagacaaaattttaggatgttggcaagaccatcagcaccgcctttggtgactgctcaaactcctgaagtcggcatcttcattacagctcgcaacgtctcgggtgcactggtcgccaagcttcctggtaacaaaaacaagtgtggaggaagatcgaatgtccggcagcggaacatccaacctgggaaaaggggctgtcgtcgggagtggcgggcgctctcagcagctgaccaagcgcaggcttctaccttggacgtagatgaggagtgcaaacgggtgctcactccattgggtttctccagcgaagacgccgagaagatgctgaagaaagcgtttggctggacccactcgccgtactggagcgaggagagggagaaggaggttccgaccgccgaggcggtagctggagtgctggactacatcaggagcctggggctgtcggacgaagaccttggcaggctgctgaagaagttccccgaggttcttgggtgcgacctcgacggcgaggtgaggccgaatgtgggcaagctggacagtgactggggaataaacgggaagaccctgcggagccttctgctgaggaaccccaaggttctgggctacaatgttgactgcagaggggattgcatggcccagtgcacccgctgttgggttaggttctgatgatgattggttttgttcttcgtcgccacatcgttggtcaggaacttgggacttggttttgcttgctggccatttttctgtaagctagcacctgtcgaatgtagcacaatcgctagctgctggatattgggttggccactgttagttcttatgtacgtacaacagattcaagagctaaaccatgctgctgttgtctgtaaaagagttgcaataaatatggccagaattcctgaatggcctgtggtaccgcagtgacttgctattgttcttctgctctggatttccacattgtcttgttgtgatgtgaggtcctgtccttgtgctttgatgcatctcccactgtgctgtcatgtttttgtttgcatgaattacagctgaagtagttcaaagcgatcaaatccatcaaagtacatgtgag

SEQ ID NO: 11749 - DNA, 2261 bp, Zea Mays
gaatgctatacagagagaggctgcgttgcctcgtatccaatctaacggcggataacaccgagtggcgaccgcctgacgcgcccgtgtcggcaagccgccgacgacttgacgtggggcgggggaaacaaaacaacgcgggcagcgctacggcaagcgcgtccctgccacggcgcggacacagagagtggaaaccggaaggggggaagagagatggattcctccacctcggcggcggcggcaggggaggcggccgtgccgccggaggacgacgtctgctccgtctgccacgaccgcttccggatcccgtgtcaggcgaactgctcccattggttctgtggagagtgcatcatccgcgtttggaattatggacctcctgtacaggcttgcaagtgtcccatttgtcgccgccttataaatctactggtgcctgctgcattatcagggcaggaggatggtccacaagctcaacgtattctaggagagattcagcactataactgtatatttggtggagcaccacgcagcctaactcagaggttgcaagacctacccttcttcatccgaagactgttcagagaactaatggacccccagcggaccctcccactcgtgttcagggcgcggatgctgatgatggcatgctgggcctctttggattcgtcgatgacctgctcatcctgctgatcgtgttcctccacctcgccgcggtgtaccggtcgttgctcctgtaccgccacgggggccagtagaagtcgctgtgcataaaccgtttgtttagctggtttccatgtggagttctctgagatcgcagcagcggatttggaagatcgccgactcgccgagtagatggcaacgtcacggacggcttagcctgtccctgctctgtaccattctactacgcctgtttttctgagactctgacacggtgaactgaactttggttggttgatgcaagtgaatttcccttcgttttactcgtcaggaaaagaaagggaaagagtttgcgttcgtttgtctttgtttctgctctttggaagttggaattgaaactgcactgatgtttgcgtttcaggaactgcattgacgtggatcctgctcagttctcttagcatttacttatgggccaagtttgtagaagtttagtgggctgtagacccattggtgtcatgttgggccaccgcgacgagtaaagaagaggatgttggcaagaccatcagcaccgcctttggtgactgctcaaactcctgaagtcggcatcttcattacagctcgcaacgtctcgggtgcactggtcgccaagcttcctggtaacaaaaacaagtgtggaggaagatcgaatgtccggcagcggaacatccaacctgggaaaaggggctgtcgtcgggagtggcgggcgctctcagcagctgaccaagcgcaggcttctaccttggacgtagatgaggagtgcaaacgggtgctcactccattgggtttctccagcgaagacgccgagaagatgctgaagaaagcgtttggctggacccactcgccgtactggagcgaggagagggagaaggaggttccgaccgccgaggcggtagctggagtgctggactacatcaggagcctggggctgtcggacgaagaccttggcaggctgctgaagaagttccccgaggttcttgggtgcgacctcgacggcgaggtgaggccgaatgtgggcaagctggacagtgactggggaataaacgggaagaccctgcggagccttctgctgaggaaccccaaggttctgggctacaatgttgactgcagaggggattgcatggcccagtgcacccgctgttgggttaggttctgatgatgattggttttgttcttcgtcgccacatcgttggtcaggaacttgggacttggttttgcttgctggccatttttctgtaagctagcacctgtcgaatgtagcacaatcgctagctgctggatattgggttggccactgttagttcttatgtacgtacaacagattcaagagctaaaccatgctgctgttgtctgtaaaagagttgcaataaatatggccagaattcctgaatggcctgtggtaccgcagtgacttgctattgttcttctgctctggatttccacattgtcttgttgtgatgtgaggtcctgtccttgtgctttgatgcatctcccactgtgctgtcatgtttttgtttgcatgaattacagctgaagtagttcaaagcgatcaaatccatcaaagtacatgtgag

SEQ ID NO: 11750 - DNA, 2166 bp, Zea Mays
gaatgctatacagagagaggctgcgttgcctcgtatccaatctaacggcggataacaccgagtggcgaccgcctgacgcgcccgtgtcggcaagccgccgacgacttgacgtggggcgggggaaacaaaacaacgcgggcagcgctacggcaagcgcgtccctgccacggcgcggacacagagagtggaaaccggaaggggggaagagagatggattcctccacctcggcggcggcggcaggggaggcggccgtgccgccggaggacgacgtctgctccgtctgccacgaccgcttccggatcccgtgtcaggcgaactgctcccattggttctgtggagagtgcatcatccgcgtttggaattatggacctcctgtacaggcttgcaagtgtcccatttgtcgccgccttataaatctactggtgcctgctgcattatcagggcaggaggatggtccacaagctcaacgtattctaggagagattcagcactataactgtatatttggtggagcaccacgcagcctaactcagaggttgcaagacctacccttcttcatccgaagactgttcagagaactaatggacccccagcggaccctcccactcgtgttcagggcgcggatgctgatgatggtcgcactgagtgcaatttatgtgctgagccctgtcgacattcttcccgaaagcatgctgggcctctttggattcgtcgatgacctgctcatcctgctgatcgtgttcctccacctcgccgcggtgtaccggtcgttgctcctgtaccgccacgggggccagtagaagtcgctgtgcataaaccgtttgtttagctggtttccatgtggagttctctgagatcgcagcagcggatttggaagatcgccgactcgccgagtagatggcaacgtcacggacggcttagcctgtccctgctctgtaccattctactacgcctgtttttctgagactctgacacggaactgcattgacgtggatcctgctcagttctcttagcatttacttatgggccaagtttgtagaagtttagtgggctgtagacccattggtgtcatgttgggccaccgcgacgagtaaagaagaggatgttggcaagaccatcagcaccgcctttggtgactgctcaaactcctgaagtcggcatcttcattacagctcgcaacgtctcgggtgcactggtcgccaagcttcctggtaacaaaaacaagtgtggaggaagatcgaatgtccggcagcggaacatccaacctgggaaaaggggctgtcgtcgggagtggcgggcgctctcagcagctgaccaagcgcaggcttctaccttggacgtagatgaggagtgcaaacgggtgctcactccattgggtttctccagcgaagacgccgagaagatgctgaagaaagcgtttggctggacccactcgccgtactggagcgaggagagggagaaggaggttccgaccgccgaggcggtagctggagtgctggactacatcaggagcctggggctgtcggacgaagaccttggcaggctgctgaagaagttccccgaggttcttgggtgcgacctcgacggcgaggtgaggccgaatgtgggcaagctggacagtgactggggaataaacgggaagaccctgcggagccttctgctgaggaaccccaaggttctgggctacaatgttgactgcagaggggattgcatggcccagtgcacccgctgttgggttaggttctgatgatgattggttttgttcttcgtcgccacatcgttggtcaggaacttgggacttggttttgcttgctggccatttttctgtaagctagcacctgtcgaatgtagcacaatcgctagctgctggatattgggttggccactgttagttcttatgtacgtacaacagattcaagagctaaaccatgctgctgttgtctgtaaaagagttgcaataaatatggccagaattcctgaatggcctgtggtaccgcagtgacttgctattgttcttctgctctggatttccacattgtcttgttgtgatgtgaggtcctgtccttgtgctttgatgcatctcccactgtgctgtcatgtttttgtttgcatgaattacagctgaagtagttcaaagcgatcaaatccatcaaagtacatgtgag

SEQ ID NO: 11751 - DNA, 2362 bp, Zea Mays
gaatgctatacagagagaggctgcgttgcctcgtatccaatctaacggcggataacaccgagtggcgaccgcctgacgcgcccgtgtcggcaagccgccgacgacttgacgtggggcgggggaaacaaaacaacgcgggcagcgctacggcaagcgcgtccctgccacggcgcggacacagagagtggaaaccggaaggggggaagagagatggattcctccacctcggcggcggcggcaggggaggcggccgtgccgccggaggacgacgtctgctccgtctgccacgaccgcttccggatcccgtgtcaggcgaactgctcccattggttctgtgaggttgcaagacctacccttcttcatccgaagactgttcagagaactaatggacccccagcggaccctcccactcgtgttcagggcgcggatgctgatgatggtcgcactgagtgcaatttatgtgctgagccctgtcgacattcttcccgaaagcatgctgggcctctttggattcgtcgatgacctgctcatcctgctgatcgtgttcctccacctcgccgcggtgtaccggtcgttgctcctgtaccgccacgggggccagtagaagtcgctgtgcataaaccgtttgtttagctggtttccatgtggagttctctgagatcgcagcagcggatttggaagatcgccgactcgccgagtagatggcaacgtcacggacggcttagcctgtccctgctctgtaccattctactacgcctgtttttctgagactctgacacggtgaactgaactttggttggttgatgcaagtgaatttcccttcgttttactcgtcaggaaaagaaagggaaagagtttgcgttcgtttgtctttgtttctgctctttggaagttggaattgaaactgcactgatgtttgcgtttcaggaactgcattgacgtggatcctgctcagttctcttagcatttacttatgggccaagtttgtagaagtttagtgggctgtagacccattggtgtcatgttgggccaccgcgacgagtaaagaagaggtaggggatcgccctggccgggtagttggctcttgcgggagggatgagatgggaatgggatggcgacgggcgggcgtgtgcggctgcaagcggctcggaaggggcacggtggagacgcagcggaccctcgcctcttctcctgctcctgctgctgacctgacgagctgagcccacggacgagaggggagacgaggaggggcacaccacgcaggagaccggaggagagcgcgcgcgcggatccacctcgatgttggcaagaccatcagcaccgcctttggtgactgctcaaactcctgaagtcggcatcttcattacagctcgcaacgtctcgggtgcactggtcgccaagcttcctggtaacaaaaacaagtgtggaggaagatcgaatgtccggcagcggaacatccaacctgggaaaaggggctgtcgtcgggagtggcgggcgctctcagcagctgaccaagcgcaggcttctaccttggacgtagatgaggagtgcaaacgggtgctcactccattgggtttctccagcgaagacgccgagaagatgctgaagaaagcgtttggctggacccactcgccgtactggagcgaggagagggagaaggaggttccgaccgccgaggcggtagctggagtgctggactacatcaggagcctggggctgtcggacgaagaccttggcaggctgctgaagaagttccccgaggttcttgggtgcgacctcgacggcgaggtgaggccgaatgtgggcaagctggacagtgactggggaataaacgggaagaccctgcggagccttctgctgaggaaccccaaggttctgggctacaatgttgactgcagaggggattgcatggcccagtgcacccgctgttgggttaggttctgatgatgattggttttgttcttcgtcgccacatcgttggtcaggaacttgggacttggttttgcttgctggccatttttctgtaagctagcacctgtcgaatgtagcacaatcgctagctgctggatattgggttggccactgttagttcttatgtacgtacaacagattcaagagctaaaccatgctgctgttgtctgtaaaagagttgcaataaatatggccagaattcctgaatggcctgtggtaccgcagtgacttgctattgttcttctgctctggatttccacattgtcttgttgtgatgtgaggtcctgtccttgtgctttgatgcatctcccactgtgctgtcatgtttttgtttgcatgaattacagctgaagtagttcaaagcgatcaaatccatcaaagtacatgtgag

SEQ ID NO: 11752 - DNA, 2310 bp, Zea Mays
gaatgctatacagagagaggctgcgttgcctcgtatccaatctaacggcggataacaccgagtggcgaccgcctgacgcgcccgtgtcggcaagccgccgacgacttgacgtggggcgggggaaacaaaacaacgcgggcagcgctacggcaagcgcgtccctgccacggcgcggacacagagagtggaaaccggaaggggggaagagagatggattcctccacctcggcggcggcggcaggggaggcggccgtgccgccggaggacgacgtctgctccgtctgccacgaccgcttccggatcccgtgtcaggcgaactgctcccattggttctgtgaggttgcaagacctacccttcttcatccgaagactgttcagagaactaatggacccccagcggaccctcccactcgtgttcagggcgcggatgctgatgatggcatgctgggcctctttggattcgtcgatgacctgctcatcctgctgatcgtgttcctccacctcgccgcggtgtaccggtcgttgctcctgtaccgccacgggggccagtagaagtcgctgtgcataaaccgtttgtttagctggtttccatgtggagttctctgagatcgcagcagcggatttggaagatcgccgactcgccgagtagatggcaacgtcacggacggcttagcctgtccctgctctgtaccattctactacgcctgtttttctgagactctgacacggtgaactgaactttggttggttgatgcaagtgaatttcccttcgttttactcgtcaggaaaagaaagggaaagagtttgcgttcgtttgtctttgtttctgctctttggaagttggaattgaaactgcactgatgtttgcgtttcaggaactgcattgacgtggatcctgctcagttctcttagcatttacttatgggccaagtttgtagaagtttagtgggctgtagacccattggtgtcatgttgggccaccgcgacgagtaaagaagaggtaggggatcgccctggccgggtagttggctcttgcgggagggatgagatgggaatgggatggcgacgggcgggcgtgtgcggctgcaagcggctcggaaggggcacggtggagacgcagcggaccctcgcctcttctcctgctcctgctgctgacctgacgagctgagcccacggacgagaggggagacgaggaggggcacaccacgcaggagaccggaggagagcgcgcgcgcggatccacctcgatgttggcaagaccatcagcaccgcctttggtgactgctcaaactcctgaagtcggcatcttcattacagctcgcaacgtctcgggtgcactggtcgccaagcttcctggtaacaaaaacaagtgtggaggaagatcgaatgtccggcagcggaacatccaacctgggaaaaggggctgtcgtcgggagtggcgggcgctctcagcagctgaccaagcgcaggcttctaccttggacgtagatgaggagtgcaaacgggtgctcactccattgggtttctccagcgaagacgccgagaagatgctgaagaaagcgtttggctggacccactcgccgtactggagcgaggagagggagaaggaggttccgaccgccgaggcggtagctggagtgctggactacatcaggagcctggggctgtcggacgaagaccttggcaggctgctgaagaagttccccgaggttcttgggtgcgacctcgacggcgaggtgaggccgaatgtgggcaagctggacagtgactggggaataaacgggaagaccctgcggagccttctgctgaggaaccccaaggttctgggctacaatgttgactgcagaggggattgcatggcccagtgcacccgctgttgggttaggttctgatgatgattggttttgttcttcgtcgccacatcgttggtcaggaacttgggacttggttttgcttgctggccatttttctgtaagctagcacctgtcgaatgtagcacaatcgctagctgctggatattgggttggccactgttagttcttatgtacgtacaacagattcaagagctaaaccatgctgctgttgtctgtaaaagagttgcaataaatatggccagaattcctgaatggcctgtggtaccgcagtgacttgctattgttcttctgctctggatttccacattgtcttgttgtgatgtgaggtcctgtccttgtgctttgatgcatctcccactgtgctgtcatgtttttgtttgcatgaattacagctgaagtagttcaaagcgatcaaatccatcaaagtacatgtgag

SEQ ID NO: 11753 - DNA, 2064 bp, Zea Mays
gaatgctatacagagagaggctgcgttgcctcgtatccaatctaacggcggataacaccgagtggcgaccgcctgacgcgcccgtgtcggcaagccgccgacgacttgacgtggggcgggggaaacaaaacaacgcgggcagcgctacggcaagcgcgtccctgccacggcgcggacacagagagtggaaaccggaaggggggaagagagatggattcctccacctcggcggcggcggcaggggaggcggccgtgccgccggaggacgacgtctgctccgtctgccacgaccgcttccggatcccgtgtcaggcgaactgctcccattggttctgtgaggttgcaagacctacccttcttcatccgaagactgttcagagaactaatggacccccagcggaccctcccactcgtgttcagggcgcggatgctgatgatggcatgctgggcctctttggattcgtcgatgacctgctcatcctgctgatcgtgttcctccacctcgccgcggtgtaccggtcgttgctcctgtaccgccacgggggccagtagaagtcgctgtgcataaaccgtttgtttagctggtttccatgtggagttctctgagatcgcagcagcggatttggaagatcgccgactcgccgagtagatggcaacgtcacggacggcttagcctgtccctgctctgtaccattctactacgcctgtttttctgagactctgacacggtgaactgaactttggttggttgatgcaagtgaatttcccttcgttttactcgtcaggaaaagaaagggaaagagtttgcgttcgtttgtctttgtttctgctctttggaagttggaattgaaactgcactgatgtttgcgtttcaggaactgcattgacgtggatcctgctcagttctcttagcatttacttatgggccaagtttgtagaagtttagtgggctgtagacccattggtgtcatgttgggccaccgcgacgagtaaagaagaggatgttggcaagaccatcagcaccgcctttggtgactgctcaaactcctgaagtcggcatcttcattacagctcgcaacgtctcgggtgcactggtcgccaagcttcctggtaacaaaaacaagtgtggaggaagatcgaatgtccggcagcggaacatccaacctgggaaaaggggctgtcgtcgggagtggcgggcgctctcagcagctgaccaagcgcaggcttctaccttggacgtagatgaggagtgcaaacgggtgctcactccattgggtttctccagcgaagacgccgagaagatgctgaagaaagcgtttggctggacccactcgccgtactggagcgaggagagggagaaggaggttccgaccgccgaggcggtagctggagtgctggactacatcaggagcctggggctgtcggacgaagaccttggcaggctgctgaagaagttccccgaggttcttgggtgcgacctcgacggcgaggtgaggccgaatgtgggcaagctggacagtgactggggaataaacgggaagaccctgcggagccttctgctgaggaaccccaaggttctgggctacaatgttgactgcagaggggattgcatggcccagtgcacccgctgttgggttaggttctgatgatgattggttttgttcttcgtcgccacatcgttggtcaggaacttgggacttggttttgcttgctggccatttttctgtaagctagcacctgtcgaatgtagcacaatcgctagctgctggatattgggttggccactgttagttcttatgtacgtacaacagattcaagagctaaaccatgctgctgttgtctgtaaaagagttgcaataaatatggccagaattcctgaatggcctgtggtaccgcagtgacttgctattgttcttctgctctggatttccacattgtcttgttgtgatgtgaggtcctgtccttgtgctttgatgcatctcccactgtgctgtcatgtttttgtttgcatgaattacagctgaagtagttcaaagcgatcaaatccatcaaagtacatgtgag

SEQ ID NO: 11754 - DNA, 1779 bp, Zea Mays
gaatgctatacagagagaggctgcgttgcctcgtatccaatctaacggcggataacaccgagtggcgaccgcctgacgcgcccgtgtcggcaagccgccgacgacttgacgtggggcgggggaaacaaaacaacgcgggcagcgctacggcaagcgcgtccctgccacggcgcggacacagagagtggaaaccggaaggggggaagagagatggattcctccacctcggcggcggcggcaggggaggcggccgtgccgccggaggacgacgtctgctccgtctgccacgaccgcttccggatcccgtgtcaggcgaactgctcccattggttctgtggagagtgcatcatccgcgtttggaattatggacctcctgtacaggcttgcaagtgtcccatttgtcgccgccttataaatctactggtgcctgctgcattatcagggcaggaggatggtccacaagctcaacgtattctaggagagattcagcactataactgtatatttggtggagcaccacgcagcctaactcagaggttgcaagacctacccttcttcatccgaagactgttcagagaactaatggacccccagcggaccctcccactcgtgttcagggcgcggatgctgatgatggcatgctgggcctctttggattcgtcgatgacctgctcatcctgctgatcgtgttcctccacctcgccgcggtgtaccggatgttggcaagaccatcagcaccgcctttggtgactgctcaaactcctgaagtcggcatcttcattacagctcgcaacgtctcgggtgcactggtcgccaagcttcctggtaacaaaaacaagtgtggaggaagatcgaatgtccggcagcggaacatccaacctgggaaaaggggctgtcgtcgggagtggcgggcgctctcagcagctgaccaagcgcaggcttctaccttggacgtagatgaggagtgcaaacgggtgctcactccattgggtttctccagcgaagacgccgagaagatgctgaagaaagcgtttggctggacccactcgccgtactggagcgaggagagggagaaggaggttccgaccgccgaggcggtagctggagtgctggactacatcaggagcctggggctgtcggacgaagaccttggcaggctgctgaagaagttccccgaggttcttgggtgcgacctcgacggcgaggtgaggccgaatgtgggcaagctggacagtgactggggaataaacgggaagaccctgcggagccttctgctgaggaaccccaaggttctgggctacaatgttgactgcagaggggattgcatggcccagtgcacccgctgttgggttaggttctgatgatgattggttttgttcttcgtcgccacatcgttggtcaggaacttgggacttggttttgcttgctggccatttttctgtaagctagcacctgtcgaatgtagcacaatcgctagctgctggatattgggttggccactgttagttcttatgtacgtacaacagattcaagagctaaaccatgctgctgttgtctgtaaaagagttgcaataaatatggccagaattcctgaatggcctgtggtaccgcagtgacttgctattgttcttctgctctggatttccacattgtcttgttgtgatgtgaggtcctgtccttgtgctttgatgcatctcccactgtgctgtcatgtttttgtttgcatgaattacagctgaagtagttcaaagcgatcaaatccatcaaagtacatgtgag

SEQ ID NO: 11755 - DNA, 2723 bp, Zea Mays
attgaggtccttcgccccccattctcccgtggctttgccgctgcgatcaatctgaagctgaagatttgcaaggactcgtcggtgcgcaaggcgctagttcgtgaggccagcctgttgggggctgccaaggttgtcctcggcgtcgccaagaagaggcgtgcgatctcgtcctcgcattcagttgcaaagtactgcgcaaagaagctgcccgcaaagtgcgcggtcctcgccgtgagcaatggcaagatcgagttccggagggagtcgagtgcccattcaggcaaggtctcagcagaggttcttccgtgtgctgacgatgagatgtattgtgcagtgcggttccaagcccatgaacctaaggatggtggtgagggtggcaccacgcatgatgttggcaccaagggaagtgaattggaggacaccatcaaacacgaacagcttgtctcaagcgtggtcctccctgcggatttggcaacggatcaggtcaagatcgacgcagatctttctagcagcaaggctgtagaatcaactgtcaaacagagagatgagactgccgagcttccaggtaagggtgccagtgtgttgtactgcgtgcttcctgggagaagtagcgattctgctgcaagtacatctagtaggcaagaccaggattcagtggatgtgctgccatctgaaggcaccggggagctatattgcttattgccccccaggaatggccattcagtcaggagttctggagattctaagcgttcaaatgcgagccaaagagatgatagaccagccaatccatcgcctgaaggagatggcgatctggactgccggctgccgaggagtggacgacccagtaggagttcttctgccgtatccatggaagctgaggactcgccgaaagacgctgcacgaaatgctgaaacaccctctagttctccaatgtcactgagacggatgatagaaggaagatctgatcgcagccgccttcctagaagaatctttagacatcatagaagctcatctcttgaatgggcaaaaatctcgatggttcaatgggcgacgagacttccgagccggtacacttcagtgcacacagatagcagatcattgaaacaggatacaagcccaaggctgaactgtggttctgaacccactacaacagctgttgagccggaatcatcatcgatgttttctttcgctttctatggtgtagcatggcctcccagtgaattggaatcgcttcgagagaagtattcttcagtctgtaggctgttcagttatgaagaactgaaacttgcaactggcaactactcacctgatatgttgattgggaagggtggaaccagccaagttttcaaggcacgactcgacgatggaacgttttgtgccgtaaagattctgaaaccctcggtcgatgcagtacatgagtttgttacggagatcgagaccgtgagcagcctgcagcacgagaacatcgttgcgctgaggggattcagcttcgagaactacaaccttgtgctggcatacgattacatgccccaagggagcctggacagagctcttcacgggaagaatggtggcacggagtttcttgtttgggagagaagaattaggatagcgatcgacgtcgcaagagcagttgaattcctccatcttggcggtgtcacccagtctgtgatccatggagatgttaagtcttcgaatatcctcctttcagaggattttggggcacggctgtgtgatttcgggttagcgaagcgagtgtctgcatcgactccccacctaacgtgtaccgacatcaccgggactttcgggtacatggcgcccgagtacttttcacacgggacggtcaacgagaagatcgatgtctatgcgttcggagtcgttctgctggagatcatctcaggaaggagacccattacgccgggaagcacgaagggacaagagagcctggttggttgggccaagcctttgctgtgcggcggcggaattagagagctggttgatccgttgctggggaggaacgagtacgactgcgatgagatggagaggatgacgctcgccgcctcgctttgcacgaggacatcttctcgctctcggcctgagatgtcactggtcctgagactcctccagggcgacgacgaggcgatcggctgggcgagggcgcaggtcacggccagcttcgacgggtccgacgaggaggctgcggcggcggcccctgacctgaacatgcagtcgcatcttaacctcgcgctcctcggggtggaggtggaggacgacgacacgctgtcgcagtcgcagtcgcaatgcagcagcaccgtggacacctcggccgacggctactggagccggtcctccagtttcgactagcgctgcggtctgcggggtctcttttagtagtagtagtagtacgtttatgtacagttggtggcaattggtgagttgattgttcttgtgagtgttgctaatttattagcttggagttggttctgttgtgtggtagaagatcttaaaaaattagttcagattcagcagagtgttgatggcaatgcaatttgttcagattcgtgttattaccatctttgcgggccatgattccaaccaagttgcattgcatttctcttgtgggcctgaacgcagcgcagcgtgttgggcctaaactgcctgtgaaaggctcgctgccagaaaacagaggtcggacgtcggagttcaacgcgcttgtgagcgaaggc

SEQ ID NO: 11756 - DNA, 3260 bp, Zea Mays
gacgcgctcacagagtcacagtacagagactagagcgagagagcaacgacgagcaacggaacaagagggcgcgcgcggcgaggtggaggagcaggaggcgacggttgccaggcaggagcgccggtccaacggaataggacgcgggcgcaagtcggggggcagggcgaggggtcccatactcccatccactgcctggtcgcgcacgccgcagcatccgcccccgccctgtgagccgccgtgcagatgaaggtgtcttccaggaggaagcagccgccgccgccgccgcagcagcagcagcgggaagaggccgaggccatggacgccgatgctggcgtccaggaggtggaggaggaggaggcggcggggtgctcggggaaggcgcccgaggcggagggcaggacagtggtggtcggcgtgcgcgcggacgccgagagccgggcgctgctcacctgggtgctcgtcaatgtagccgcgcccttggaccgcgtcgtcgccgtccacgtcgcgctgccgtccgccgcggaggcgcccgacttcgacgccatgctcgccgtctaccagggcttctgcaacctcaagcagatcaatctgaagctgaagatttgcaaggactcgtcggtgcgcaaggcgctagttcgtgaggccagcctgttgggggctgccaaggttgtcctcggcgtcgccaagaagaggcgtgcgatctcgtcctcgcattcagttgcaaagtactgcgcaaagaagctgcccgcaaagtgcgcggtcctcgccgtgagcaatggcaagatcgagttccggagggagtcgagtgcccattcaggcaaggtctcagcagaggttcttccgtgtgctgacgatgagatgtattgtgcagtgcggttccaagcccatgaacctaaggatggtggtgagggtggcaccacgcatgatgttggcaccaagggaagtgaattggaggacaccatcaaacacgaacagcttgtctcaagcgtggtcctccctgcggatttggcaacggatcaggtcaagatcgacgcagatctttctagcagcaaggctgtagaatcaactgtcaaacagagagatgagactgccgagcttccaggtaagggtgccagtgtgttgtactgcgtgcttcctgggagaagtagcgattctgctgcaagtacatctagtaggcaagaccaggattcagtggatgtgctgccatctgaaggcaccggggagctatattgcttattgccccccaggaatggccattcagtcaggagttctggagattctaagcgttcaaatgcgagccaaagagatgatagaccagccaatccatcgcctgaaggagatggcgatctggactgccggctgccgaggagtggacgacccagtaggagttcttctgccgtatccatggaagctgaggactcgccgaaagacgctgcacgaaatgctgaaacaccctctagttctccaatgtcactgagacggatgatagaaggaagatctgatcgcagccgccttcctagaagaatctttagacatcatagaagctcatctcttgaatgggcaaaaatctcgatggttcaatgggcgacgagacttccgagccggtacacttcagtgcacacagatagcagatcattgaaacaggatacaagcccaaggctgaactgtggttctgaacccactacaacagctgttgagccggaatcatcatcgatgttttctttcgctttctatggtgtagcatggcctcccagtgaattggaatcgcttcgagagaagtattcttcagtctgtaggctgttcagttatgaagaactgaaacttgcaactggcaactactcacctgatatgttgattgggaagggtggaaccagccaagttttcaaggcacgactcgacgatggaacgttttgtgccgtaaagattctgaaaccctcggtcgatgcagtacatgagtttgttacggagatcgagaccgtgagcagcctgcagcacgagaacatcgttgcgctgaggggattcagcttcgagaactacaaccttgtgctggcatacgattacatgccccaagggagcctggacagagctcttcacgggaagaatggtggcacggagtttcttgtttgggagagaagaattaggatagcgatcgacgtcgcaagagcagttgaattcctccatcttggcggtgtcacccagtctgtgatccatggagatgttaagtcttcgaatatcctcctttcagaggattttggggcacggctgtgtgatttcgggttagcgaagcgagtgtctgcatcgactccccacctaacgtgtaccgacatcaccgggactttcgggtacatggcgcccgagtacttttcacacgggacggtcaacgagaagatcgatgtctatgcgttcggagtcgttctgctggagatcatctcaggaaggagacccattacgccgggaagcacgaagggacaagagagcctggttggttgggccaagcctttgctgtgcggcggcggaattagagagctggttgatccgttgctggggaggaacgagtacgactgcgatgagatggagaggatgacgctcgccgcctcgctttgcacgaggacatcttctcgctctcggcctgagatgtcactggtcctgagactcctccagggcgacgacgaggcgatcggctgggcgagggcgcaggtcacggccagcttcgacgggtccgacgaggaggctgcggcggcggcccctgacctgaacatgcagtcgcatcttaacctcgcgctcctcggggtggaggtggaggacgacgacacgctgtcgcagtcgcagtcgcaatgcagcagcaccgtggacacctcggccgacggctactggagccggtcctccagtttcgactagcgctgcggtctgcggggtctcttttagtagtagtagtagtacgtttatgtacagttggtggcaattggtgagttgattgttcttgtgagtgttgctaatttattagcttggagttggttctgttgtgtggtagaagatcttaaaaaattagttcagattcagcagagtgttgatggcaatgcaatttgttcagattcgtgttattaccatctttgcgggccatgattccaaccaagttgcattgcatttctcttgtgggcctgaacgcagcgcagcgtgttgggcctaaactgcctgtgaaaggctcgctgccagaaaacagaggtcggacgtcggagttcaacgcgcttgtgagcgaaggc

SEQ ID NO: 11757 - DNA, 1351 bp, Zea Mays
cattttcaagcctgtatgtcaccatgctaggggattgaagaagcacttgaagaggctcaatgcgcccaagcattggatgctcgacaagcttggcggagcttgctcccaagccatcttctggacctcacaagtccagggagtgccttcctctgatcctcatcatcaggaacaggctcaagtatgctctgaactaccgtgaggtcatttctatcctgatgcaacgccatgtacttgttgatggcaaggtcaggactgacaagacctaccctgctgggttcatggatgtcatttccatccccaagacaatggagaactacaggctgctttatgacaccaagggccgcttccgtcttcacccaatcagggatgaggatgccaagttcaagctctgcaaggtgaggtctgttcagtttggccagaagggcatcccctacctgaacacctacgacggccgcaccatccgctaccccgacccgctcatcaaggccaacgacaccatcaagatcgatctggagaccaacaagatcatggacttcatcaagtttgacgtcggcaacgtggtcatggtgaccggcgggaggaacaccgggcgtgtaggtgtgatcaagaacagggagaagcacaagggcggcttcgataccatccacgtcgaggactccatgggccaccagttcgccacccgcatgggcaacgtgttcaccatcggcaagggcaacaagccgtgggtgagcctgcccaagggcaagggtatcaagctcagcatcatcgaggagcagaggaggcgcgactttgctgcccaggctgctgccaaggcataagttctctgaatgtgctgcttggagctttttgctatgtctagtttaatttttatctgcaaggatatagagctaccttcccaagactttatcatcatgttttgttgcttttggttcttgaacagcgtttgcagcttagctgtaatgctttaattcgactttctatatattgttgaaccgtgttgtcgacaccatgacagcttgttttgcttctatgtttttgcttgagctacggtggttgtttggaatcttgtatggtggtttgttgtaattctgtcaatcggatcaggaactggccacggcactggatgccactaaccacgtccgtggtggtaccagacgccaatgaccatgctcttgttttgtccgagttggggctggtgctgctcgtctgcgggcgtcctggagaaagccagcgcgtcgtccgcggcaggtgctgaatgactgactgaggagcccggagcgtgttcatgcaagtttgcactggatcttttttttcaatcacaatgtactgtggtagtcgaactcctccatcc

SEQ ID NO: 11758 - DNA, 676 bp, Zea Mays
cagtagtgtgctattctagttccaccagacttcccaaaatagtcttggacctgcacatcttaactttttgaaccattgacaggtagccctactactcgctgggcatcagttgcccttggagctggtgtggggataggggctgcatacactgaatgctcatacttattcaatggtgctccaaagtgttcacccaaagtctcaactattacctctgcacactctgatgggggagataagtaaacccttgctgttggattggtccatctcggtggagtttttgtatgtgtgaagtaccggttgtttcatgctggatattgcgctacttgtggccatagtatgtcattgaagctagatgcgcctcacttgagagttttgttgcaaacctattccaattgtggtctgatgacccctggcaaagagcttttgcaagctgacgttgaaacggtggcttggtgaccgctaataaattttccatcatgtgaacttgttctcagaatgttttgcgccttacatgagtaatatgcttttacacattgcacgacccgtttctggggctattgcctaagggcctgttcgcttctttcagaacgacgggtcggaataatttcctgttgaaactattcactaatttatatagtttttgataagccggaacagtttcatgtgcattccaaac

SEQ ID NO: 11759 - DNA, 1373 bp, Zea Mays
cttgtacacgcctccgccacccgacaaactactcaataaccctagctaaacccccacgccgccgcggcgacctcctccgccggcgggatggacagcctcaggggagtcaagttgccgggcgtgccgaagggcgggagtgcgctcgtgaaggtggcgctgctcggcggcgcggggctctacgccgtcctcaacagcttctacaacgtcgagggcggacaccgcgccatcgtcttcaaccgcctcgaggggatcaaggacaaggtgtaccccgaaggaactcacctgatgatcccgtggatcgaaaggccgatcatctacgacgtccgcgcccgacccaacctcgtcgagagcacgtccggaagccgcgacctccagatgctacctaaaatctacaggaacctgggggagaacttcaatgagagagttctgccttcaatcattcatgaaacactcaaagctgtggttgctcaatacaatgccagccagctgatcacccagagagaggctgtgagcagggagattaggaagattctgactgagagggccaacaacttcaatattgctctggatgatgtgtccatcacaagcctcagctttggaaaagagtttactcatgccattgaagccaagcaggttgctgcacaagaagctgagcgtgccaagttcattgttgagaaggctgagcaggacaagcgcagtgcagttatcagggcacagggtgaggctaagagcgctgagttgattggccaagccattgccaacaaccccgccttcctggctctgagacagattgaagctgccagggagatctcccacaccatggcggcctccagcaacaaggtgttccttgattccagggaccttttgcttggtcttcagcagctgaacgtggggggcaagcaaaagaagtgaagcggtcgtccccaggccatcgcggatgagagtagtttcaggcgatggttttatctgttacagaatgcgcatgcgcgggaatgaacaaagtggcaccatgttgcagtctgtatgtactgacaagtttgtctatcgatctttgattctctgctcttgtaagtcgtgactgatgaatctgttgttgcaattgccttcctggaggcttgctctgatgcgtgtaacagccattccattgctcgtagtcgcagacgtaattcagcgtgtgagttcaatcaggacccgtgtgactggttgtggcatggtggtagcctggcccgacttgtctagtatgtggagccagatttcatatatccaggctaggctcatgctcatatttatgtttggttgtttgcgttcaggtcggataaagatatgtgtttggctgtatgcatcaataccaagatcaaataaagtaaataaat

SEQ ID NO: 11760 - DNA, 1044 bp, Zea Mays
tccgcctccacttgtacacgcctccgccacccgacaaactactcaataaccctagctaaacccccacgccgccgcggcgacctcctccgccggcgggatggacagcctcaggggagtcaagttgccgggcgtgccgaagggcgggagtgcgctcgtgaaggtggcgctgctcggcggcgcggggctctacgccgtcctcaacagcttctacaacgtcgagggcggacaccgcgccatcgtcttcaaccgcctcgaggggatcaaggacaaggtgtaccccgaaggaactcacctgatgatcccgtggatcgaaaggccgatcatctacgacgtccgcgcccgacccaacctcgtcgagagcacgtccggaagccgcgacctccagatgggtgaggctaagagcgctgagttgattggccaagccattgccaacaaccccgccttcctggctctgagacagattgaagctgccagggagatctcccacaccatggcggcctccagcaacaaggtgttccttgattccagggaccttttgcttggtcttcagcagctgaacgtggggggcaagcaaaagaagtgaagcggtcgtccccaggccatcgcggatgagagtagtttcaggcgatggttttatctgttacagaatgcgcatgcgcgggaatgaacaaagtggcaccatgttgcagtctgtatgtactgacaagtttgtctatcgatctttgattctctgctcttgtaagtcgtgactgatgaatctgttgttgcaattgccttcctggaggcttgctctgatgcgtgtaacagccattccattgctcgtagtcgcagacgtaattcagcgtgtgagttcaatcaggacccgtgtgactggttgtggcatggtggtagcctggcccgacttgtctagtatgtggagccagatttcatatatccaggctaggctcatgctcatatttatgtttggttgtttgcgttcaggtcggataaagatatgtgtttggctgtatgcatcaataccaagatcaaataaagtaaataaat

SEQ ID NO: 11761 - DNA, 1386 bp, Zea Mays
gcactctttcgtgcagcggaggaaagaatcgaggcccttcttgaccgtccgatgaaagatccaacgcccacgatccccgccgcccgcttcacatagccacgccgcctcccctgtccctttcattggccttccgcctccacttgtacacgcctccgccacccgacaaactactcaataaccctagctaaacccccacgccgccgcggcgacctcctccgccggcgggatggacagcctcaggggagtcaagttgccgggcgtgccgaagggcgggagtgcgctcgtgaaggtggcgctgctcggcggcgcggggctctacgccgtcctcaacagcttctacaacgtcgagggcggacaccgcgccatcgtcttcaaccgcctcgaggggatcaaggacaaggtgtaccccgaaggaactcacctgatgatcccgtggatcgaaaggccgatcatctacgacgtccgcgcccgacccaacctcgtcgagagcacgtccggaagccgcgacctccagatggctgtgagcagggagattaggaagattctgactgagagggccaacaacttcaatattgctctggatgatgtgtccatcacaagcctcagctttggaaaagagtttactcatgccattgaagccaagcaggttgctgcacaagaagctgagcgtgccaagttcattgttgagaaggctgagcaggacaagcgcagtgcagttatcagggcacagggtgaggctaagagcgctgagttgattggccaagccattgccaacaaccccgccttcctggctctgagacagattgaagctgccagggagatctcccacaccatggcggcctccagcaacaaggtgttccttgattccagggaccttttgcttggtcttcagcagctgaacgtggggggcaagcaaaagaagtgaagcggtcgtccccaggccatcgcggatgagagtagtttcaggcgatggttttatctgttacagaatgcgcatgcgcgggaatgaacaaagtggcaccatgttgcagtctgtatgtactgacaagtttgtctatcgatctttgattctctgctcttgtaagtcgtgactgatgaatctgttgttgcaattgccttcctggaggcttgctctgatgcgtgtaacagccattccattgctcgtagtcgcagacgtaattcagcgtgtgagttcaatcaggacccgtgtgactggttgtggcatggtggtagcctggcccgacttgtctagtatgtggagccagatttcatatatccaggctaggctcatgctcatatttatgtttggttgtttgcgttcaggtcggataaagatatgtgtttggctgtatgcatcaataccaagatcaaataaagtaaataaat

SEQ ID NO: 11762 - DNA, 942 bp, Zea Mays
gttgggtctatccatctgtcactgtctgaacaagttctgtcctctaatagtgctatgaaaatgaggaacaatcggaaacgtcgctcgctctggctgaggtaactgaaaaggcactgagcatccaaaaccagcacaacgacgctgtcctttaccaaggaagagcaatgtcctcaatcgactacctcaaggcacgttcctaccgtggtctaactggagaatacgaaggcccagttcctgattcagtcttggtaggcagaatgggcagggcagctggttacagtgacgagaaaactgagagcgcacagtgaaggtagcattatgcgagttgatcagttgctacaggctccccttttttggcggtgaaaaaccaggagggtgcacaatgattcaatcatgcagcctggatggtttaccaacctgtgtacttttgtttaggtgggctaacaggtttatagacaattgtcaacatttttttattgttgagaatacctgtttctagtcccagggaacaatactttggatgctgttcaatcaggtggcttttttgctattaggaactactagtgtgtgcctaatcagtttgtatgcaatagtgagagctatctcactgatgtggggaagcctttttttttctttctaacaactgtggcatgtgttcagaagatgagatgtacactattcacaacatgcactgtactcatccattatgtttgtacaagacaccaaatttactctgcacattcttatttattggtaccggtagtagttcccaaagcacaatatggtaaatcttccgatcttaaattgtctccgaaagtaagtttctgtaagggctagtttggaagtctaaaaaccgaaagggattagaggggataaaatcatctttttattcaaaattgaataaggaggagattttagcttctccaatcccctctgtttttg

SEQ ID NO: 11763 - DNA, 1435 bp, Zea Mays
cctttacaactgcaactgcttacatttcccattctgtaattgatcatcttttgcattagatatgatgcaatagaaaatcaactcacagcggacgtctctcatctgatgaaaattcttaggcgaagatattacctcgtggagaaggcgaaggatgcaaatattattggcattttggtgggaactctgggtgtagctggttatcttcatataatcgaacaaatgaaagatctgatcaaggccgctggaaagaaatcctatacattggtcatgggtaggcctaattctgccaagcttgcgaattttccagagtgcgaagtttttatttatgtttcttgtgcccaaactgctctgctggatagcaaggattttttagctccagttattacaccttttgaagctgtactagcttttggcagagagtggaccggagagtatcttttggatttcaaggatttgatcacttcagagaaacaagaagctgcgagcacaacaggagaagcacgcttttcttttatcaaaggtgtctatgtggaagataattgccctcaagaaaatgaggaacaatcggaaacgtcgctcgctctggctgaggtaactgaaaaggcactgagcatccaaaaccagcacaacgacgctgtcctttaccaaggaagagcaatgtcctcaatcgactacctcaaggcacgttcctaccgtggtctaactggagaatacgaaggcccagttcctgattcagtcttggtaggcagaatgggcagggcagctggttacagtgacgagaaaactgagagcgcacagtgaaggtagcattatgcgagttgatcagttgctacaggctccccttttttggcggtgaaaaaccaggagggtgcacaatgattcaatcatgcagcctggatggtttaccaacctgtgtacttttgtttaggtgggctaacaggtttatagacaattgtcaacatttttttattgttgagaatacctgtttctagtcccagggaacaatactttggatgctgttcaatcaggtggcttttttgctattaggaactactagtgtgtgcctaatcagtttgtatgcaatagtgagagctatctcactgatgtggggaagcctttttttttctttctaacaactgtggcatgtgttcagaagatgagatgtacactattcacaacatgcactgtactcatccattatgtttgtacaagacaccaaatttactctgcacattcttatttattggtaccggtagtagttcccaaagcacaatatggtaaatcttccgatcttaaattgtctccgaaagtaagtttctgtaagggctagtttggaagtctaaaaaccgaaagggattagaggggataaaatcatctttttattcaaaattgaataaggaggagattttagcttctccaatcccctctgtttttg

SEQ ID NO: 11764 - DNA, 1446 bp, Zea Mays
cctctcctttacaactgcaactgcttacatttcccattctgtaattgatcatcttttgcattagatatgatgcaatagaaaatcaactcacagcggacgtctctcatctgatgaaaattcttaggcgaagatattacctcgtggagaaggcgaaggatgcaaatattattggcattttggtgggaactctgggtgtagctggttatcttcatataatcgaacaaatgaaagatctgatcaaggccgctggaaagaaatcctatacattggtcatgggtaggcctaattctgccaagcttgcgaattttccagagtgcgaagtttttatttatgtttcttgtgcccaaactgctctgctggatagcaaggattttttagctccagttattacaccttttgaagctgtactagcttttggcaggggaagagagtggaccggagagtatcttttggatttcaaggatttgatcacttcagagaaacaagaagctgcgagcacaacaggagaagcacgcttttcttttatcaaaggtgtctatgtggaagataattgccctcaagaaaatgaggaacaatcggaaacgtcgctcgctctggctgaggtaactgaaaaggcactgagcatccaaaaccagcacaacgacgctgtcctttaccaaggaagagcaatgtcctcaatcgactacctcaaggcacgttcctaccgtggtctaactggagaatacgaaggcccagttcctgattcagtcttggtaggcagaatgggcagggcagctggttacagtgacgagaaaactgagagcgcacagtgaaggtagcattatgcgagttgatcagttgctacaggctccccttttttggcggtgaaaaaccaggagggtgcacaatgattcaatcatgcagcctggatggtttaccaacctgtgtacttttgtttaggtgggctaacaggtttatagacaattgtcaacatttttttattgttgagaatacctgtttctagtcccagggaacaatactttggatgctgttcaatcaggtggcttttttgctattaggaactactagtgtgtgcctaatcagtttgtatgcaatagtgagagctatctcactgatgtggggaagcctttttttttctttctaacaactgtggcatgtgttcagaagatgagatgtacactattcacaacatgcactgtactcatccattatgtttgtacaagacaccaaatttactctgcacattcttatttattggtaccggtagtagttcccaaagcacaatatggtaaatcttccgatcttaaattgtctccgaaagtaagtttctgtaagggctagtttggaagtctaaaaaccgaaagggattagaggggataaaatcatctttttattcaaaattgaataaggaggagattttagcttctccaatcccctctgtttttg

SEQ ID NO: 11765 - DNA, 2271 bp, Zea Mays
cgatggtctcgtactcttgtcacgttccttcctgactgcccccacttctcctccggcggcgcggcggcgggttacctcccaacagcccgaccatggaagccgacatcgctttcaggtatgagatcccccggaccgcccagttcctccgcgacggcgcctacaccagggtcgcgctccagttccccgacgagatgctgaaggatgctgctgcggtggcgagggcgttgcggcgggagcttgcctccggcggcgccgacagtggggttagggtgttcgtgatggccgacacggcgtacaactcctgctgcgtggacgaggtgggcgcgtcccacatcgatgcgcagtgcgtcgtccactacggccacgcctgcatgagcccaacatcaaatttgccagctttctttgtatttgggaaggcaccgttggatgtccacgcatgtgccggcacattgctggagtgctcaaggaaaagcaataagcgcattctggttttatatggactagagtacgcatatgcattggatgaccttagacagactttcatggagtcatgtaaatcaaattctggcaatcatgaagtccagtatgcagaagttctatgttcagttatgagtccatcatcaagtactacagaagaaaacaaaattcctcagtcgagtggcccctcttgtaatggggatatctccagaaacagcgagtcggcaacattcctgaataatcgtaatggcatggaatgttccagttccacacaaaagtacagccttgctggcatgacatggaatatttcagttgaggagaaaatggaggactatttcatattttggattggacaagatagctcagcatttgccaacatagtgcttaccttcaataaatgtgaaatagttagatatgatgcaatagaaaatcaactcacagcggacgtctctcatctgatgaaaattcttaggcgaagatattacctcgtggagaaggcgaaggatgcaaatattattggcattttggtgggaactctgggtgtagctggttatcttcatataatcgaacaaatgaaagatctgatcaaggccgctggaaagaaatcctatacattggtcatgggtaggcctaattctgccaagcttgcgaattttccagagtgcgaagtttttatttatgtttcttgtgcccaaactgctctgctggatagcaaggattttttagctccagttattacaccttttgaagctgtactagcttttggcaggggaagagagtggaccggagagtatcttttggatttcaaggatttgatcacttcagagaaacaagaagctgcgagcacaacaggagaagcacgcttttcttttatcaaaggtgtctatgtggaagataattgccctcaagaaaatgaggaacaatcggaaacgtcgctcgctctggctgaggtaactgaaaaggcactgagcatccaaaaccagcacaacgacgctgtcctttaccaaggaagagcaatgtcctcaatcgactacctcaaggcacgttcctaccgtggtctaactggagaatacgaaggcccagttcctgattcagtcttggtaggcagaatgggcagggcagctggttacagtgacgagaaaactgagagcgcacagtgaaggtagcattatgcgagttgatcagttgctacaggctccccttttttggcggtgaaaaaccaggagggtgcacaatgattcaatcatgcagcctggatggtttaccaacctgtgtacttttgtttaggtgggctaacaggtttatagacaattgtcaacatttttttattgttgagaatacctgtttctagtcccagggaacaatactttggatgctgttcaatcaggtggcttttttgctattaggaactactagtgtgtgcctaatcagtttgtatgcaatagtgagagctatctcactgatgtggggaagcctttttttttctttctaacaactgtggcatgtgttcagaagatgagatgtacactattcacaacatgcactgtactcatccattatgtttgtacaagacaccaaatttactctgcacattcttatttattggtaccggtagtagttcccaaagcacaatatggtaaatcttccgatcttaaattgtctccgaaagtaagtttctgtaagggctagtttggaagtctaaaaaccgaaagggattagaggggataaaatcatctttttattcaaaattgaataaggaggagattttagcttctccaatcccctctgtttttg

SEQ ID NO: 11766 - DNA, 2385 bp, Zea Mays
ctctaaaattataaagctctccaaaatcctcagccaagcgtctcgatggtctcgtactcttgtcacgttccttcctgactgcccccacttctcctccggcggcgcggcggcgggttacctcccaacagcccgaccatggaagccgacatcgctttcaggtatgagatcccccggaccgcccagttcctccgcgacggcgcctacaccagggtcgcgctccagttccccgacgagatgctgaaggatgctgctgcggtggcgagggcgttgcggcgggagcttgcctccggcggcgccgacagtggggttagggtgttcgtgatggccgacacggcgtacaactcctgctgcgtggacgaggtgggcgcgtcccacatcgatgcgcagtgcgtcgtccactacggccacgcctgcatgagcccaacatcaaatttgccagctttctttgtatttgggaaggcaccgttggatgtccacgcatgtgccggcacattgctggagtgctcaaggaaaagcaataagcgcattctggttttatatggactagagtacgcatatgcattggatgaccttagacagactttcatggagtcatgtaaatcaaattctggcaatcatgaagtccagtatgcagaagttctatgttcagttatgagtccatcatcaagtactacagaagaaaacaaaattcctcagtcgagtggcccctcttgtaatggggatatctccagaaacagcgagtcggcaacattcctgaataatcgtaatggcatggaatgttccagttccacacaaaagtacagccttgctggcatgacatggaatatttcagttgaggagaaaatggaggactatttcatattttggattggacaagatagctcagcatttgccaacatagtgcttaccttcaataaatgtgaaatagttagatatgatgcaatagaaaatcaactcacagcggacgtctctcatctgatgaaaattcttaggcgaagatattacctcgtggagaaggcgaaggatgcaaatattattggcattttggtgggaactctgggtgtagaaattttgctggaaacgtttacattttgtgatgtggtgcattgcactgcactgcactccttcatgatgcagctggttatcttcatataatcgaacaaatgaaagatctgatcaaggccgctggaaagaaatcctatacattggtcatgggtaggcctaattctgccaagcttgcgaattttccagagtgcgaagtttttatttatgtttcttgtgcccaaactgctctgctggatagcaaggattttttagctccagttattacaccttttgaagctgtactagcttttggcaggggaagagagtggaccggagagtatcttttggatttcaaggatttgatcacttcagagaaacaagaagctgcgagcacaacaggagaagcacgcttttcttttatcaaaggtgtctatgtggaagataattgccctcaagaaaatgaggaacaatcggaaacgtcgctcgctctggctgaggtaactgaaaaggcactgagcatccaaaaccagcacaacgacgctgtcctttaccaaggaagagcaatgtcctcaatcgactacctcaaggcacgttcctaccgtggtctaactggagaatacgaaggcccagttcctgattcagtcttggtaggcagaatgggcagggcagctggttacagtgacgagaaaactgagagcgcacagtgaaggtagcattatgcgagttgatcagttgctacaggctccccttttttggcggtgaaaaaccaggagggtgcacaatgattcaatcatgcagcctggatggtttaccaacctgtgtacttttgtttaggtgggctaacaggtttatagacaattgtcaacatttttttattgttgagaatacctgtttctagtcccagggaacaatactttggatgctgttcaatcaggtggcttttttgctattaggaactactagtgtgtgcctaatcagtttgtatgcaatagtgagagctatctcactgatgtggggaagcctttttttttctttctaacaactgtggcatgtgttcagaagatgagatgtacactattcacaacatgcactgtactcatccattatgtttgtacaagacaccaaatttactctgcacattcttatttattggtaccggtagtagttcccaaagcacaatatggtaaatcttccgatcttaaattgtctccgaaagtaagtttctgtaagggctagtttggaagtctaaaaaccgaaagggattagaggggataaaatcatctttttattcaaaattgaataaggaggagattttagcttctccaatcccctctgtttttg

SEQ ID NO: 11767 - DNA, 2393 bp, Zea Mays
cttcgttgtacttgccaagaagaatagaatgactatgttttaaaaaactgaataaactctacaaccaaatgtatcctaaagtgctctaaaattataaagctctccaaaatcctcagccaagcgtctcgatggtctcgtactcttgtcacgttccttcctgactgcccccacttctcctccggcggcgcggcggcgggttacctcccaacagcccgaccatggaagccgacatcgctttcaggtatgagatcccccggaccgcccagttcctccgcgacggcgcctacaccagggtcgcgctccagttccccgacgagatgctgaaggatgctgctgcggtggcgagggcgttgcggcgggagcttgcctccggcggcgccgacagtggggttagggtgttcgtgatggccgacacggcgtacaactcctgctgcgtggacgaggtgggcgcgtcccacatcgatgcgcagtgcgtcgtccactacggccacgcctgcatgagcccaacatcaaatttgccagctttctttgtatttgggaaggcaccgttggatgtccacgcatgtgccggcacattgctggagtgctcaaggaaaagcaataagcgcattctggttttatatggactagagtacgcatatgcattggatgaccttagacagactttcatggagtcatgtaaatcaaattctggcaatcatgaagtccagtatgcagaagttctatgttcagttatgagtccatcatcaagtactacagaagaaaacaaaattcctcagtcgagtggcccctcttgtaatggggatatctccagaaacagcgagtcggcaacattcctgaataatcgtaatggcatggaatgttccagttccacacaaaagtacagccttgctggcatgacatggaatatttcagttgaggagaaaatggaggactatttcatattttggattggacaagatagctcagcatttgccaacatagtgcttaccttcaataaatgtgaaatagatatgatgcaatagaaaatcaactcacagcggacgtctctcatctgatgaaaattcttaggcgaagatattacctcgtggagaaggcgaaggatgcaaatattattggcattttggtgggaactctgggtgtagctggttatcttcatataatcgaacaaatgaaagatctgatcaaggccgctggaaagaaatcctatacattggtcatgggtaggcctaattctgccaagcttgcgaattttccagagtgcgaagtttttatttatgtttcttgtgcccaaactgctctgctggatagcaaggattttttagctccagttattacaccttttgaagctgtactagcttttggcaggggaagagagtggaccggagagtatcttttggatttcaaggatttgatcacttcagagaaacaagaagctgcgagcacaacaggagaagcacgcttttcttttatcaaaggtgtctatgtggaagataattgccctcaagaaaatgaggaacaatcggaaacgtcgctcgctctggctgaggtaactgaaaaggcactgagcatccaaaaccagcacaacgacgctgtcctttaccaaggaagagcaatgtcctcaatcgactacctcaaggcacgttcctaccgtggtctaactggagaatacgaaggcccagttcctgattcagtcttggtaggcagaatgggcagggcagctggttacagtgacgagaaaactgagagcgcacagtgaaggtagcattatgcgagttgatcagttgctacaggctccccttttttggcggtgaaaaaccaggagggtgcacaatgattcaatcatgcagcctggatggtttaccaacctgtgtacttttgtttaggtgggctaacaggtttatagacaattgtcaacatttttttattgttgagaatacctgtttctagtcccagggaacaatactttggatgctgttcaatcaggtggcttttttgctattaggaactactagtgtgtgcctaatcagtttgtatgcaatagtgagagctatctcactgatgtggggaagcctttttttttctttctaacaactgtggcatgtgttcagaagatgagatgtacactattcacaacatgcactgtactcatccattatgtttgtacaagacaccaaatttactctgcacattcttatttattggtaccggtagtagttcccaaagcacaatatggtaaatcttccgatcttaaattgtctccgaaagtaagtttctgtaagggctagtttggaagtctaaaaaccgaaagggattagaggggataaaatcatctttttattcaaaattgaataaggaggagattttagcttctccaatcccctctgtttttg

SEQ ID NO: 11768 - DNA, 1741 bp, Zea Mays
cagaagttggttttgacttgctacaagttttgtagtatatattgataaccttgcagtcacatatatttctagtcactgattaaatcctaacatggcacataacaaactatttagtagtcctgtatatgcaagctgctgctttgttagttgactcactatgttgcggagtaaagtatgtttgattattcttctttcatgaatgtaacagttgcattacagagtatacagtggttcaaaaaacaatcgaacaaagattcaaacttcaatttaaaactgcacagcatgctaggtggatagtaagagctgctatctttggtatcctatgggttctccttgggaaacgcgtgtggttcttccccaatataaatgcggaggagacaacttttagagaactcgttcgtttttggcctgaaaaggatgaaggagagcggccaaagtggacatcaagacttttctatgcccttgttgctctattggtgatattactgcttaggcatcatgctcctgacgaagcagctagagccaggtaccaaaagaaggtttctaacataatcgatgacgttcttgaatggtctccgaagttagctatttctggaatgattgaaaagcacactggggctaacattacagaagaaagcaattacaccaccagggcggcgagtagtcacatgcctccatccaccgaaggcaaagcttcagaagatatggacgttgatggggataccgaggctagcttagatgaaacccaagataatgaatatgctgatgatacaagatcaagcggagcttaaaatcagagttttttttgtttgagcaatctttgttgttgtgaatctgcagaattatatagatagcttactgctggcaacaaaagaaatcagggtgtcatgttttgatgttgcatccatatattccctgcaattggttgtgttctaaggtccccagagaataattctcatatacgacaaggccatctctgcattgccaaatggtcatccagccccctgacgccatgcttctagcacacgtagtttcccaagtactacatcatatatacacaactttttcgacgtaaaaaaaataattgttattcagctgaatgtgaattgaattggacactgctagctgtggtgcggtgaaccagtacaggaaggttttgactgttatcgcaataacaacacacacaaagtaatatacattgattaggatttgcaatccatctctacttgttgacatgcctcaaagcgtcagcagctaacaacaataacaagctgctaccatgcgtgagtgcttctatttttcacagggctctgatggtgcctacaccaaactgactgcacccaaaaggaagccagatccatttacatgatgttcgcatcaaactttcagtggatccagcctccagtgttagttgatgtccgtcggccgcacaaacgccacttctgtacacctgctctctttcctgtcaaccagtggttcctgttcacttctttccccgctcttgttcttcaagcttgttcctaagacctttcagtgcgcgcacaacctttgggttcagcttgtgctgcaggagttttccttgcaacgatgtcgacctgtcaattttaagttcacatagaacatatctaaatttagcgcaggcaattttttttccagctccacaggtggataggtgaaattctgtctttcatgcacagaggaaatcttccaaaacaaaatggtgcaccatcgttgcaaagat

SEQ ID NO: 11769 - DNA, 1716 bp, Zea Mays
gtctttatggattgatgtcaaacctatacttcgttagagctctggaacaagtgtttactgaaaatgatgggttttttgcttggatgtttctgaaaagaaggaccttgtggcagacaattctttcatttgtttggcctctttttgcactggcagtctgcttatttccagtttacccataccagtgcaagattgttgtactgtactcatgtgctggagctctacttttcattgtctccattcttttgcgtaaaatctccccccctctcctaaattaagagctgctatctttggtatcctatgggttctccttgggaaacgcgtgtggttcttccccaatataaatgcggaggagacaacttttagagaactcgttcgtttttggcctgaaaaggatgaaggagagcggccaaagtggacatcaagacttttctatgcccttgttgctctattggtgatattactgcttaggcatcatgctcctgacgaagcagctagagccaggtaccaaaagaaggtttctaacataatcgatgacgttcttgaatggtctccgaagttagctatttctggaatgattgaaaagcacactggggctaacattacagaagaaagcaattacaccaccagggcggcgagtagtcacatgcctccatccaccgaaggcaaagcttcagaagatatggacgttgatggggataccgaggctagcttagatgaaacccaagataatgaatatgctgatgatacaagatcaagcggagcttaaaatcagagttttttttgtttgagcaatctttgttgttgtgaatctgcagaattatatagatagcttactgctggcaacaaaagaaatcagggtgtcatgttttgatgttgcatccatatattccctgcaattggttgtgttctaaggtccccagagaataattctcatatacgacaaggccatctctgcattgccaaatggtcatccagccccctgacgccatgcttctagcacacgtagtttcccaagtactacatcatatatacacaactttttcgacgtaaaaaaaataattgttattcagctgaatgtgaattgaattggacactgctagctgtggtgcggtgaaccagtacaggaaggttttgactgttatcgcaataacaacacacacaaagtaatatacattgattaggatttgcaatccatctctacttgttgacatgcctcaaagcgtcagcagctaacaacaataacaagctgctaccatgcgtgagtgcttctatttttcacagggctctgatggtgcctacaccaaactgactgcacccaaaaggaagccagatccatttacatgatgttcgcatcaaactttcagtggatccagcctccagtgttagttgatgtccgtcggccgcacaaacgccacttctgtacacctgctctctttcctgtcaaccagtggttcctgttcacttctttccccgctcttgttcttcaagcttgttcctaagacctttcagtgcgcgcacaacctttgggttcagcttgtgctgcaggagttttccttgcaacgatgtcgacctgtcaattttaagttcacatagaacatatctaaatttagcgcaggcaattttttttccagctccacaggtggataggtgaaattctgtctttcatgcacagaggaaatcttccaaaacaaaatggtgcaccatcgttgcaaagat

SEQ ID NO: 11770 - DNA, 2564 bp, Zea Mays
gtttgaccaagtgtctttgatgtaatttgtttgtctttatggattgatgtcaaacctatacttcgttagagctctggaacaagtgtttactgaaaatgatgggttttttgcttggatgtttctgaaaagaaggaccttgtggcagacaattctttcatttgtttggcctctttttgcactggcagtctgcttatttccagtttacccataccagtgcaagattgttgtactgtactcatgtgctggagctctacttttcattgtctccattcttttgcgtaaaatctccccccctctcctaaatgtattttcattcacgacatacattatacttaagtagacactttcaaattacattttagtcattaggcatatttgagtaacaagctacaatttattgcctgtgtagtgttgtgcgcacttccaacgtcatacggtcatacccgtcatatgcatatttgattaatgaatactatttacctgctgtttataagataacagctatcagaagttggttttgacttgctacaagttttgtagtatatattgataaccttgcagtcacatatatttctagtcactgattaaatcctaacatggcacataacaaactatttagtagtcctgtatatgcaagctgctgctttgttagttgactcactatgttgcggagtaaagtatgtttgattattcttctttcatgaatgtaacagttgcattacagagtatacagtggttcaaaaaacaatcgaacaaagattcaaacttcaatttaaaactgcacagcatgctaggtggataggtatcattcacctccagcctccaccaaactttctgagttcggttgtttttgaagtgatgtttcgacaatagtgtggaactcacacttcagtgcatcaatatgaatgtttagagaaaaggaaaaactggggggatgggttcagactcaagagttttggtgtgtgtaggaaccatgagctcaacattagagtatcattcacttgtttcattacaataagttatctgtttttaaacctttccatttcaagcacatcctaacttctcttttttgccctctatagtaatccctgcttgtctaatatttccaatgtaatttcagtaagagctgctatctttggtatcctatgggttctccttgggaaacgcgtgtggttcttccccaatataaatgcggaggagacaacttttagagaactcgttcgtttttggcctgaaaaggatgaaggagagcggccaaagtggacatcaagacttttctatgcccttgttgctctattggtgatattactgcttaggcatcatgctcctgacgaagcagctagagccaggtaccaaaagaaggtttctaacataatcgatgacgttcttgaatggtctccgaagttagctatttctggaatgattgaaaagcacactggggctaacattacagaagaaagcaattacaccaccagggcggcgagtagtcacatgcctccatccaccgaaggcaaagcttcagaagatatggacgttgatggggataccgaggctagcttagatgaaacccaagataatgaatatgctgatgatacaagatcaagcggagcttaaaatcagagttttttttgtttgagcaatctttgttgttgtgaatctgcagaattatatagatagcttactgctggcaacaaaagaaatcagggtgtcatgttttgatgttgcatccatatattccctgcaattggttgtgttctaaggtccccagagaataattctcatatacgacaaggccatctctgcattgccaaatggtcatccagccccctgacgccatgcttctagcacacgtagtttcccaagtactacatcatatatacacaactttttcgacgtaaaaaaaataattgttattcagctgaatgtgaattgaattggacactgctagctgtggtgcggtgaaccagtacaggaaggttttgactgttatcgcaataacaacacacacaaagtaatatacattgattaggatttgcaatccatctctacttgttgacatgcctcaaagcgtcagcagctaacaacaataacaagctgctaccatgcgtgagtgcttctatttttcacagggctctgatggtgcctacaccaaactgactgcacccaaaaggaagccagatccatttacatgatgttcgcatcaaactttcagtggatccagcctccagtgttagttgatgtccgtcggccgcacaaacgccacttctgtacacctgctctctttcctgtcaaccagtggttcctgttcacttctttccccgctcttgttcttcaagcttgttcctaagacctttcagtgcgcgcacaacctttgggttcagcttgtgctgcaggagttttccttgcaacgatgtcgacctgtcaattttaagttcacatagaacatatctaaatttagcgcaggcaattttttttccagctccacaggtggataggtgaaattctgtctttcatgcacagaggaaatcttccaaaacaaaatggtgcaccatcgttgcaaagat

SEQ ID NO: 11771 - DNA, 1727 bp, Zea Mays
ccattcactcgtctgtttatcccatttgattggatgtttagctcatttaatggaccttgtagcctgaataatggctaaatggaacaagtgtttactgaaaatgatgggttttttgcttggatgtttctgaaaagaaggaccttgtggcagacaattctttcatttgtttggcctctttttgcactggcagtctgcttatttccagtttacccataccagtgcaagattgttgtactgtactcatgtgctggagctctacttttcattgtctccattcttttgctaagagctgctatctttggtatcctatgggttctccttgggaaacgcgtgtggttcttccccaatataaatgcggaggagacaacttttagagaactcgttcgtttttggcctgaaaaggatgaaggagagcggccaaagtggacatcaagacttttctatgcccttgttgctctattggtgatattactgcttaggcatcatgctcctgacgaagcagctagagccaggtaccaaaagaaggtttctaacataatcgatgacgttcttgaatggtctccgaagttagctatttctggaatgattgaaaagcacactggggctaacattacagaagaaagcaattacaccaccagggcggcgagtagtcacatgcctccatccaccgaaggcaaagcttcagaagatatggacgttgatggggataccgaggctagcttagatgaaacccaagataatgaatatgctgatgatacaagatcaagcggagcttaaaatcagagttttttttgtttgagcaatctttgttgttgtgaatctgcagaattatatagatagcttactgctggcaacaaaagaaatcagggtgtcatgttttgatgttgcatccatatattccctgcaattggttgtgttctaaggtccccagagaataattctcatatacgacaaggccatctctgcattgccaaatggtcatccagccccctgacgccatgcttctagcacacgtagtttcccaagtactacatcatatatacacaactttttcgacgtaaaaaaaataattgttattcagctgaatgtgaattgaattggacactgctagctgtggtgcggtgaaccagtacaggaaggttttgactgttatcgcaataacaacacacacaaagtaatatacattgattaggatttgcaatccatctctacttgttgacatgcctcaaagcgtcagcagctaacaacaataacaagctgctaccatgcgtgagtgcttctatttttcacagggctctgatggtgcctacaccaaactgactgcacccaaaaggaagccagatccatttacatgatgttcgcatcaaactttcagtggatccagcctccagtgttagttgatgtccgtcggccgcacaaacgccacttctgtacacctgctctctttcctgtcaaccagtggttcctgttcacttctttccccgctcttgttcttcaagcttgttcctaagacctttcagtgcgcgcacaacctttgggttcagcttgtgctgcaggagttttccttgcaacgatgtcgacctgtcaattttaagttcacatagaacatatctaaatttagcgcaggcaattttttttccagctccacaggtggataggtgaaattctgtctttcatgcacagaggaaatcttccaaaacaaaatggtgcaccatcgttgcaaagat

SEQ ID NO: 11772 - DNA, 2092 bp, Zea Mays
agaagctcgtggtatgtgtaatgaggtcctgtggatggaacggtgattagaaggtttcatttcctcggcctgggaaggctctcattggtcatgggtcacaggggctattcttgattgtttcgggataagagaagtcagctccgaagaaagatgtttatcaattgtttgctgagaaggtcagggataacaaacaactggaatcaagatgggcgatcatgcaagaaacccgcgtggagtatttccgtggaaaagatttcaataccttcgtcaaaaatcatccagaagtcagggaaattttggggccagataaggatttagaggtggaagacattgttaacactttgctgaccaagaaccttgtgataaggtgtgatcgagtcatgaaaactgtgaggcctggcaagaaaaagctatcgtcatggcctgctcatttggagatacataatgaacaagtgtttactgaaaatgatgggttttttgcttggatgtttctgaaaagaaggaccttgtggcagacaattctttcatttgtttggcctctttttgcactggcagtctgcttatttccagtttacccataccagtgcaagattgttgtactgtactcatgtgctggagctctacttttcattgtctccattcttttgctaagagctgctatctttggtatcctatgggttctccttgggaaacgcgtgtggttcttccccaatataaatgcggaggagacaacttttagagaactcgttcgtttttggcctgaaaaggatgaaggagagcggccaaagtggacatcaagacttttctatgcccttgttgctctattggtgatattactgcttaggcatcatgctcctgacgaagcagctagagccaggtaccaaaagaaggtttctaacataatcgatgacgttcttgaatggtctccgaagttagctatttctggaatgattgaaaagcacactggggctaacattacagaagaaagcaattacaccaccagggcggcgagtagtcacatgcctccatccaccgaaggcaaagcttcagaagatatggacgttgatggggataccgaggctagcttagatgaaacccaagataatgaatatgctgatgatacaagatcaagcggagcttaaaatcagagttttttttgtttgagcaatctttgttgttgtgaatctgcagaattatatagatagcttactgctggcaacaaaagaaatcagggtgtcatgttttgatgttgcatccatatattccctgcaattggttgtgttctaaggtccccagagaataattctcatatacgacaaggccatctctgcattgccaaatggtcatccagccccctgacgccatgcttctagcacacgtagtttcccaagtactacatcatatatacacaactttttcgacgtaaaaaaaataattgttattcagctgaatgtgaattgaattggacactgctagctgtggtgcggtgaaccagtacaggaaggttttgactgttatcgcaataacaacacacacaaagtaatatacattgattaggatttgcaatccatctctacttgttgacatgcctcaaagcgtcagcagctaacaacaataacaagctgctaccatgcgtgagtgcttctatttttcacagggctctgatggtgcctacaccaaactgactgcacccaaaaggaagccagatccatttacatgatgttcgcatcaaactttcagtggatccagcctccagtgttagttgatgtccgtcggccgcacaaacgccacttctgtacacctgctctctttcctgtcaaccagtggttcctgttcacttctttccccgctcttgttcttcaagcttgttcctaagacctttcagtgcgcgcacaacctttgggttcagcttgtgctgcaggagttttccttgcaacgatgtcgacctgtcaattttaagttcacatagaacatatctaaatttagcgcaggcaattttttttccagctccacaggtggataggtgaaattctgtctttcatgcacagaggaaatcttccaaaacaaaatggtgcaccatcgttgcaaagat

SEQ ID NO: 11773 - DNA, 1958 bp, Zea Mays
acatttcgtcgaatccgccgtgagatccgcccgactctcgctccgttccggcgctctcggtcgggcgaaggctccaccttcctccgacaagatggcggggaagggagccaaggccacggccgccaagtcggcggacaaggacaaggggaagaagaccggcggccccgtctcgcgctcctcccgcgccgcaccccatgagaagtcagctccgaagaaagatgtttatcaattgtttgctgagaaggtcagggataacaaacaactggaatcaagatgggcgatcatgcaagaaacccgcgtggagtatttccgtggaaaagatttcaataccttcgtcaaaaatcatccagaagtcagggaaattttggggccagataaggatttagaggtggaagacattgttaacactttgctgaccaagaaccttgtgataaggtgtgatcgagtcatgaaaactgtgaggcctggcaagaaaaagctatcgtcatggcctgctcatttggagatacataattaagagctgctatctttggtatcctatgggttctccttgggaaacgcgtgtggttcttccccaatataaatgcggaggagacaacttttagagaactcgttcgtttttggcctgaaaaggatgaaggagagcggccaaagtggacatcaagacttttctatgcccttgttgctctattggtgatattactgcttaggcatcatgctcctgacgaagcagctagagccaggtaccaaaagaaggtttctaacataatcgatgacgttcttgaatggtctccgaagttagctatttctggaatgattgaaaagcacactggggctaacattacagaagaaagcaattacaccaccagggcggcgagtagtcacatgcctccatccaccgaaggcaaagcttcagaagatatggacgttgatggggataccgaggctagcttagatgaaacccaagataatgaatatgctgatgatacaagatcaagcggagcttaaaatcagagttttttttgtttgagcaatctttgttgttgtgaatctgcagaattatatagatagcttactgctggcaacaaaagaaatcagggtgtcatgttttgatgttgcatccatatattccctgcaattggttgtgttctaaggtccccagagaataattctcatatacgacaaggccatctctgcattgccaaatggtcatccagccccctgacgccatgcttctagcacacgtagtttcccaagtactacatcatatatacacaactttttcgacgtaaaaaaaataattgttattcagctgaatgtgaattgaattggacactgctagctgtggtgcggtgaaccagtacaggaaggttttgactgttatcgcaataacaacacacacaaagtaatatacattgattaggatttgcaatccatctctacttgttgacatgcctcaaagcgtcagcagctaacaacaataacaagctgctaccatgcgtgagtgcttctatttttcacagggctctgatggtgcctacaccaaactgactgcacccaaaaggaagccagatccatttacatgatgttcgcatcaaactttcagtggatccagcctccagtgttagttgatgtccgtcggccgcacaaacgccacttctgtacacctgctctctttcctgtcaaccagtggttcctgttcacttctttccccgctcttgttcttcaagcttgttcctaagacctttcagtgcgcgcacaacctttgggttcagcttgtgctgcaggagttttccttgcaacgatgtcgacctgtcaattttaagttcacatagaacatatctaaatttagcgcaggcaattttttttccagctccacaggtggataggtgaaattctgtctttcatgcacagaggaaatcttccaaaacaaaatggtgcaccatcgttgcaaagat

SEQ ID NO: 11774 - DNA, 1642 bp, Zea Mays
aaacatttcgtcgaatccgccgtgagatccgcccgactctcgctccgttccggcgctctcggtcgggcgaaggctccaccttcctccgacaagatggcggggaagggagccaaggccacggccgccaagtcggcggacaaggacaaggggaagaagaccggcggccccgtctcgcgctcctcccgcgccgcaccccattaagagctgctatctttggtatcctatgggttctccttgggaaacgcgtgtggttcttccccaatataaatgcggaggagacaacttttagagaactcgttcgtttttggcctgaaaaggatgaaggagagcggccaaagtggacatcaagacttttctatgcccttgttgctctattggtgatattactgcttaggcatcatgctcctgacgaagcagctagagccaggtaccaaaagaaggtttctaacataatcgatgacgttcttgaatggtctccgaagttagctatttctggaatgattgaaaagcacactggggctaacattacagaagaaagcaattacaccaccagggcggcgagtagtcacatgcctccatccaccgaaggcaaagcttcagaagatatggacgttgatggggataccgaggctagcttagatgaaacccaagataatgaatatgctgatgatacaagatcaagcggagcttaaaatcagagttttttttgtttgagcaatctttgttgttgtgaatctgcagaattatatagatagcttactgctggcaacaaaagaaatcagggtgtcatgttttgatgttgcatccatatattccctgcaattggttgtgttctaaggtccccagagaataattctcatatacgacaaggccatctctgcattgccaaatggtcatccagccccctgacgccatgcttctagcacacgtagtttcccaagtactacatcatatatacacaactttttcgacgtaaaaaaaataattgttattcagctgaatgtgaattgaattggacactgctagctgtggtgcggtgaaccagtacaggaaggttttgactgttatcgcaataacaacacacacaaagtaatatacattgattaggatttgcaatccatctctacttgttgacatgcctcaaagcgtcagcagctaacaacaataacaagctgctaccatgcgtgagtgcttctatttttcacagggctctgatggtgcctacaccaaactgactgcacccaaaaggaagccagatccatttacatgatgttcgcatcaaactttcagtggatccagcctccagtgttagttgatgtccgtcggccgcacaaacgccacttctgtacacctgctctctttcctgtcaaccagtggttcctgttcacttctttccccgctcttgttcttcaagcttgttcctaagacctttcagtgcgcgcacaacctttgggttcagcttgtgctgcaggagttttccttgcaacgatgtcgacctgtcaattttaagttcacatagaacatatctaaatttagcgcaggcaattttttttccagctccacaggtggataggtgaaattctgtctttcatgcacagaggaaatcttccaaaacaaaatggtgcaccatcgttgcaaagat

SEQ ID NO: 11775 - DNA, 3115 bp, Zea Mays
agattcccaatcccccaaacatttcgtcgaatccgccgtgagatccgcccgactctcgctccgttccggcgctctcggtcgggcgaaggctccaccttcctccgacaagatggcggggaagggagccaaggccacggccgccaagtcggcggacaaggacaaggggaagaagaccggcggccccgtctcgcgctcctcccgcgccgcaccccatgagaagtcagctccgaagaaagatgtttatcaattgtttgctgagaaggtcagggataacaaacaactggaatcaagatgggcgatcatgcaagaaacccgcgtggagtatttccgtggaaaagatttcaataccttcgtcaaaaatcatccagaagtcagggaaattttggggccagataaggatttagaggtggaagacattgttaacactttgctgaccaagaaccttgtgataaggtgtgatcgagtcatgaaaactgtgaggcctggcaagaaaaagctatcgtcatggcctgctcatttggagatacataatggggtatgctgattccattcactcgtctgtttatcccatttgattggatgtttagctcatttaatggaccttgtagcctgaataatggctaaatggaacaagtgtttactgaaaatgatgggttttttgcttggatgtttctgaaaagaaggaccttgtggcagacaattctttcatttgtttggcctctttttgcactggcagtctgcttatttccagtttacccataccagtgcaagattgttgtactgtactcatgtgctggagctctacttttcattgtctccattcttttgcgtaaaatctccccccctctcctaaatgtattttcattcacgacatacattatacttaagtagacactttcaaattacattttagtcattaggcatatttgagtaacaagctacaatttattgcctgtgtagtgttgtgcgcacttccaacgtcatacggtcatacccgtcatatgcatatttgattaatgaatactatttacctgctgtttataagataacagctatcagaagttggttttgacttgctacaagttttgtagtatatattgataaccttgcagtcacatatatttctagtcactgattaaatcctaacatggcacataacaaactatttagtagtcctgtatatgcaagctgctgctttgttagttgactcactatgttgcggagtaaagtatgtttgattattcttctttcatgaatgtaacagttgcattacagagtatacagtggttcaaaaaacaatcgaacaaagattcaaacttcaatttaaaactgcacagcatgctaggtggataggtatcattcacctccagcctccaccaaactttctgagttcggttgtttttgaagtgatgtttcgacaatagtgtggaactcacacttcagtgcatcaatatgaatgtttagagaaaaggaaaaactggggggatgggttcagactcaagagttttggtgtgtgtaggaaccatgagctcaacattagagtatcattcacttgtttcattacaataagttatctgtttttaaacctttccatttcaagcacatcctaacttctcttttttgccctctatagtaatccctgcttgtctaatatttccaatgtaatttcagtaagagctgctatctttggtatcctatgggttctccttgggaaacgcgtgtggttcttccccaatataaatgcggaggagacaacttttagagaactcgttcgtttttggcctgaaaaggatgaaggagagcggccaaagtggacatcaagacttttctatgcccttgttgctctattggtgatattactgcttaggcatcatgctcctgacgaagcagctagagccaggtaccaaaagaaggtttctaacataatcgatgacgttcttgaatggtctccgaagttagctatttctggaatgattgaaaagcacactggggctaacattacagaagaaagcaattacaccaccagggcggcgagtagtcacatgcctccatccaccgaaggcaaagcttcagaagatatggacgttgatggggataccgaggctagcttagatgaaacccaagataatgaatatgctgatgatacaagatcaagcggagcttaaaatcagagttttttttgtttgagcaatctttgttgttgtgaatctgcagaattatatagatagcttactgctggcaacaaaagaaatcagggtgtcatgttttgatgttgcatccatatattccctgcaattggttgtgttctaaggtccccagagaataattctcatatacgacaaggccatctctgcattgccaaatggtcatccagccccctgacgccatgcttctagcacacgtagtttcccaagtactacatcatatatacacaactttttcgacgtaaaaaaaataattgttattcagctgaatgtgaattgaattggacactgctagctgtggtgcggtgaaccagtacaggaaggttttgactgttatcgcaataacaacacacacaaagtaatatacattgattaggatttgcaatccatctctacttgttgacatgcctcaaagcgtcagcagctaacaacaataacaagctgctaccatgcgtgagtgcttctatttttcacagggctctgatggtgcctacaccaaactgactgcacccaaaaggaagccagatccatttacatgatgttcgcatcaaactttcagtggatccagcctccagtgttagttgatgtccgtcggccgcacaaacgccacttctgtacacctgctctctttcctgtcaaccagtggttcctgttcacttctttccccgctcttgttcttcaagcttgttcctaagacctttcagtgcgcgcacaacctttgggttcagcttgtgctgcaggagttttccttgcaacgatgtcgacctgtcaattttaagttcacatagaacatatctaaatttagcgcaggcaattttttttccagctccacaggtggataggtgaaattctgtctttcatgcacagaggaaatcttccaaaacaaaatggtgcaccatcgttgcaaagat

SEQ ID NO: 11776 - DNA, 2269 bp, Zea Mays
cgagattcccaatcccccaaacatttcgtcgaatccgccgtgagatccgcccgactctcgctccgttccggcgctctcggtcgggcgaaggctccaccttcctccgacaagatggcggggaagggagccaaggccacggccgccaagtcggcggacaaggacaaggggaagaagaccggcggccccgtctcgcgctcctcccgcgccgcaccccatgagaagtcagctccgaagaaagatgtttatcaattgtttgctgagaaggtcagggataacaaacaactggaatcaagatgggcgatcatgcaagaaacccgcgtggagtatttccgtggaaaagatttcaataccttcgtcaaaaatcatccagaagtcagggaaattttggggccagataaggatttagaggtggaagacattgttaacactttgctgaccaagaaccttgtgataaggtgtgatcgagtcatgaaaactgtgaggcctggcaagaaaaagctatcgtcatggcctgctcatttggagatacataatgaacaagtgtttactgaaaatgatgggttttttgcttggatgtttctgaaaagaaggaccttgtggcagacaattctttcatttgtttggcctctttttgcactggcagtctgcttatttccagtttacccataccagtgcaagattgttgtactgtactcatgtgctggagctctacttttcattgtctccattcttttgcttgcattacagagtatacagtggttcaaaaaacaatcgaacaaagattcaaacttcaatttaaaactgcacagcatgctaggtggatagtaagagctgctatctttggtatcctatgggttctccttgggaaacgcgtgtggttcttccccaatataaatgcggaggagacaacttttagagaactcgttcgtttttggcctgaaaaggatgaaggagagcggccaaagtggacatcaagacttttctatgcccttgttgctctattggtgatattactgcttaggcatcatgctcctgacgaagcagctagagccaggtaccaaaagaaggtttctaacataatcgatgacgttcttgaatggtctccgaagttagctatttctggaatgattgaaaagcacactggggctaacattacagaagaaagcaattacaccaccagggcggcgagtagtcacatgcctccatccaccgaaggcaaagcttcagaagatatggacgttgatggggataccgaggctagcttagatgaaacccaagataatgaatatgctgatgatacaagatcaagcggagcttaaaatcagagttttttttgtttgagcaatctttgttgttgtgaatctgcagaattatatagatagcttactgctggcaacaaaagaaatcagggtgtcatgttttgatgttgcatccatatattccctgcaattggttgtgttctaaggtccccagagaataattctcatatacgacaaggccatctctgcattgccaaatggtcatccagccccctgacgccatgcttctagcacacgtagtttcccaagtactacatcatatatacacaactttttcgacgtaaaaaaaataattgttattcagctgaatgtgaattgaattggacactgctagctgtggtgcggtgaaccagtacaggaaggttttgactgttatcgcaataacaacacacacaaagtaatatacattgattaggatttgcaatccatctctacttgttgacatgcctcaaagcgtcagcagctaacaacaataacaagctgctaccatgcgtgagtgcttctatttttcacagggctctgatggtgcctacaccaaactgactgcacccaaaaggaagccagatccatttacatgatgttcgcatcaaactttcagtggatccagcctccagtgttagttgatgtccgtcggccgcacaaacgccacttctgtacacctgctctctttcctgtcaaccagtggttcctgttcacttctttccccgctcttgttcttcaagcttgttcctaagacctttcagtgcgcgcacaacctttgggttcagcttgtgctgcaggagttttccttgcaacgatgtcgacctgtcaattttaagttcacatagaacatatctaaatttagcgcaggcaattttttttccagctccacaggtggataggtgaaattctgtctttcatgcacagaggaaatcttccaaaacaaaatggtgcaccatcgttgcaaagat

SEQ ID NO: 11777 - DNA, 3057 bp, Zea Mays
gcgaaccgtttcctaaaaaaagttctagtgcgaaccgagattcccaatcccccaaacatttcgtcgaatccgccgtgagatccgcccgactctcgctccgttccggcgctctcggtcgggcgaaggctccaccttcctccgacaagatggcggggaagggagccaaggccacggccgccaagtcggcggacaaggacaaggggaagaagaccggcggccccgtctcgcgctcctcccgcgccgcaccccatgagaagtcagctccgaagaaagatgtttatcaattgtttgctgagaaggtcagggataacaaacaactggaatcaagatgggcgatcatgcaagaaacccgcgtggagtatttccgtggaaaagatttcaataccttcgtcaaaaatcatccagaagtcagggaaattttggggccagataaggatttagaggtggaagacattgttaacactttgctgaccaagaaccttgtgataaggtgtgatcgagtcatgaaaactgtgaggcctggcaagaaaaagctatcgtcatggcctgctcatttggagatacataatgaacaagtgtttactgaaaatgatgggttttttgcttggatgtttctgaaaagaaggaccttgtggcagacaattctttcatttgtttggcctctttttgcactggcagtctgcttatttccagtttacccataccagtgcaagattgttgtactgtactcatgtgctggagctctacttttcattgtctccattcttttgcgtaaaatctccccccctctcctaaatgtattttcattcacgacatacattatacttaagtagacactttcaaattacattttagtcattaggcatatttgagtaacaagctacaatttattgcctgtgtagtgttgtgcgcacttccaacgtcatacggtcatacccgtcatatgcatatttgattaatgaatactatttacctgctgtttataagataacagctatcagaagttggttttgacttgctacaagttttgtagtatatattgataaccttgcagtcacatatatttctagtcactgattaaatcctaacatggcacataacaaactatttagtagtcctgtatatgcaagctgctgctttgttagttgactcactatgttgcggagtaaagtatgtttgattattcttctttcatgaatgtaacagttgcattacagagtatacagtggttcaaaaaacaatcgaacaaagattcaaacttcaatttaaaactgcacagcatgctaggtggataggtatcattcacctccagcctccaccaaactttctgagttcggttgtttttgaagtgatgtttcgacaatagtgtggaactcacacttcagtgcatcaatatgaatgtttagagaaaaggaaaaactggggggatgggttcagactcaagagttttggtgtgtgtaggaaccatgagctcaacattagagtatcattcacttgtttcattacaataagttatctgtttttaaacctttccatttcaagcacatcctaacttctcttttttgccctctatagtaatccctgcttgtctaatatttccaatgtaatttcagtaagagctgctatctttggtatcctatgggttctccttgggaaacgcgtgtggttcttccccaatataaatgcggaggagacaacttttagagaactcgttcgtttttggcctgaaaaggatgaaggagagcggccaaagtggacatcaagacttttctatgcccttgttgctctattggtgatattactgcttaggcatcatgctcctgacgaagcagctagagccaggtaccaaaagaaggtttctaacataatcgatgacgttcttgaatggtctccgaagttagctatttctggaatgattgaaaagcacactggggctaacattacagaagaaagcaattacaccaccagggcggcgagtagtcacatgcctccatccaccgaaggcaaagcttcagaagatatggacgttgatggggataccgaggctagcttagatgaaacccaagataatgaatatgctgatgatacaagatcaagcggagcttaaaatcagagttttttttgtttgagcaatctttgttgttgtgaatctgcagaattatatagatagcttactgctggcaacaaaagaaatcagggtgtcatgttttgatgttgcatccatatattccctgcaattggttgtgttctaaggtccccagagaataattctcatatacgacaaggccatctctgcattgccaaatggtcatccagccccctgacgccatgcttctagcacacgtagtttcccaagtactacatcatatatacacaactttttcgacgtaaaaaaaataattgttattcagctgaatgtgaattgaattggacactgctagctgtggtgcggtgaaccagtacaggaaggttttgactgttatcgcaataacaacacacacaaagtaatatacattgattaggatttgcaatccatctctacttgttgacatgcctcaaagcgtcagcagctaacaacaataacaagctgctaccatgcgtgagtgcttctatttttcacagggctctgatggtgcctacaccaaactgactgcacccaaaaggaagccagatccatttacatgatgttcgcatcaaactttcagtggatccagcctccagtgttagttgatgtccgtcggccgcacaaacgccacttctgtacacctgctctctttcctgtcaaccagtggttcctgttcacttctttccccgctcttgttcttcaagcttgttcctaagacctttcagtgcgcgcacaacctttgggttcagcttgtgctgcaggagttttccttgcaacgatgtcgacctgtcaattttaagttcacatagaacatatctaaatttagcgcaggcaattttttttccagctccacaggtggataggtgaaattctgtctttcatgcacagaggaaatcttccaaaacaaaatggtgcaccatcgttgcaaagat

SEQ ID NO: 11778 - DNA, 1674 bp, Zea Mays
gtctctgtcagccatcaactctccagtgagctgcgagcctacaaggctgtgggcagtgccagcctcaacctcgacctcccccagtcccccaccgaccaccggcctcctttcccgcaggcacgggtgcacggcacgcggtttccactcgcttcgtccgcgttcggatcgccctcagagtaacagtctagcagagcaagcatgtcgtcgtcggcggagaacgaccccacggtgacggtgaccgagcgcggaggcaaggacaagcacgaggacggcggcgacaaggagcagggcggcggcggcttcatcgacaaggtgaaggacttcatccacgacatcggcgagaagatcgaggaggtcgtcgggttcggcaagcccacggccgacgtgtgcggcatccacatcccgcacatcagcctccaccgcgccgacctcgtcgtggacgtgctcatcaagaacccgaacccggtcccgatcccgctcgtggacatcgactacctcatcgacagcgacggccgcaagctggtgtcgggcctcatcccggacgccggcaccatccacgcgcacggccaggagaccgtcaagatcccggtgtcgctcgtcttcgacgacatcaagagcacctacaaggacatccagccgggcagcatcatcccctacctcgtccgcgtcgtgctcctcgtcgacgtccccatcatcggccgcgtcaagatcccgatccagaaggacggcgagatccccatcccttacaagcccgacgtcgacgtggagaagatcaagttccaccacttctccttcgaggagaccaccgccacgctccacctcaagctcgagaacaagaacgacttcgacctcggcctcaacctgctcgagtacgagatgtggctcggcgacgacagcatcgcctccgccgagctcacacagaccgccaagatcgagaagcaggggatcaccaggatgcaggtgcccttcagcttcaggcccaaggacttcggatccgctgtctgggacatgatcagggggaggggcacgggatacaccatcaagggaaagatcgatgtcgacactcccttcggcaacatgaagctgcccataagcaaagagggtggaaccacccgcctcaagaaggaggaggaggaggacgacgacgatgacaactgaagtgaggactgctggggggcgctgctgttacctttcacgaaacgcagcgaagcagaagatgcggggatcgtcgtcgacctgatacccacacccttagcgctgattccagaagctcacggcctcgcgggctcaacctcaaaccaagagtgtaatccgcctgttgcatcacatcaacaagttaacacattggatgtcattagatttgtatatgaactgtaggtcattttacctcgcatatctatccaatagaggggcatatgctaggctccatccttctgttgtctaaaccaaaggaagcagcacacaacaactacagctagggatgttgctcgacgacgactgccaaaatcattctccatggtctatcagaaggtagcaaaatagttgtgttaataacatggtcttgctcttcaattaggtgcattttatgttattagtaccacatgttgttgcatcgtgagatgatcctccagtggtaaaatatgcctgttatgtgatcattgaccaagatatgtt

SEQ ID NO: 11779 - DNA, 1918 bp, Zea Mays
ctccgatcgacgatggccatcgctcaagctcagctgggccgacacaatcacacaagggtcggtccacccacattcgtacgcgtgcttgttgtctctgtcagccatcaactctccagtgagctgcgagcctacaaggctgtgggcagtgccagcctcaacctcgacctcccccagtcccccaccgaccaccggcctcctttcccgcaggcacgggtgcacggcacgcggtttccactcgcttcgtccgcgttcggatcgccctcagagtaacagtctagcagagcaagcatgtcgtcgtcggcggagaacgaccccacggtgacggtgaccgagcgcggaggcaaggacaagcacgaggacggcggcgacaaggagcagggcggcggcggcttcatcgacaaggtgaaggacttcatccacgacctcgtcgtggacgtgctcatcaagaacccgaacccggtcccgatcccgctcgtggacatcgactacctcatcgacagcgacggccgcaagctggtgtcgggcctcatcccggacgccggcaccatccacgcgcacggccaggagaccgtcaagatcccggtgtcgctcgtcttcgacgacatcaagagcacctacaaggacatccagccgggcagcatcatcccctacctcgtccgcgtcgtgctcctcgtcgacgtccccatcatcggccgcgtcaagatcccgatccagaaggacggcgagatccccatcccttacaagcccgacgtcgacgtggagaagatcaagttccaccacttctccttcgaggagaccaccgccacgctccacctcaagctcgagaacaagaacgacttcgacctcggcctcaacctgctcgagtacgagatgtggctcggcgacgacagcatcgcctccgccgagctcacacagaccgccaagatcgagaagcaggggatcaccaggatgcaggtgcccttcagcttcaggcccaaggacttcggatccgctgtctgggacatgatcagggggaggggcacgggatacaccatcaagggaaagatcgatgtcgacactcccttcggcaacatgaagctgcccataagcaaagagggtggaaccacccgcctcaagaaggaggaggaggaggacgacgacgatgacaactgaagtgaggactgctggggggcgctgctgttacctttcacgaaacgcagcgaagcagaagatgcggggatcgtcgtcgacctgatacccacacccttagcgctggttaagctcttgcctttagcttatggtgctctgttgttttgcattgtctgaacatcctctcacttcctgagtgtacgttcagtttgaggtttcctgtgttgtccatctgaattctttcaaactttgcggttggaactggatgaagaataaaattccaacccgccctggttcttttgtgggtctgtttggaatagatgctgcctgccaatgatcctgaaataagctttactgaaaggctttatccatccagattccagaagctcacggcctcgcgggctcaacctcaaaccaagagtgtaatccgcctgttgcatcacatcaacaagttaacacattggatgtcattagatttgtatatgaactgtaggtcattttacctcgcatatctatccaatagaggggcatatgctaggctccatccttctgttgtctaaaccaaaggaagcagcacacaacaactacagctagggatgttgctcgacgacgactgccaaaatcattctccatggtctatcagaaggtagcaaaatagttgtgttaataacatggtcttgctcttcaattaggtgcattttatgttattagtaccacatgttgttgcatcgtgagatgatcctccagtggtaaaatatgcctgttatgtgatcattgaccaagatatgtt

SEQ ID NO: 11780 - DNA, 1819 bp, Zea Mays
ccgtaacgcacgagcattatactgccataaatttcttagagctgataaaatacatactgcgcgttgcaagctcccacttcctgaggaacaggaactccatgagatccgcggcatccgccgtcccgttcatctgcacaaaaagaccgtaatccttctttttcctctcctccccatccgcggagtgtaaatcgtctctcgctagcgcgttcagtagaaaccctaaaccccgcctcctcccctcgccggggtaggggctacgggtgtcaacgcccgccatggacgcattccggaagcaactggatgtgctcatgggcgctaaccgcaacggcgacgtcgaggaggtgagccgcaactactacgaccgcgacgtctgccggctcttcctcgccggcctttgcccccacgacctcttccagctcacgaaaatggatcttggtccttgttctaagattcactcgcttcaactgcggaaagattatgaagaagcgaaagcaaagggaacagagaattttgacagagaactcgaggatatgatagaaaggctcattgtggagtgcgacaggaaaattcagagggccctgaaacgacttgcggatgacgatgccaaggctgctattgcgatatccgtctcggaggttactctgacggatgacatactgcagctgtcaaaacagatcaaggaaaaaatggtagaagttgatgcctttgattttgaagggagaactgatgataaaataaaggcccaggaagtagtggaagaactcagaactaaaagagctgatatgcaggctaccctcttgcttgatgcttttaacaaggacagagcttcattaactcagcctgctcaacctcctcaagtggcggcagcgccaccaccagctccacccgatgctcgtactcaagaaatgatcaatgaaaagcttaagaaagctgaagagcttggggaacaaggcatggttgatgaagctcagaaagctttggaagaggcagaagctctgaaaaagctggcgcgacgtccggagccaccttcagacccttctaaatatactgccgctgatgtttggattaccgatcaaaagttgcgcctctgtgatatatgtggagcatttctgagtgtatatgacaatgatcgacgtcttgctgaccattttggagggaaactgcatctaggctacatgctgattcgtgacaaacagaaagaacttcaggagcagagaaacaaaaggaggacaggcaaaactgaagatgataggcgatctagagagcagagcaaggatcgaaacggcccgccgtccagggatagagattcagaaaggagagacagggttgagtctcgagatggaagaagagattatgatagggaacgcgataggcgtcacgatagggaccgtcgccatgaccgcgaccgggatagggattatgaccgctcccgcggatatgactcaaggagaagagagcgttcacgctccagggagcgcagcaggcgccatgagagatactaaatgttactccatggctgacagattttggattgctggcgtctgttctggtttgtgttgtgctttgtgtcttatcttccgaagtttcctgttcctgctcgagaaatccgaaagccaatctgcgttctgcatcatgtcatgtcctagtgtcgtactgtttagttatatgccgagaacatctctttcatcaaatgaatatttggaaacaccaacgcacttgacgctaaatgggaatgaagtgtggagtatttaaacgcctctgaaatcaaatgaaagttgtacttgtacgaaagaaacatattcaaaaaaaaaaaactcaa

SEQ ID NO: 11781 - DNA, 2378 bp, Zea Mays
cttttgtgtaccgccgtaacgcacgagcattatactgccataaatttcttagagctgataaaatacatactgcgcgttgcaagctcccacttcctgaggaacaggaactccatgagatccgcggcatccgccgtcccgttcatctgcacaaaaagaccgtaatccttctttttcctctcctccccatccgcggagtgtaaatcgtctctcgctagcgcgttcagtagaaaccctaaaccccgcctcctcccctcgccggggtaggggctacgggtgtcaacgcccgccatggacgcattccggaagcaactggatgtgctcatgggcgctaaccgcaacggcgacgtcgaggaggtgagccgcaactactacgaccgcgacgtctgccggctcttcctcgccggcctttgcccccacgacctcttccagctcacgaaaatggatcttggtccttgttctaagattcactcgcttcaactgcggaaagattatgaagaagcgaaagcaaagggaacagagaattttgacagagaactcgaggatatgatagaaaggctcattgtggagtgcgacaggaaaattcagagggccctgaaacgacttgcggatgacgatgccaaggctgctattgcgatatccgtctcggaggttactctgacggatgacatactgcagctgtcaaaacagatcaaggaaaaaatggtagaagttgatgcctttgattttgaagggagaactgatgataaaataaaggcccaggaagtagtggaagaactcagaactaaaagagctgatatgcaggctaccctcttgcttgatgcttttaacaaggacagagcttcattaactcagcctgctcaacctcctcaagtggcggcagcgccaccaccagctccacccgatgctcgtactcaagaaatgatcaatgaaaagcttaagaaagctgaagagcttggggaacaaggcatggttgatgaagctcagaaagctttggaagaggcagaagctctgaaaaagctggcgcgacgtccggagccaccttcagacccttctaaatatactgccgctgatgtttggattaccgatcaaaagttgcgcctctgtgatatatgtggagcatttctgagtgtatatgacaatgatcgacgtcttgctgaccattttggagggaaactgcatctaggctacatgctgattcgtgacaaacagaaagaacttcaggtgctgagtgtaatgtaccgttttctgctttaaagagttactctgttttgggccttttggcatctgaattagtccatgtcgcgtgattggaatctcatgcgatgatcttcatacctatggctacaacagtcactgtctgttgacaaatgtaagcataggagcgtgcggaccatggtatgaaaaaaatcatgtttacttaattgtgacaaactgctcatgtgtctgcttagtatcgattgttgggcagaagctggaggttgcctttttactgcctgagccatattatgtagaccaggtgacaaataatactggttaagttatcctgaaagcacacttcttttgccaacattttgctgtaagtgacaacttgttctgttttctatctgctacctcctccataagtttgcaagttacattttgctgaagcaaccttgcctgtaaagtatcgcccgccctatcttttggaacgttgtctctgattttaaatatgccaaaatatcattatctgtactgtcaataaacaaaatacactgtggcatcttgcaggagcagagaaacaaaaggaggacaggcaaaactgaagatgataggcgatctagagagcagagcaaggatcgaaacggcccgccgtccagggatagagattcagaaaggagagacagggttgagtctcgagatggaagaagagattatgatagggaacgcgataggcgtcacgatagggaccgtcgccatgaccgcgaccgggatagggattatgaccgctcccgcggatatgactcaaggagaagagagcgttcacgctccagggagcgcagcaggcgccatgagagatactaaatgttactccatggctgacagattttggattgctggcgtctgttctggtttgtgttgtgctttgtgtcttatcttccgaagtttcctgttcctgctcgagaaatccgaaagccaatctgcgttctgcatcatgtcatgtcctagtgtcgtactgtttagttatatgccgagaacatctctttcatcaaatgaatatttggaaacaccaacgcacttgacgctaaatgggaatgaagtgtggagtatttaaacgcctctgaaatcaaatgaaagttgtacttgtacgaaagaaacatattcaaaaaaaaaaaactcaa

SEQ ID NO: 11782 - DNA, 2325 bp, Zea Mays
cttttgtgtaccgccgtaacgcacgagcattatactgccataaatttcttagagctgataaaatacatactgcgcgttgcaagctcccacttcctgaggaacaggaactccatgagatccgcggcatccgccgtcccgttcatctgcacaaaaagaccgtaatccttctttttcctctcctccccatccgcggagtgtaaatcgtctctcgctagcgcgttcagtagaaaccctaaaccccgcctcctcccctcgccggggtaggggctacgggtgtcaacgcccgccatggacgcattccggaagcaactggatgtgctcatgggcgctaaccgcaacggcgacgtcgaggaggtgagccgcaactactacgaccgcgacgtctgccggctcttcctcgccggcctttgcccccacgacctcttccagctcacgaaaatggatcttggtccttgttctaagattcactcgcttcaactgcggaaagattatgaagaagcgaaagcaaagggaacagagaattttgacagagaactcgaggatatgatagaaaggctcattgtggagtgcgacaggaaaattcagagggccctgaaacgacttgcggatgacgatgccaaggctgctattgcgatatccgtctcggaggttactctgacggatgacatactgcagctgtcaaaacagatcaaggaaaaaatggtagaagttgatgcctttgattttgaagggagaactgatgataaaataaaggcccaggaagtagtggaagaactcagaactaaaagagctgatatgcaggctaccctcttgcttgatgcttttaacaaggacagagcttcattaactcagcctgctcaacctcctcaagtggcggcagcgccaccaccagctccacccgatgctcgtactcaagaaatgatcaatgaaaagcttaagaaagctgaagagcttggggaacaaggcatggttgatgaagctcagaaagctttggaagaggcagaagctctgaaaaagctggcgcgacgtccggagccaccttcagacccttctaaatatactgccgctgatgtttggattaccgatcaaaagttgcgcctctgtgatatatgtggagcatttctgagtgtatatgacaatgatcgacgtcttgctgaccattttggagggaaactgcatctaggctacatgctgattcgtgacaaacagaaagaacttcaggtgctgagtgtaatgtaccgttttctgctttaaagagttactctgttttgggccttttggcatctgtgagttttcttatctcaagagcctcaaggaattagtccatgtcgcgtgattggaatctcatgcgatgatcttcatacctatggctacaacagtcactgtctgttgacaaattatcgattgttgggcagaagctggaggttgcctttttactgcctgagccatattatgtagaccaggtgacaaataatactggttaagttatcctgaaagcacacttcttttgccaacattttgctgtaagtgacaacttgttctgttttctatctgctacctcctccataagtttgcaagttacattttgctgaagcaaccttgcctgtaaagtatcgcccgccctatcttttggaacgttgtctctgattttaaatatgccaaaatatcattatctgtactgtcaataaacaaaatacactgtggcatcttgcaggagcagagaaacaaaaggaggacaggcaaaactgaagatgataggcgatctagagagcagagcaaggatcgaaacggcccgccgtccagggatagagattcagaaaggagagacagggttgagtctcgagatggaagaagagattatgatagggaacgcgataggcgtcacgatagggaccgtcgccatgaccgcgaccgggatagggattatgaccgctcccgcggatatgactcaaggagaagagagcgttcacgctccagggagcgcagcaggcgccatgagagatactaaatgttactccatggctgacagattttggattgctggcgtctgttctggtttgtgttgtgctttgtgtcttatcttccgaagtttcctgttcctgctcgagaaatccgaaagccaatctgcgttctgcatcatgtcatgtcctagtgtcgtactgtttagttatatgccgagaacatctctttcatcaaatgaatatttggaaacaccaacgcacttgacgctaaatgggaatgaagtgtggagtatttaaacgcctctgaaatcaaatgaaagttgtacttgtacgaaagaaacatattcaaaaaaaaaaaactcaa

SEQ ID NO: 11783 - DNA, 2693 bp, Zea Mays
cttttgtgtaccgccgtaacgcacgagcattatactgccataaatttcttagagctgataaaatacatactgcgcgttgcaagctcccacttcctgaggaacaggaactccatgagatccgcggcatccgccgtcccgttcatctgcacaaaaagaccgtaatccttctttttcctctcctccccatccgcggagtgtaaatcgtctctcgctagcgcgttcagtagaaaccctaaaccccgcctcctcccctcgccggggtaggggctacgggtgtcaacgcccgccatggacgcattccggaagcaactggatgtgctcatgggcgctaaccgcaacggcgacgtcgaggaggtgagccgcaactactacgaccgcgacgtctgccggctcttcctcgccggcctttgcccccacgacctcttccagctcacgaaaatggatcttggtccttgttctaagattcactcgcttcaactgcggaaagattatgaagaagcgaaagcaaagggaacagagaattttgacagagaactcgaggatatgatagaaaggctcattgtggagtgcgacaggaaaattcagagggccctgaaacgacttgcggatgacgatgccaaggctgctattgcgatatccgtctcggaggttactctgacggatgacatactgcagctgtcaaaacagatcaaggaaaaaatggtagaagttgatgcctttgattttgaagggagaactgatgataaaataaaggcccaggaagtagtggaagaactcagaactaaaagagctgatatgcaggctaccctcttgcttgatgcttttaacaaggacagagcttcattaactcagcctgctcaacctcctcaagtggcggcagcgccaccaccagctccacccgatgctcgtactcaagaaatgatcaatgaaaagcttaagaaagctgaagagcttggggaacaaggcatggttgatgaagctcagaaagctttggaagaggcagaagctctgaaaaagctggcgcgacgtccggagccaccttcagacccttctaaatatactgccgctgatgtttggattaccgatcaaaagttgcgcctctgtgatatatgtggagcatttctgagtgtatatgacaatgatcgacgtcttgctgaccattttggagggaaactgcatctaggctacatgctgattcgtgacaaacagaaagaacttcaggtgctgagtgtaatgtaccgttttctgctttaaagagttactctgttttgggccttttggcatctgtgagttttcttatctcaagagcctcaaggttctcaccttccctctatatattatttgattctcacattgccgggcactatggttattacgatagtcattacaggaattagtccatgtcgcgtgattggaatctcatgcgatgatcttcatacctatggctacaacagtcactgtctgttgacaaatgtaagcataggagcgtgcggaccatggtatgaaaaaaatcatgtttacttaattgtgacaaactgctcatgtgtctgcttagtatcgattgttgggcagaagctggaggttgcctttttactgcctgagccatattatgtagaccaggtgacaaataatactggttaagttatcctgaaagcacacttcttttgccaacattttgctgtaagtgacaacttgttctgttttctatctgctacctcctccataagtttgcaagttacattttgctgaagcaaccttgcctgtaaagtatcgcccgccctatcttttggaacgttgtctctgattttaaatatgccaaaatatcattatctgtactgtcaataaacaaaatacactgtggcatcttgcaggagcagagaaacaaaaggaggacaggcaaaactgaagatgataggcgatctagagagcagagcaaggatcgaaacggcccgccgtccagggatagagattcagaaaggagagacagggttgagtctcgagatggaagaagagattatgatagggaacgcgataggcgtcacgatagggaccgtcgccatgaccgcgaccgggatagggattatgaccgctcccgcggatatgactcaaggagaagagagcgttcacgctccagggagcgcagcaggcgccatgagagatactaaatgttactccatggctgacagattttggattgctggcgtctgttctggtttgtgttgtgctttgtgtcttatcttccgaagtttcctgttcctgctcgagaaatccgaaagccaatctgcgttctgcatcatgtcatgtcctagtgtcgtactgtttagttatatgccgagaacatctctttcatcaaatgaatatttggaaacaccaacgcacttgacgctaaatgggaatgaagtgtggagtatttaaacgcctctgaaatcaaatgaaagttgtacttgtacgaatctcttccacaaattgcactgtatatgcttgtactgttgcagatttacgatgggtttggactgttctccatccccggagcgcgctcaggctcgacgctacctagctacggacctttatttttggtacctgatgaaacatgatggttttaggaggcgcggtgtttctctggcgaacgatggccggacgtccattttcgagaaccacaagacaagaaacatattcaaaaaaaaaaaactcaa

SEQ ID NO: 11784 - DNA, 2605 bp, Zea Mays
cttccactataattatctcttcgtcttttgtgtaccgccgtaacgcacgagcattatactgccataaatttcttagagctgataaaatacatactgcgcgttgcaagctcccacttcctgaggaacaggaactccatgagatccgcggcatccgccgtcccgttcatctgcacaaaaagaccgtaatccttctttttcctctcctccccatccgcggagtgtaaatcgtctctcgctagcgcgttcagtagaaaccctaaaccccgcctcctcccctcgccggggtaggggctacgggtgtcaacgcccgccatggacgcattccggaagcaactggatgtgctcatgggcgctaaccgcaacggcgacgtcgaggaggtgagccgcaactactacgaccgcgacgtctgccggctcttcctcgccggcctttgcccccacgacctcttccagctcacgaaaatggatcttggtccttgttctaagattcactcgcttcaactgcggaaagaaagcgaaagcaaagggaacagagaattttgacagagaactcgaggatatgatagaaaggctcattgtggagtgcgacaggaaaattcagagggccctgaaacgacttgcggatgacgatgccaaggctgctattgcgatatccgtctcggaggttactctgacggatgacatactgcagctgtcaaaacagatcaaggaaaaaatggtagaagttgatgcctttgattttgaagggagaactgatgataaaataaaggcccaggaagtagtggaagaactcagaactaaaagagctgatatgcaggctaccctcttgcttgatgcttttaacaaggacagagcttcattaactcagcctgctcaacctcctcaagtggcggcagcgccaccaccagctccacccgatgctcgtactcaagaaatgatcaatgaaaagcttaagaaagctgaagagcttggggaacaaggcatggttgatgaagctcagaaagctttggaagaggcagaagctctgaaaaagctggcgcgacgtccggagccaccttcagacccttctaaatatactgccgctgatgtttggattaccgatcaaaagttgcgcctctgtgatatatgtggagcatttctgagtgtatatgacaatgatcgacgtcttgctgaccattttggagggaaactgcatctaggctacatgctgattcgtgacaaacagaaagaacttcaggtgctgagtgtaatgtaccgttttctgctttaaagagttactctgttttgggccttttggcatctgaattagtccatgtcgcgtgattggaatctcatgcgatgatcttcatacctatggctacaacagtcactgtctgttgacaaatgtaagcataggagcgtgcggaccatggtatgaaaaaaatcatgtttacttaattgtgacaaactgctcatgtgtctgcttagtatcgattgttgggcagaagctggaggttgcctttttactgcctgagccatattatgtagaccaggtgacaaataatactggttaagttatcctgaaagcacacttcttttgccaacattttgctgtaagtgacaacttgttctgttttctatctgctacctcctccataagtttgcaagttacattttgctgaagcaaccttgcctgtaaagtatcgcccgccctatcttttggaacgttgtctctgattttaaatatgccaaaatatcattatctgtactgtcaataaacaaaatacactgtggcatcttgcaggagcagagaaacaaaaggaggacaggcaaaactgaagatgataggcgatctagagagcagagcaaggatcgaaacggcccgccgtccagggatagagattcagaaaggagagacagggttgagtctcgagatggaagaagagattatgatagggaacgcgataggcgtcacgatagggaccgtcgccatgaccgcgaccgggatagggattatgaccgctcccgcggatatgactcaaggagaagagagcgttcacgctccagggagcgcagcaggcgccatgagagatactaaatgttactccatggctgacagattttggattgctggcgtctgttctggtttgtgttgtgctttgtgtcttatcttccgaagtttcctgttcctgctcgagaaatccgaaagccaatctgcgttctgcatcatgtcatgtcctagtgtcgtactgtttagttatatgccgagaacatctctttcatcaaatgaatatttggaaacaccaacgcacttgacgctaaatgggaatgaagtgtggagtatttaaacgcctctgaaatcaaatgaaagttgtacttgtacgaatctcttccacaaattgcactgtatatgcttgtactgttgcagatttacgatgggtttggactgttctccatccccggagcgcgctcaggctcgacgctacctagctacggacctttatttttggtacctgatgaaacatgatggttttaggaggcgcggtgtttctctggcgaacgatggccggacgtccattttcgagaaccacaagacaagaaacatattcaaaaaaaaaaaactcaa

SEQ ID NO: 11785 - DNA, 3202 bp, Zea Mays
cagcgctcgagccattcccgggcggcggtgggcggtgggcggagcgcgtcaccgggggtcgcagatggggtccgtggcgaagctgatctgatatggcaacgatttccatgggcccgcctcagagctgtgggcggagcgcgtcaccgggggtcgcagatggggtccgtggcgaagctgatctgatatggcaacgatttccatgggcccgcctcagagctggacggacggaggccacctccggcgacgagttcgaggccgcaggcccgaagaggagcgggtaccggacgccgccgaaggaaagagttgggcgcaggacggcgtgccccggaggatctgaagcagaacctgaacaaggaagccgatccaccccaccaccgcccgccacacctgcgacgtcgccttctccctctgctgctgcgccgccgcggtcggcgagtacacctctgccgccgccatagacgacagagacgagctgtcgcgccacgtggagcttccggtccgggaggctggagaccgggaggacggagggaagtcgaggacagagggatggcgaggccggaggcaaccggaggaggaggtggtgccgtggtggtcggtctccgcgcccgcgcccgtgtgcgtggtgtttttgcgggcggtgggagcggcggcggtgtggggaggagagtcggggggagtcctgccgcagtgggacagcagaggcggggctggaggggctggcagcgccggacgggcggcgcaggagggaggacggcctggagcgcggcggcacgcagaggctctgaggcggggctggaggacggcctcgagagcagcggcctggagcggcctcgagagcagcgccctggagggaggacggcctggagagcagctgcctggagcggcggtggcctggagcagcggcacgcagaggcgggcctggcggcgccggacgggcggcgcaggagggttggagcagcggcagcggcggcctggaggctggagcgcgccctggagtgcggcggctggtgagaacgcgagttcctaattgggctggtgatagtgcggcctgtagcggcggcctgggcgggctgggcgggagtttctaattaggttgggccaatttctagcagcagacgcattaaacgcccgaaacgcggtgtttcactctataacgcgtttaaacgtcaaaacgcgacgtttaaacgacgttttacgacgaatcgtaaaacgttgtcgtttcactttctgtcagcgttttatagtttaaacgacgtttaaacgtcgttttaacgtcgttttaataagcatgttaatttctatttgtttaagttagtgatatgtgtttactttgcatttgcagtcataaaaactttttgcagtttatgactgaaaatggtatgtctactggtgttatcttatatgatggcgtagaggattgtatgacaacagttactggaagagaaatgggtctaaactttctaaattacatttttaataaatttaaggaaagaaagtgctggagtgatggctgggaattaagtgatatggaaatagaaattgaggcaggaagaaagtttgtcattaccaagtaggctgacgcagatcttactgttgaagagggcacacaaaatttatttgtttatcttggtctcctggtaccgtattataagaaagaaaactcaattctagcatttttttattccttgagaaaaaatatcttatactttcatgattttaagaaatttctaataaaatggaaaatgtttgtcaaactcattagatcagtgttagctttaaaagcgtctttgatcagatcgaccttaatctgtgagatgtccacagttatcgcattgcagcttaaattatctaattctgcatatcatcaagtgttatcaaaaaatgtcaatattggcgtgcttcaataaaatgggttatgccacacggacaggtctaccactacaggaacaatatctctttaatgtattcctatgataagtggtgttgtaacttatggcacgtaatgtggtattgaagaaacttccttcagcatttcctctactcttttacgtaggtcaggacatgcttaacgaagtttcttaaataccacattacgtgtcataagttacaacaccacttatcataaaaataccttaaagagatattgttcctgtagtggtagacctgtctgtgtggcataacccattttactgaagcacgtcaatcttgacatttttttataatacttaataatatgcagaattagataattaaagctgcaatacgataattgtagacatctcacagattaaggttaatctgaccaaaggcgctttcaaagctaacgctgatctaatgagtttgacaaaccttttccattttattgaaaaattcttaagatcagaaaagtataatatatcttttccgaaggaatcaaaaaatgctggattgagtttccttttttataatacggtaccagaaaaccaagatgaacaaatatattttgtgtgtcatcttcaacagtaagatctgcgtcagcctccttggtaatgacaaactttcttcttgcttcaacttccatttccatatcacttaattctcagccatcactccaacactttcctctctcgaatttattaaaaatgtaatttagaaagtctacactcatttctcttacaataactgttatcatacaatcctttacgtcatcatataagataacaccagtagacatatcattttcagccataaactgtaaaaaggttttatgactgcaaatgcaaattaaacacatatcactaacttaaacaaatagaaattaatttcaggtaataaaagtagaaattgatttattttattatttaaaatttggaatagctgataaatgtacccctttgtgtgtgacacattcaatatacgatcttatttacttgtgggttcctccacaatattcacatcctcatgagggaatgtagcatatttgtctcctggcgaaatcaaaaggtttttatgactgcaaatacaaagtaaacacatatcactcacttaacaaatagaaattgatctcagtaaacaaaagtagaaattgatctattttattatttaaattttggaatagctaataaatatacccgtctatatgtgacacattcaatatatgatcttctttgattgtgggttcctcctcaatattcacatcctcacgaagggatgtaccatgttt

SEQ ID NO: 11786 - DNA, 3536 bp, Zea Mays
cagcgctcgagccattcccgggcggcggtgggcggtgggcggagcgcgtcaccgggggtcgcagatggggtccgtggcgaagctgatctgatatggcaacgatttccatgggcccgcctcagagctgtgggcggagcgcgtcaccgggggtcgcagatggggtccgtggcgaagctgatctgatatggcaacgatttccatgggcccgcctcagagctggacggacggaggccacctccggcgacgagttcgaggccgcaggcccgaagaggagcgggtaccggacgccgccgaaggaaagagttgggcgcaggacggcgtgccccggaggatctgaagcagaacctgaacaaggaagccgatccaccccaccaccgcccgccacacctgcgacgtcgccttctccctctgctgctgcgccgccgcggtcggcgagtacacctctgccgccgccatagacgacagagacgagctgtcgcgccacgtggagcttccggtccgggaggctggagaccgggaggacggagggaagtcgaggacagagggatggcgaggccggaggcaaccggaggaggaggtggtgccgtggtggtcggtctccgcgcccgcgcccgtgtgcgtggtgtttttgcgggcggtgggagcggcggcggtgtggggaggagagtcggggggaggttggacggcggcgtgggaaggccggagccgttgccgacgacggcgcgaatgaagcctgatggaggatctagctgttgaggaagaggggagcggagaggagcagttgcgatcgatggatggaggaggcttgaagcggaggcgacgagacggacggtgatgatttgacgcatatagatggacggtgcagattggctgaaggcagaaccaggggaggcagcctaccccttacagccttaatagtagtgtgtgtgtgtgtgtgtatatagccactgctgaaaaaatgtgaatattgaggaggacccacaatcaaagaagatcatatattgaaaatcatatattgaatgtgtcacatacagaggggtacatttatcagctattccaaattttaaataataaaatagatcaatttctacttttattacctgagattaatttccaaggttattaaaacgacgaaacgttgaaacgctcatgggtgagttttaacttttaaacggtttaaacaaagtttaaacgtagttttaaacaacatagggaaatttcaatatatcataatttcaggcaattatatcaagtcaaataccaaacaacctcgtggggatacatccttgtgcttatgtatactcctcaaggtgaggaatgcagtagcaaatctttgtactttgtagtcctgccgcagtgggacagcagaggcggggctggaggggctggcagcgccggacgggcggcgcaggagggaggacggcctggagcgcggcggcacgcagaggctctgaggcggggctggaggacggcctcgagagcagcggcctggagcggcctcgagagcagcgccctggagggaggacggcctggagagcagctgcctggagcggcggtggcctggagcagcggcacgcagaggcgggcctggcggcgccggacgggcggcgcaggagggttggagcagcggcagcggcggcctggaggctggagcgcgccctggagtgcggcggctgtcataaaaactttttgcagtttatgactgaaaatggtatgtctactggtgttatcttatatgatggcgtagaggattgtatgacaacagttactggaagagaaatgggtctaaactttctaaattacatttttaataaatttaaggaaagaaagtgctggagtgatggctgggaattaagtgatatggaaatagaaattgaggcaggaagaaagtttgtcattaccaagtaggctgacgcagatcttactgttgaagagggcacacaaaatttatttgtttatcttggtctcctggtaccgtattataagaaagaaaactcaattctagcatttttttattccttgagaaaaaatatcttatactttcatgattttaagaaatttctaataaaatggaaaatgtttgtcaaactcattagatcagtgttagctttaaaagcgtctttgatcagatcgaccttaatctgtgagatgtccacagttatcgcattgcagcttaaattatctaattctgcatatcatcaagtgttatcaaaaaatgtcaatattggcgtgcttcaataaaatgggttatgccacacggacaggtctaccactacaggaacaatatctctttaatgtattcctatgataagtggtgttgtaacttatggcacgtaatgtggtattgaagaaacttccttcagcatttcctctactcttttacgtaggtcaggacatgcttaacgaagtttcttaaataccacattacgtgtcataagttacaacaccacttatcataaaaataccttaaagagatattgttcctgtagtggtagacctgtctgtgtggcataacccattttactgaagcacgtcaatcttgacatttttttataatacttaataatatgcagaattagataattaaagctgcaatacgataattgtagacatctcacagattaaggttaatctgaccaaaggcgctttcaaagctaacgctgatctaatgagtttgacaaaccttttccattttattgaaaaattcttaagatcagaaaagtataatatatcttttccgaaggaatcaaaaaatgctggattgagtttccttttttataatacggtaccagaaaaccaagatgaacaaatatattttgtgtgtcatcttcaacagtaagatctgcgtcagcctccttggtaatgacaaactttcttcttgcttcaacttccatttccatatcacttaattctcagccatcactccaacactttcctctctcgaatttattaaaaatgtaatttagaaagtctacactcatttctcttacaataactgttatcatacaatcctttacgtcatcatataagataacaccagtagacatatcattttcagccataaactgtaaaaaggttttatgactgcaaatgcaaattaaacacatatcactaacttaaacaaatagaaattaatttcaggtaataaaagtagaaattgatttattttattatttaaaatttggaatagctgataaatgtacccctttgtgtgtgacacattcaatatacgatcttatttacttgtgggttcctccacaatattcacatcctcatgagggaatgtagcatatttgtctcctggcgaaatcaaaaggtttttatgactgcaaatacaaagtaaacacatatcactcacttaacaaatagaaattgatctcagtaaacaaaagtagaaattgatctattttattatttaaattttggaatagctaataaatatacccgtctatatgtgacacattcaatatatgatcttctttgattgtgggttcctcctcaatattcacatcctcacgaagggatgtaccatgttt

SEQ ID NO: 11787 - DNA, 1752 bp, Zea Mays
ccttgtcctcccaccccgccatttccgccaagctgtcgtcagcctgacgcggtaaccgtgtggactccgctcgggtgggggtggcggcccgaagcccaaaccgcatgggctcgcggccgagctgaccgagccggacccagacccactcgctcctccgcccccgccgcaatggaggagccggcggcggcctctgccctggaggcgcgcggcgacctgcgctcgcgctcggccccgacgtcagccgcgtcgcctcgggggacgttctcgccgacgcgctcaccgacctccgcctcgcgctcgccctgcccgcgctgcccccgcgcgctgccgacggcctggcgctcttcttcgacgacctcctttcacgcgcccaggcgcggggctggttctccgaggtcgtccccaacctcgcacgcctcctcctccgcctccccaccctgctcgaggaccactacgccaaggctggccacggcgcctccgggctccgcgtcatggcgtcgcaggacgcgggcgtcgtgctcctcagccaggagctcgtcgccgcgctgctcacctgcgcgctcttctgcctcttccccacggccggtagggcccaggcgtgccttcccaccatcaatttcgatggcctgttcgcgccgctgattcacaatgcgaggcaaagccaggagcagaaagtgaggtgccttgttcactatttcgagagggtgactgattctatgcctactggtttagtttcgtttgaacgcaaagttcttccccgccgagcgttctctgatggcgttccctatcctgacatccatgcgtgggtggcatctagtgcaccactctgccaattcacggtattttcatcaggtttcatagaagatgaagaacaagaagcccttcaagttgactttgcaaataaatatttggggggaggtgccctttcctggggttgtgtgcaggaagagatccgcttcatgataaaccccgaattgattgtgggtatgctattcttgtcttgtatggaagataacgaggctatagaaatctttggtgcagaacggttctcacagtatatgggacggagaactaggattgtggctatcgatgctttggactgtccagctaggttacactacgaatctggctgtctcctaagggaagtgaacaaggcattttgtggatttttcgatcaatcgaaacaccatctctatgcgaagcttttccaggatttgcacaacaaggatgacttttcaagcatcaattccagtgagtacgtaggagtttcaacaggaaactggggttgtggtgcttttggtggaaaccctgaaatcaagagcatgattcagtggattgctgcatcacaggctcttcgcccttttgttaattactacacttttgaggacgtgtctctgcaaagattagaggaggtgatccagtggatacgacttcatggctggacggtcggcgagttgtggcatatgctcatggagtactcatctcagaggctgggaggagaaacgcacaagggttttttggcctggttgcttcccagcgacaggcccaagaatcaagtgcattacatgtccgaatagcaatagacccggtttttgtgaggagtgtgtgcatgaacgaagttattgctgacaaaaaaaatgaaataaagataaaagcgtatgtatcagttgccacgcacgtgcgtgtagtcgaagatgaggttgggcttctccggcggctcccagctcaagaaacctctagcgacgaagtgcc

SEQ ID NO: 11788 - DNA, 1876 bp, Zea Mays
cccgactcgaatcctagtggatctcgtcgccgcgcaccgtcggtgttgccgacgtcaaccttgtcctcccaccccgccatttccgccaagctgtcgtcagcctgacgcggtaaccgtgtggactccgctcgggtgggggtggcggcccgaagcccaaaccgcatgggctcgcggccgagctgaccgagccggacccagacccactcgctcctccgcccccgccgcaatggaggagccggcggcggcctctgccctggaggcgcgcggcgacctgcgctcgcgctcggccccgacgtcagccgcgtcgcctcgggggacgttctcgccgacgcgctcaccgacctccgcctcgcgctcgccctgcccgcgctgcccccgcgcgctgccgacggcctggcgctcttcttcgacgacctcctttcacgcgcccaggcgcggggctggttctccgaggtcgtccccaacctcgcacgcctcctcctccgcctccccaccctgctcgaggaccactacgccaaggctggccacggcgcctccgggctccgcgtcatggcgtcgcaggacgcgggcgtcgtgctcctcagccaggagctcgtcgccgcgctgctcacctgcgcgctcttctgcctcttccccacggccggtagggcccaggcgtgccttcccaccatcaatttcgatggcctgttcgcgccgctgattcacaatgcgaggcaaagccaggagcagaaagtgaggtgccttgttcactatttcgagagggtgactgattctatgcctactggtttagtttcgtttgaacgcaaagttcttccccgccgagcgttctctgatggcgttccctatcctgacatccatgcgtgggtggcatctagtgcaccactctgccaattcacggtattttcatcaggtttcatagaagatgaagaacaagaagcccttcaagttgactttgcaaataaatatttggggggaggtgccctttcctggggttgtgtgcaggaagagatccgcttcatgataaaccccgaattgattgtgggtatgctattcttgtcttgtatggaagataacgaggctatagaaatctttggtgcagaacggttctcacagtatatgggttatggttcctcctttcgctttgtcggtgactatttagataccaaaccctttgattcgatgggcagacggagaactaggattgtggctatcgatgctttggactgtccagctaggttacactacgaatctggctgtctcctaagggaagtgaacaaggcattttgtggatttttcgatcaatcgaaacaccatctctatgcgaagcttttccaggatttgcacaacaaggatgacttttcaagcatcaattccagtgagtacgtaggagtttcaacaggaaactggggttgtggtgcttttggtggaaaccctgaaatcaagagcatgattcagtggattgctgcatcacaggctcttcgcccttttgttaattactacacttttgaggacgtgtctctgcaaagattagaggaggtgatccagtggatacgacttcatggctggacggtcggcgagttgtggcatatgctcatggagtactcatctcagaggctgggaggagaaacgcacaagggttttttggcctggttgcttcccagcgacaggcccaagaatcaagtgcattacatgtccgaatagcaatagacccggtttttgtgaggagtgtgtgcatgaacgaagttattgctgacaaaaaaaatgaaataaagataaaagcgtatgtatcagttgccacgcacgtgcgtgtagtcgaagatgaggttgggcttctccggcggctcccagctcaagaaacctctagcgacgaagtgcc

SEQ ID NO: 11789 - DNA, 2072 bp, Zea Mays
ctactcactaccggaattgaagcagtcttgtacctttggttggtggcattggcgcgctgcaccaaactctgtgcgcacagaatcaatgcgaccgtaccctcgtcgtcgccgccattgctgcatggtccatatgagatggagtacgtacgtacagtacaccctgtacacggcacaccgtatatatatgctgctagtatagtatgtattgtattattcgttgccgtacaccgacaggtttagcagccagagctcgccatgcatgtagttcgttaccatcccatttctttttacagtttcttggtccaggagctccaggtccagctagctagctagctagctagtatataaggacaagataccacaccggtagcccgccgcacagagtggtaagcatggcgagcaccacagacaaccgcctcgacctcggcctcctcctcctcctcctcgtggccgccgccaccgtcgtcctcgccgtggccgcggccccggcgcatacaccgggaggcaatactgctacccctccgccgccgttccggacggtgtacgcgttcggcgactcgttcacggacacggggaacacgcggtcgacgacggggccctactcgttcggctacgtgtccagcccgccctacggcgccaccttcttccaccgctccaccaaccgctactccgacggccgcctggttgtcgacttcctggccgaggcgctggcgctgccgtcctacctcccgccctacctcgccgtgtccgtctccaacgccaacgccacggcggccggagccggcgtcaacttcgcggtggccggcgccacggccatcgagcacgacttcttcgcgcggaacaacctcagcatcgacgtcacgccgcagtccatcatgacgcagctgggctggttcgacgcgcacctgctccggtcctcctcctcctcctccgcccgcgacaccatccctcccaagctcgtccgcaccatggccgtccagagggtcaccgccttcgtcgagggcctgctggagcgaggcgccaagtacgtgatcgtgcaggggctgccgctgacggggtgcttgccgctggccatgacgctggcgcgcgccgacgaccgcgacgccgtgggctgcgccgcctccgtcaaccgccagagctacgcgcacaaccgccgcctcctggcggccctccgcgcgctgcgccgccgccacccggccgccgtcctcgcgtacgccgactactacgccgcgcacctcgccgtgatgcggagccccgcgcgccacggcttcgccgagcccttccgcacctgctgcggctccggcggcggcgcctacaacttcgacctcttcgccacctgcggctcgccgcaggtcaccacggcctgcgcgcgccccgccgagtacgtcaactgggacggcgtccacatgacggaggccatgtacaaggtcgtcgccggcatgttcttcagtggcgacggctactgccgcccagcgttcaaggacctgctggccatgaaagcccgccaggggaagccgtgattttgagacaatcagaatgcacgttccaattacaataagtagagctgcatgcgtgacgaatccatgtcatcttcatcgtgaacccttaaccatttatcaggcatttataattggatccacatacgtatgatgatgatgagcacaaaggatttaacttctaatgatgacaacacatgaattgtactagaaagaaacgcaacaattccagactccaagaacaacagcacgactcgtttccaggctctaagttctatcgacttccaccgattttttgtctccagaaacagatacccatgcatggcaagactgcaggaccagcaggtgaaaacaattgaatcatagccaactcctgacaaggataaacataatgatgataccgcgaccagctgtagatcttagcagaagcccagattcgggaccaagaaaatgatgtgtgcctagccctgtaacccatctggctggcttctccgacgatatcatttgtcaatttgcccaccttaatatacctcgtatatacaactcaatcctgtacaatgttctcacgaccacatg

SEQ ID NO: 11790 - DNA, 3059 bp, Zea Mays
caaaaaaataaaaaatccgtcgtcgctttgctctgcctccgcggctccgtgtgcccgactgcccgtcccgtgccgccccacttgcagttggagtcgccactcgcttgctgtggtcgggtactcgggtcggcccaccgcctcctaccagcctccgaccaccgcctcgccacttgccccgcgtgcgtcccccgtctccaactccaatggcggcgccctcccacctccacctcccgggctgcccccaaaccctagccctgcccctgccctggccacggggcttctctgctccgcccggcctcctctcccgctcccgacgcctccgcccggtcgccgcgctcgggcccgccgacgccggcgacttgctcggccgagtcgaggcgttactctacaccgtcgcggacgctgctgtctccgcggagcccgtcgcggcggccgggaccaaggaggccgccgccggtgactggctctccagcatcaccaattccatggagaccgtgctcaaggtgctgaaagatggtctattgtctctccatgttccttattcatatggctttgcaatcattctcctcaccgttcttgttaaggcagctacatttcctctaacaaagaagcaggttgagtctgcacttgcaatgaggtcactgcaacctcaagtgaagaccattcaagaacgatatgctggtgatcaggaaaggatacagctcgaaactgctcgcttatacaaattatctggtgttgacccacttgcagggacttctgactgaaggctttttttggataccttctttggccggtcctacaacaattgctgctcaacaaaatggccagggaatatcctggctttttccttttactgatggtcatccacctcttggctggtcagacactttggcatacctcgtgttaccagttcttcttgtcatttcacaatacatatcttctcaagtaatgcagccaccacagagcaatgatcctagccaacaaggtgctcaggctgtaacaaagttcttaccattgctaattggttattttgctctttccgtgccttctggactaggtttgtactggctccattgatacagttcctccaaataatcagaatatttatcagtattgcctttaacaagtcggaatatgggtttttttttccgagaagaagagaggttcaacatagaccagttacaagatgcaatcctctttacagagggcggaaacagagataataaaaagttccattaaaacaaatctaggctacaactaacctgaaaacagggagcaacatgaccaggcaggaggctatgactaagagccctcaacaggagcagtgaggaaggcttacaaataatatcctcagtactgcgcaacaagtgtggcttcaaaagcttggaggtgcaaaaaatcctgtcaaagaatatattgacaaactttcaagagaagaatccaccaatgttcagaagaatggatccactgttcagagcaaacctctgcccaaacttagtaaagcccagcccagccaagagctgaaaccaactggaccgcaacgtggggaaagatttaggaaactaaaggaggaagaatcaaggagaaaagaggttctggggcaagcagaacaatcagaacagtcaagttttgaatctagcgtcgtagatggagcacaaatttctgatgcgtcttctggagacaaaaatgatgaacaggtattaaacaggagcctcatgaaattggaccgatcgtagctaatagcaacggtggagttaaccatagtagaaatgaaaagactgagaatttttcatcagaaaaggaagcagctgacgatcattcctcggtaagcaaacctatgttaccggatgcccacaaattaacggaccaagacaatggaaacgatgcagtatagagagtggatgttagcgtagctagtcgttctgctgctttgatgcgttcactgaaaatcagtggctcagacgtgtctgcttcatcacgctgaggtatagctgtgaggcatagtgagcaatagtttcacgaacatctatcaagaatcacacgaagatgcagcaggaggcaaatttgtttcaaactagaaaccacgctctaggtctaagccctttttcttttcccccacgaatttgtgctgtactgtaggttatgtgatgcatataagagtagtaggtgaaaggattctgagatatcaaagggattctgtccataacgtgtaatgttgttcagttgggggtgggatggatgcaaaggtggcaattcgacattttactacttgtcgtgacaataattttggaatggatgatgatgcctgtcttgagaagcacgtgcaacctcaaactttgacgttgctgatgtaaaaaaaaaatcataaacaacctggatatgttcactggaaagtagttacacatacgaatggacgattagctttagctgtgtgtttacatacaaatatcaaaccgaggaaagcgaccatgttaaataaataaataaaatatcgcagagattttgcaacccctgcacgaaacgaaaccagtctccgctcctcagaaggaggcgaaggctcccgcggcgacagcggcggcggcgcagacgcgcgccgcggcgctggcgagtgcgacgggcgcgttgctggcggcggcgccgcccgcggttgcttcggcgccgggcggggcggggacgtcgtccctgggctcagtcatggtggccccgttgggcgcgccgacaggggcggcgtcctcgtcgtcgtcgacggcgtcctcgtcagaggccggcttgtcgccgtcgaaggaccccagcggggtatgcgccacgggggtcaggatggtgggcatggcgttggcgtcgtcggcggatgcgacagaggccagcgcagcgacgagcgcggcggcgaggagcagcagcagcagcgcccggtgcgaggccatggcggcacggacggagatcacgctcggcgcctttgcgtgggaacgggatgggtcgcaaaataagcaggttatcgtacgtctttgttcttattaggtctatatatgtatatagaaagaagaagaagcgaagcagctgcg

SEQ ID NO: 11791 - DNA, 1200 bp, Zea Mays
acgctagtaaaggacccccgctagtaaatcgagctcggaggcgaatctctcgctaactgtcatcaatggcggccgagcccaagatcctagagctctccaacggcaagatcaccgcgaggatctccaactggggcgccaccatcacctccctcctcgtccccgacgcccagggcatgtcaccttattttggctgcatagttggccgtgtcgcgaataggatcaaggatgggaagtttacactaaacggacttgagtattcattacctgtcaacaatggacctaacagccttcatggtgggttgaagggatttgataaggtcgtgtgggatgtcgtggagcacaaagatggcgaatgcccttcaataacttttcagtatcacagcaaggacggggaagaaggctatccaggcgatgtaaccattcgagcaacatactctcttcctgaagctactactctaaggcttgacatggaagctacaccagagaacaaagcaactcctataagcctggcgcagcacacctactggaacctcgcaggtcacgcctgcggcgacatcttaaaccactcgctgcagatctggggcaagcacatcactccggtcgacgagaacacaattcccaccggcgagataatgcccgtcgatggcaccccttttgacttcacgacggagcgcaggattggcgagcgcatcgacggtgttcctggagggtatgatcataactacgtgctggactgtggcgacgagaaggacggcctgaagcgtgcggccaggctgaaagatccgtcgagcttgcggaccctggacctgtggactgacgcacccggcatgcagctgtacactgccaactacgtggatggcatcggtggcaaggcgggcgctgtctacgcgaagcatgctggagtgtgcttggaaacccaggggttcccgaatgccatcaaccagcctgagtttccctctgtggttgttcggcccggtgagaagtataagcatactatgctgtttgagttctcgggatgttgaatagtgactggacagcataaattgatgtaaaacatgttgaatgaataaacaagcagaaggataagctgtgataataatgcactagtttgcttcagattattgtagaggggtaatcttgtccagacctagccatccttttctgtgacattattgcaatgactgcgtgtttatgctcaac

SEQ ID NO: 11792 - DNA, 1272 bp, Zea Mays
atttcagattcggacgctgaacatataaaggacccccgctagtaaatcgagctcggaggcgaatctctcgctaactgtcatcaatggcggccgagcccaagatcctagagctctccaacggcaagatcaccgcgaggatctccaactggggcgccaccatcacctccctcctcgtccccgacgcccaggggagtgtcgctgatgtggtgctcggattcgatggcttggatccgtacgtgaaaggcatgtcaccttattttggctgcatagttggccgtgtcgcgaataggatcaaggatgggaagtttacactaaacggacttgagtattcattacctgtcaacaatggacctaacagccttcatggtgggttgaagggatttgataaggtcgtgtgggatgtcgtggagcacaaagatggcgaatgcccttcaataacttttcagtatcacagcaaggacggggaagaaggctatccaggcgatgtaaccattcgagcaacatactctcttcctgaagctactactctaaggcttgacatggaagctacaccagagaacaaagcaactcctataagcctggcgcagcacacctactggaacctcgcaggtcacgcctgcggcgacatcttaaaccactcgctgcagatctggggcaagcacatcactccggtcgacgagaacacaattcccaccggcgagataatgcccgtcgatggcaccccttttgacttcacgacggagcgcaggattggcgagcgcatcgacggtgttcctggagggtatgatcataactacgtgctggactgtggcgacgagaaggacggcctgaagcgtgcggccaggctgaaagatccgtcgagcttgcggaccctggacctgtggactgacgcacccggcatgcagctgtacactgccaactacgtggatggcatcggtggcaaggcgggcgctgtctacgcgaagcatgctggagtgtgcttggaaacccaggggttcccgaatgccatcaaccagcctgagtttccctctgtggttgttcggcccggtgagaagtataagcatactatgctgtttgagttctcgggatgttgaatagtgactggacagcataaattgatgtaaaacatgttgaatgaataaacaagcagaaggataagctgtgataataatgcactagtttgcttcagattattgtagaggggtaatcttgtccagacctagccatccttttctgtgacattattgcaatgactgcgtgtttatgctcaac

SEQ ID NO: 11793 - DNA, 1198 bp, Zea Mays
cttccccttgacatcctcattaagatgcagatgcatgatattttggtttttatgtgctcagagggcaagtggtacattgagcctctaccttcaggttctgatggtaaattcgaatttgataacatgattattggacaagcaattccttcaaactttataccagcaatagagaagggttttaaggaagcttgcaattcaggctcgttgattggtcatcctgttgaaaatttaagaattgtattgactgatggggcttcacatcaggtggattccagtgaacttgcttttaagctagctgctatctatgcttttcgacagtgctacacttctgccaaacctgtaatattagaacctgtgatgaaggtggaactcaaatttccaactgagtttcagggcacagtaactggtgatatgaacaagagaaaagggatcattgttggaaatgagcaggaaggtgacgacaccattgtagtttgccatgttccgctaaacaatatgtttggatatgcaacagctattcgatcagcgactcaggggaaaggtgaatttacgatggagtacctggagcataatgttgtatcgcaggatgtgcagatgcaactagtgacctcgtaccaggcggccaagggcacagagtgattcttctttttacagaagaacaaattttgtttgcgaacttttagggcttgttcggttagctctcaatccatgtggattgagcgggattggatgggtttgaatcccaaacagctcaaactttttcacaattttttccaatcccatccaatccatgtgtattgggaataaccgaacaagcccttagtggcatcgacttcccggtcctctggacacgtcacaaatagtaggcgataattcaaactgtggtttcttagtgaaaatacaactatgccgcaataattagcattcccacagtagaattgtacaaaacattatctagcaaatgcctgaagtttagtttgtaatgtcttggtaatgagaacatcttgtgcaatttctcctcaaaaagaaatatctaatgctacactgtgaaggcatggatgttttggttactggtaatatttctccttttcgtttttgggtttctgttcaaactgtttgtttttatattagacaaatggtggtaaagttaagctagaagtttgttgatttattgtggtactattgcgcccgttgctac

SEQ ID NO: 11794 - DNA, 1039 bp, Zea Mays
gaaacataatggatgaaaagagatgagagaagcagcagaggaggaaagaaaagtacattgagcctctaccttcaggttctgatggtaaattcgaatttgataacatgattattggacaagcaattccttcaaactttataccagcaatagagaagggttttaaggaagcttgcaattcaggctcgttgattggtcatcctgttgaaaatttaagaattgtattgactgatggggcttcacatcaggtggattccagtgaacttgcttttaagctagctgctatctatgcttttcgacagtgctacacttctgccaaacctgtaatattagaacctgtgatgaaggtggaactcaaatttccaactgagtttcagggcacagtaactggtgatatgaacaagagaaaagggatcattgttggaaatgagcaggaaggtgacgacaccattgtagtttgccatgttccgctaaacaatatgtttggatatgcaacagctattcgatcagcgactcaggggaaaggtgaatttacgatggagtacctggagcataatgttgtatcgcaggatgtgcagatgcaactagtgacctcgtaccaggcggccaagggcacagagtgattcttctttttacagaagaacaaattttgtttgcgaacttttagtggcatcgacttcccggtcctctggacacgtcacaaatagtaggcgataattcaaactgtggtttcttagtgaaaatacaactatgccgcaataattagcattcccacagtagaattgtacaaaacattatctagcaaatgcctgaagtttagtttgtaatgtcttggtaatgagaacatcttgtgcaatttctcctcaaaaagaaatatctaatgctacactgtgaaggcatggatgttttggttactggtaatatttctccttttcgtttttgggtttctgttcaaactgtttgtttttatattagacaaatggtggtaaagttaagctagaagtttgttgatttattgtggtactattgcgcccgttgctac

SEQ ID NO: 11795 - DNA, 1633 bp, Zea Mays
tgttcagcataactgttgatgaaaagcattggtgatttcaggaaaacacattgttcctcgcttggtaaggatgcactctaatgagatggaggatattcaagaagcatatgctggccaaattgttgctgtttttggtgttgattgtgcatcaggcgatacatttacggatggaacagtgaaatatactatgacttcaatgaatgtccctgaacctgtgatgtccttggcagtttcacctatatctaaagactctggaggacagttttcaaaagctctgaatcgcttccaaaaggaggatcctactttccgtgtgggtttggatgctgagagtggccagacaattatttccgggatgggtgagctgcatctggatatatacgttgaacgtattaagagagagtacaaggtggatgcaaaggtaggaaaacctcgtgttaacttcagggaaacaattacccagcgtgctgaatttgattatttgcacaaaaagcaatctggcggtcaaggtacattgagcctctaccttcaggttctgatggtaaattcgaatttgataacatgattattggacaagcaattccttcaaactttataccagcaatagagaagggttttaaggaagcttgcaattcaggctcgttgattggtcatcctgttgaaaatttaagaattgtattgactgatggggcttcacatcaggtggattccagtgaacttgcttttaagctagctgctatctatgcttttcgacagtgctacacttctgccaaacctgtaatattagaacctgtgatgaaggtggaactcaaatttccaactgagtttcagggcacagtaactggtgatatgaacaagagaaaagggatcattgttggaaatgagcaggaaggtgacgacaccattgtagtttgccatgttccgctaaacaatatgtttggatatgcaacagctattcgatcagcgactcaggggaaaggtgaatttacgatggagtacctggagcataatgttgtatcgcaggatgtgcagatgcaactagtgacctcgtaccaggcggccaagggcacagagtgattcttctttttacagaagaacaaattttgtttgcgaacttttagggcttgttcggttagctctcaatccatgtggattgagcgggattggatgggtttgaatcccaaacagctcaaactttttcacaattttttccaatcccatccaatccatgtgtattgggaataaccgaacaagcccttagtggcatcgacttcccggtcctctggacacgtcacaaatagtaggcgataattcaaactgtggtttcttagtgaaaatacaactatgccgcaataattagcattcccacagtagaattgtacaaaacattatctagcaaatgcctgaagtttagtttgtaatgtcttggtaatgagaacatcttgtgcaatttctcctcaaaaagaaatatctaatgctacactgtgaaggcatggatgttttggttactggtaatatttctccttttcgtttttgggtttctgttcaaactgtttgtttttatattagacaaatggtggtaaagttaagctagaagtttgttgatttattgtggtactattgcgcccgttgctac

SEQ ID NO: 11796 - DNA, 2921 bp, Zea Mays
ggcctgttggagtcagccaaagtgctgctgcacttcaagagtcagccaaaagagctgcttcactctgggtgttgttctctagggttttctgtagccgacctaggccacgcaaagtccaaaacccagagccatcgctgccgcctcggtcgcgattcctaaaggcggcgatggccatgacgcggcgttctgcttcccatctcctatccgccttccggcccttctccctcctcctccagccgcacctcgtcgactcttcgccggcggccgcgtcggcgaggcgggcgatgtcgtcggcgtcggccctgcgtgcacgggacgagaaggatgtggcgcggtggcgggagtcgatgggccggatgcggaatatcggtatctccgcgcacatcgactccgggaagacgacgctcacagagcgagtcctctactacacgggtcggatccacgagattcacgaggtgcgcggccgtgacggcgtcggtgctaagatggactccatggacctagagcgcgaaaaggggatcaccattcagtctgctgccacctactgcacctggaaggattaccagattaatattattgatactccaggtcacgtggatttcaccattgaggttgaaagggcactccgtgttcttgatggagctatacttgtactatgtagtgttggtggagtacaaagtcagtcgataactgttgatcggcaaatgagaagatatgaaatcccaagggttgcttttattaacaagttggaccgtatgggagctgatccatggaaggttcttaaccaggcgcgatccaagctccgtcaccacaatgcagctgtacaagtacccataggattagaagaggagtttgagggccttgttgaccttgtagaaatgaaggcttataagttcgagggatctagtggccagaatgtaactgcttctgatgttccattgaatatggaggatttagtcactgagaagcgtcgtgaacttattgaagttgtttctgaagtagatgaccagcttgctgaagcttttctcaatgatgagccaataacagctaatcagcttaaggcggctattcgaagagctacagtggcacggaagttcataccagtatacatgggaagtgcattcaaaaataagggtgttcaaccacttcttgatggcgtgctggattatctaccgtgcccgttggaggtttataactacgcccttgatcaaaacaaatctgaagagaaggtattattagctggaactccagctgaaccacttgtggcattagcatttaagctagaggaaggtcgttttggtcagctgacctatctaagaatctatgacggcgttatacggaagggtgacttcatatacaatgtcaatacagggaagaaaatcaaagttcctcgcttggtaaggatgcactctaatgagatggaggatattcaagaagcatatgctggccaaattgttgctgtttttggtgttgattgtgcatcaggcgatacatttacggatggaacagtgaaatatactatgacttcaatgaatgtccctgaacctgtgatgtccttggcagtttcacctatatctaaagactctggaggacagttttcaaaagctctgaatcgcttccaaaaggaggatcctactttccgtgtgggtttggatgctgagagtggccagacaattatttccgggatgggtgagctgcatctggatatatacgttgaacgtattaagagagagtacaaggtggatgcaaaggtaggaaaacctcgtgttaacttcagggaaacaattacccagcgtgctgaatttgattatttgcacaaaaagcaatctggcggtcaaggtcagtatggacgagtttgtgggtacattgagcctctaccttcaggttctgatggtaaattcgaatttgataacatgattattggacaagcaattccttcaaactttataccagcaatagagaagggttttaaggaagcttgcaattcgtggattccagtgaacttgcttttaagctagctgctatctatgcttttcgacagtgctacacttctgccaaacctgtaatattagaacctgtgatgaaggtggaactcaaatttccaactgagtttcagggcacagtaactggtgatatgaacaagagaaaagggatcattgttggaaatgagcaggaaggtgacgacaccattgtagtttgccatgttccgctaaacaatatgtttggatatgcaacagctattcgatcagcgactcaggggaaaggtgaatttacgatggagtacctggagcataatgttgtatcgcaggatgtgcagatgcaactagtgacctcgtaccaggcggccaagggcacagagtgattcttctttttacagaagaacaaattttgtttgcgaacttttagggcttgttcggttagctctcaatccatgtggattgagcgggattggatgggtttgaatcccaaacagctcaaactttttcacaattttttccaatcccatccaatccatgtgtattgggaataaccgaacaagcccttagtggcatcgacttcccggtcctctggacacgtcacaaatagtaggcgataattcaaactgtggtttcttagtgaaaatacaactatgccgcaataattagcattcccacagtagaattgtacaaaacattatctagcaaatgcctgaagtttagtttgtaatgtcttggtaatgagaacatcttgtgcaatttctcctcaaaaagaaatatctaatgctacactgtgaaggcatggatgttttggttactggtaatatttctccttttcgtttttgggtttctgttcaaactgtttgtttttatattagacaaatggtggtaaagttaagctagaagtttgttgatttattgtggtactattgcgcccgttgctac

SEQ ID NO: 11797 - DNA, 2731 bp, Zea Mays
ggcctgttggagtcagccaaagtgctgctgcacttcaagagtcagccaaaagagctgcttcactctgggtgttgttctctagggttttctgtagccgacctaggccacgcaaagtccaaaacccagagccatcgctgccgcctcggtcgcgattcctaaaggcggcgatggccatgacgcggcgttctgcttcccatctcctatccgccttccggcccttctccctcctcctccagccgcacctcgtcgactcttcgccggcggccgcgtcggcgaggcgggcgatgtcgtcggcgtcggccctgcgtgcacgggacgagaaggatgtggcgcggtggcgggagtcgatgggccggatgcggaatatcggtatctccgcgcacatcgactccgggaagacgacgctcacagagcgagtcctctactacacgggtcggatccacgagattcacgaggtgcgcggccgtgacggcgtcggtgctaagatggactccatggacctagagcgcgaaaaggggatcaccattcagtctgctgccacctactgcacctggaaggattaccagtgttggtggagtacaaagtcagtcgataactgttgatcggcaaatgagaagatatgaaatcccaagggttgcttttattaacaagttggaccgtatgggagctgatccatggaaggttcttaaccaggcgcgatccaagctccgtcaccacaatgcagctgtacaagtacccataggattagaagaggagtttgagggccttgttgaccttgtagaaatgaaggcttataagttcgagggatctagtggccagaatgtaactgcttctgatgttccattgaatatggaggatttagtcactgagaagcgtcgtgaacttattgaagttgtttctgaagtagatgaccagcttgctgaagcttttctcaatgatgagccaataacagctaatcagcttaaggcggctattcgaagagctacagtggcacggaagttcataccagtatacatgggaagtgcattcaaaaataagggtgttcaaccacttcttgatggcgtgctggattatctaccgtgcccgttggaggtttataactacgcccttgatcaaaacaaatctgaagagaaggtattattagctggaactccagctgaaccacttgtggcattagcatttaagctagaggaaggtcgttttggtcagctgacctatctaagaatctatgacggcgttatacggaagggtgacttcatatacaatgtcaatacagggaagaaaatcaaagttcctcgcttggtaaggatgcactctaatgagatggaggatattcaagaagcatatgctggccaaattgttgctgtttttggtgttgattgtgcatcaggcgatacatttacggatggaacagtgaaatatactatgacttcaatgaatgtccctgaacctgtgatgtccttggcagtttcacctatatctaaagactctggaggacagttttcaaaagctctgaatcgcttccaaaaggaggatcctactttccgtgtgggtttggatgctgagagtggccagacaattatttccgggatgggtgagctgcatctggatatatacgttgaacgtattaagagagagtacaaggtggatgcaaaggtaggaaaacctcgtgttaacttcagggaaacaattacccagcgtgctgaatttgattatttgcacaaaaagcaatctggcggtcaaggtacattgagcctctaccttcaggttctgatggtaaattcgaatttgataacatgattattggacaagcaattccttcaaactttataccagcaatagagaagggttttaaggaagcttgcaattcaggctcgttgattggtcatcctgttgaaaatttaagaattgtattgactgatggggcttcacatcaggtggattccagtgaacttgcttttaagctagctgctatctatgcttttcgacagtgctacacttctgccaaacctgtaatattagaacctgtgatgaaggtggaactcaaatttccaactgagtttcagggcacagtaactggtgatatgaacaagagaaaagggatcattgttggaaatgagcaggaaggtgacgacaccattgtagtttgccatgttccgctaaacaatatgtttggatatgcaacagctattcgatcagcgactcaggggaaaggtgaatttacgatggagtacctggagcataatgttgtatcgcaggatgtgcagatgcaactagtgacctcgtaccaggcggccaagggcacagagtgattcttctttttacagaagaacaaattttgtttgcgaacttttagtggcatcgacttcccggtcctctggacacgtcacaaatagtaggcgataattcaaactgtggtttcttagtgaaaatacaactatgccgcaataattagcattcccacagtagaattgtacaaaacattatctagcaaatgcctgaagtttagtttgtaatgtcttggtaatgagaacatcttgtgcaatttctcctcaaaaagaaatatctaatgctacactgtgaaggcatggatgttttggttactggtaatatttctccttttcgtttttgggtttctgttcaaactgtttgtttttatattagacaaatggtggtaaagttaagctagaagtttgttgatttattgtggtactattgcgcccgttgctac

SEQ ID NO: 11798 - DNA, 2883 bp, Zea Mays
caaaagctgacttaaaaactaggtatttggtagtaagaggctggcctgttggaaactaggtatttggtagtaagaggctggcctgttggagtcagccaaagtgctgctgcacttcaagagtcagccaaaagagctgcttcactctgggtgttgttctctagggttttctgtagccgacctaggccacgcaaagtccaaaacccagagccatcgctgccgcctcggtcgcgattcctaaaggcggcgatggccatgacgcggcgttctgcttcccatctcctatccgccttccggcccttctccctcctcctccagccgcacctcgtcgactcttcgccggcggccgcgtcggcgaggcgggcgatgtcgtcggcgtcggccctgcgtgcacgggacgagaaggatgtggcgcggtggcgggagtcgatgggccggatgcggaatatcggtatctccgcgcacatcgactccgggaagacgacgctcacagagcgagtcctctactacacgggtcggatccacgagattcacgaggtgcgcggccgtgacggcgtcggtgctaagatggactccatggacctagagcgcgaaaaggggatcaccattcagtctgctgccacctactgcacctggaaggattaccaggtcacgtggatttcaccattgaggttgaaagggcactccgtgttcttgatggagctatacttgtactatgtagtgttggtggagtacaaagtcagtcgataactgttgatcggcaaatgagaagatatgaaatcccaagggttgcttttattaacaagttggaccgtatgggagctgatccatggaaggttcttaaccaggcgcgatccaagctccgtcaccacaatgcagctgtacaagtacccataggattagaagaggagtttgagggccttgttgaccttgtagaaatgaaggcttataagttcgagggatctagtggccagaatgtaactgcttctgatgttccattgaatatggaggatttagtcactgagaagcgtcgtgaacttattgaagttgtttctgaagtagatgaccagcttgctgaagcttttctcaatgatgagccaataacagctaatcagcttaaggcggctattcgaagagctacagtggcacggaagttcataccagtatacatgggaagtgcattcaaaaataagggtgttcaaccacttcttgatggcgtgctggattatctaccgtgcccgttggaggtttataactacgcccttgatcaaaacaaatctgaagagaaggtattattagctggaactccagctgaaccacttgtggcattagcatttaagctagaggaaggtcgttttggtcagctgacctatctaagaatctatgacggcgttatacggaagggtgacttcatatacaatgtcaatacagggaagaaaatcaaagttcctcgcttggtaaggatgcactctaatgagatggaggatattcaagaagcatatgctggccaaattgttgctgtttttggtgttgattgtgcatcaggcgatacatttacggatggaacagtgaaatatactatgacttcaatgaatgtccctgaacctgtgatgtccttggcagtttcacctatatctaaagactctggaggacagttttcaaaagctctgaatcgcttccaaaaggaggatcctactttccgtgtgggtttggatgctgagagtggccagacaattatttccgggatgggtgagctgcatctggatatatacgttgaacgtattaagagagagtacaaggtggatgcaaaggtaggaaaacctcgtgttaacttcagggaaacaattacccagcgtgctgaatttgattatttgcacaaaaagcaatctggcggtcaaggtacattgagcctctaccttcaggttctgatggtaaattcgaatttgataacatgattattggacaagcaattccttcaaactttataccagcaatagagaagggttttaaggaagcttgcaattcaggctcgttgattggtcatcctgttgaaaatttaagaattgtattgactgatggggcttcacatcaggtggattccagtgaacttgcttttaagctagctgctatctatgcttttcgacagtgctacacttctgccaaacctgtaatattagaacctgtgatgaaggtggaactcaaatttccaactgagtttcagggcacagtaactggtgatatgaacaagagaaaagggatcattgttggaaatgagcaggaaggtgacgacaccattgtagtttgccatgttccgctaaacaatatgtttggatatgcaacagctattcgatcagcgactcaggggaaaggtgaatttacgatggagtacctggagcataatgttgtatcgcaggatgtgcagatgcaactagtgacctcgtaccaggcggccaagggcacagagtgattcttctttttacagaagaacaaattttgtttgcgaacttttagtggcatcgacttcccggtcctctggacacgtcacaaatagtaggcgataattcaaactgtggtttcttagtgaaaatacaactatgccgcaataattagcattcccacagtagaattgtacaaaacattatctagcaaatgcctgaagtttagtttgtaatgtcttggtaatgagaacatcttgtgcaatttctcctcaaaaagaaatatctaatgctacactgtgaaggcatggatgttttggttactggtaatatttctccttttcgtttttgggtttctgttcaaactgtttgtttttatattagacaaatggtggtaaagttaagctagaagtttgttgatttattgtggtactattgcgcccgttgctac

SEQ ID NO: 11799 - DNA, 2345 bp, Zea Mays
ggcctgttggagtcagccaaagtgctgctgcacttcaagagtcagccaaaagagctgcttcactctgggtgttgttctctagggttttctgtagccgacctaggccacgcaaagtccaaaacccagagccatcgctgccgcctcggtcgcgattcctaaaggcggcgatggccatgacgcggcgttctgcttcccatctcctatccgccttccggcccttctccctcctcctccagccgcacctcgtcgactcttcgccggcggccgcgtcggcgaggcgggcgatgtcgtcggcgtcggccctgcgtgcacgggacgagaaggatgtggcgcggtggcgggagtcgatgggccggatgcggaatatcggtatctccgcgcacatcgactccgggaagacgacgctcacagagcgagtcctctactacacgggtcggatccacgagattcacgaggtgcgcggccgtgacggcgtcggtgctaagatggactccatggacctagagcgcgaaaaggggatcaccattcagtctgctgccacctactgcacctggaaggattaccagattaatattattgatactccaggtcacgtggatttcaccattgaggttgaaagggcactccgtgttcttgatggagctatacttgtactatgtagtgttggtggagtacaaagtcagtcgataactgttgatcggcaaatgagaagatatgaaatcccaagggttgcttttattaacaagttggaccgtatgggagctgatccatggaaggttcttaaccaggcgcgatccaagctccgtcaccacaatgcagctgtacaagtacccataggattagaagaggagtttgagggccttgttgaccttgtagaaatgaaggcttataagttcgagggatctagtggccagaatgtaactgcttctgatgttccattgaatatggaggatttagtcactgagaagcgtcgtgaacttattgaagttgtttctgaagtagatgaccagcttgctgaagcttttctcaatgatgagccaataacagctaatcagcttaaggcggctattcgaagagctacagtggcacggaagttcataccagtatacatgggaagtgcattcaaaaataagggtgttcaaccacttcttgatggcgtgctggattatctaccgtgcccgttggaggtttataactacgcccttgatcaaaacaaatctgaagagaaggtattattagctggaactccagctgaaccacttgtggcattagcatttaagctagaggaaggtcgttttggtcagctgacctatctaagaatctatgacggcgttatacggaagggtgacttcatatacaatgtcaatacagggaagaaaatcaaagttcctcgcttggtaaggatgcactctaatgagatggaggatattcaagaagcatatgctggccaaattgttgctgtttttggtgttgattgtgcatcaggcgatacatttacggatggaacagtgaaatatactatgacttcaatgaatgtccctgaacctgtgatgtccttggcagtttcacctatatctaaagactctggaggacagttttcaaaagctctgaatcgcttccaaaaggaggatcctactttccgtgtgggtttggatgctgagagtggccagacaattatttccgggatgggtgagctgcatctggatatatacgttgaacgtattaagagagagtacaaggtggatgcaaaggtaggaaaacctcgtgttaacttcagggaaacaattacccagcgtgctgaatttgattatttgcacaaaaagcaatctggcggtcaaggtcagtatggacgagtttgtgggtacattgagcctctaccttcaggttctgatggtaaattcgaatttgataacatgattattggacaagcaattccttcaaactttataccagcaatagagaagggttttaaggaagcttgcaattcaggctcgttgattggtcatcctgttgaaaatttaagaattgtattgactgatggggcttcacatcaggtggattccagtgaacttgcttttaagctagctgctatctatgcttttcgacagtgctacacttctgccaaacctgtaatattagaacctgtgatgaaggtggaactcaaatttccaactgagtttcagggcacagtaactggtgatatgaacaagagaaaagggatcattgttggaaatgagcaggaaggtgacgacaccattgtagtttgccatgttccgctaaacaatatgtttggatatgcaacagctattcgatcagcgactcaggccagggaaggcaaagccgag

SEQ ID NO: 11800 - DNA, 2337 bp, Zea Mays
ggcctgttggagtcagccaaagtgctgctgcacttcaagagtcagccaaaagagctgcttcactctgggtgttgttctctagggttttctgtagccgacctaggccacgcaaagtccaaaacccagagccatcgctgccgcctcggtcgcgattcctaaaggcggcgatggccatgacgcggcgttctgcttcccatctcctatccgccttccggcccttctccctcctcctccagccgcacctcgtcgactcttcgccggcggccgcgtcggcgaggcgggcgatgtcgtcggcgtcggccctgcgtgcacgggacgagaaggatgtggcgcggtggcgggagtcgatgggccggatgcggaatatcggtatctccgcgcacatcgactccgggaagacgacgctcacagagcgagtcctctactacacgggtcggatccacgagattcacgaggtgcgcggccgtgacggcgtcggtgctaagatggactccatggacctagagcgcgaaaaggggatcaccattcagtctgctgccacctactgcacctggaaggattaccagattaatattattgatactccaggtcacgtggatttcaccattgaggttgaaagggcactccgtgttcttgatggagctatacttgtactatgtagtgttggtggagtacaaagtcagtcgataactgttgatcggcaaatgagaagatatgaaatcccaagggttgcttttattaacaagttggaccgtatgggagctgatccatggaaggttcttaaccaggcgcgatccaagctccgtcaccacaatgcagctgtacaagtacccataggattagaagaggagtttgagggccttgttgaccttgtagaaatgaaggcttataagttcgagggatctagtggccagaatgtaactgcttctgatgttccattgaatatggaggatttagtcactgagaagcgtcgtgaacttattgaagttgtttctgaagtagatgaccagcttgctgaagcttttctcaatgatgagccaataacagctaatcagcttaaggcggctattcgaagagctacagtggcacggaagttcataccagtatacatgggaagtgcattcaaaaataagggtgttcaaccacttcttgatggcgtgctggattatctaccgtgcccgttggaggtttataactacgcccttgatcaaaacaaatctgaagagaaggtattattagctggaactccagctgaaccacttgtggcattagcatttaagctagaggaaggtcgttttggtcagctgacctatctaagaatctatgacggcgttatacggaagggtgacttcatatacaatgtcaatacagggaagaaaatcaaagttcctcgcttggtaaggatgcactctaatgagatggaggatattcaagaagcatatgctggccaaattgttgctgtttttggtgttgattgtgcatcaggcgatacatttacggatggaacagtgaaatatactatgacttcaatgaatgtccctgaacctgtgatgtccttggcagtttcacctatatctaaagactctggaggacagttttcaaaagctctgaatcgcttccaaaaggaggatcctactttccgtgtgggtttggatgctgagagtggccagacaattatttccgggatgggtgagctgcatctggatatatacgttgaacgtattaagagagagtacaaggtggatgcaaaggtaggaaaacctcgtgttaacttcagggaaacaattacccagcgtgctgaatttgattatttgcacaaaaagcaatctggcggtcaaggtcagtatggacgagtttgtgggtacattgagcctctaccttcaggttctgatggtaaattcgaatttgataacatgattattggacaagcaattccttcaaactttataccagcaatagagaagggttttaaggaagcttgcaattcaggctcgttgattggtcatcctgttgaaaatttaagaattgtattgactgatggggcttcacatcaggtggattccagtgaacttgcttttaagctagctgctatctatgcttttcgacagtgctacacttctgccaaacctgtaatattagaacctgtgatgaaggtggaactcaaatttccaactgagtttcagggcacagtaactggtgatatgaacaagagaaaagggatcattgttggaaatgagcaggaaggtgacgacaccattgtagtttgccatgttccgctaaacaatatgtttggatatgcaacagctattcgatcagcgactcagcgcacactatttg

SEQ ID NO: 11801 - DNA, 3092 bp, Zea Mays
tggagataaggtcagggtcactatggcaaaattgaagctctaacattagtgaacaactttgctataccaaccttgaccaggtgctgaacaattttttgagtaaatcgctctcaaacatgctctgtcaggcgctctgaatagagttccgatggtacattcactgaacaagattgcagatacagcgtatctcgccgccggtgacccacacactcggattcgcgccggcgctgcgattcatgccaagtaacgcgcggataacgacccctggtgaaaagatctcgccgtggatgaactcggagcactgtggccgctttgtcgcccatcttaccggcaacgtggtcgatcggtcgtcgtcgggatgtacaccattcattgcgattgcgccatgtagtgaccctttcaccacgtcgttaccagccgtaatagctcaccggtgaccgtcgtagacccttagcctgtgacagccatgataacacttgcgccagtgacttcccctctctccagctgccagcacacttccttcaaattggacgccaccactgatgaattctataaattgcggcccagtgagttccgctaggtaattacgcatccaacacaccagcccttgcctcggatcatccaccagaacctcctaattccgtgtttcccccaaatacgttttccgtgccaccgtgaacgccttgccgtggccagccttctgcaggtcagttcaagtttctttactggatgttctagcctcccttaagttccctgctactcgtagacccgtttaattgaactagactgtcctagatcaccaagaacacatcggattgttctcggttttcgccatcgccgtgaacagaaggattccaggctagaatcgtgcaattgatagaaggattagggttgccgggggtggaattaggtgtcgaacaaaggagagccctagtcgttgcgttttccggctagtacaagttcgccggagatgtgctcgtcactgtccaccatcgtggacctggcgctgcgaagaaatagaagtacgaggacctaaccgcaactgtcagcgacacaagtaaatagtgaaaagggttcttaaccagttattcaaacagctagggtcctctgcgcaaagttgacaacacgggcgcgcgcgggcgcgtttcacctgaacatgggccgacttgggctggtttgagcccattactattcattccttttcttttcttttcctgccaggcttagggagtttgtagaaaattctagaaaaatgataaaattaagagaccaattttactagattcctaatttcctctagaatttaataaaaatagttccaagatttttagccccaaccatgaattatttaacatttaagagggcctaaacctagacttttggaattttagaaattatttgataactccaaaaatcacaagacttttgggtaagtttaattgggcaactagaacccatgggtgaagtttgacatgttttggaccttgtttgatcccaaaaccctagttccttagaataaaactgcctaactctactagggtgttaacctagaagaccctagtttccctggtgtatcgtgaaggaaagttgtattcaagatacaacttgatgtgtcactaatataactgcatattcatagcatcacatgggcattcatgtttatatatggttatgtatagaaaacaaagaagaagtaagtgttgaagaagaagagactgcgccaccaactgaaactccacctgtcgggaattgtttttattttgatatctgtggaacaaatctcgaatcccctacaacacaaggcaagccccagtgcatttacctttccttgtgattttaaactctttatcacttgaatgatgcattagctgataggagttgggtgttaagccaattgttgcatttccttccttggaacggtttatccttccttgattacatgttttattaaaaggttttctgatgcttagtcttgctttagaaaacaaaaatgttttgtttttaacaaaagatgatgcttcagatggaataggatgttttcaaaaataaaacctgatggtggatccatcatggctgtgatggttcaacatcggacaagatgtacctctgccaggtaccaaactttgggattttaaatgataaagctgagaccgggcgggtgacttgcacgagaagagagtctcggtgtagtgtctccgtctgagtcgattaaggaccgtgtcaatataggcttgatgatcgaggaccttttaactggtcacatgcctcgtcgtgggtaagctttgcctcgggcagactaataccagaaaggtcaacacaaaatgggagtggagagatggcgagagtagtgtgtaccctccgtggcaagaggttggacggtggtgcatctgtgctctcggttggcgtgaacccagtctggtcttaagaaacccggtggcgagttgacatatgcaagggttaagtgctacatatgtcgtgtgattggagatccccagctgggtattaatcgattcggatcgctgttacttctcgaacatgaagacttggtcactgacttacacgtagcattccagtgaactaaagggttgataaaagacaactagtgtaggtcaagtccttgaactagggtagagagaactctagctgcaggtaatgacttaacttgataataaaactagatttttaaggatcgactgttagtaagcatttctgcaaacagaatctttgattcttgaatagccttaccttaattccctcaagccagcatatccttgagagttttatcttttgtcgggtaagacttgtgaaagtacactccatactcagggttttcgaacccatgttgttgtaggtgagaaaacaacggacttttgttgtttttgttcaaaggtggtacccaaagaagagccccagcagtgaagtccgggaggatgttggcctccgactttttaaaacaataaacttgtgtgtggaagggtgttttgcctccctggtctgtaataatactttatgcactctaagtacccgggtattgtaataataataatactctctctatatattggatgaatataaattaagttattgtaatt

SEQ ID NO: 11802 - DNA, 1210 bp, Zea Mays
atcgatgctcccaaggaagcccaaacaagacagaactgctaaatagctgatgaccccgagaacgtccaagcatcatcagccagacagccacccggaccggacgtatatcttggggcgccgccgccggcagatcgcatacggcgacacgaacaacggaagagggcaatatatctacaccaccacgccgcctccagccagcctcccttctcgtttgctttccttctgctagctcgccgatccgatcggtcctcttctacactcttccatcgagctagtgccatccatgatccatggcgcacggcgccacggttccgctgggcaaatcgatgcggcgcgcgctgcggaccgccatcggcatacccaagaagaataagccgccgccgccgccgctgttgccaaacggcagcggcagggacccgggcgtgtccatggagctgagcagctcgtcgtcggtggcggcgaggaaggaggcggtggtgcgggtggtgatgcgcggcggggtggtggaggtgtacccgggcgtggtgctggcgtgcaccgtcatccggaaccacccgccggggctgtgcctggcgcacccggacgtgttccgcaacccgcacggcgccgtcgtccgcccgctcgagccgctcttccccggccagaagttcctgctgctccccgagaccaccgtggtccggctcaagcagaggatcccggagagctccatcggcgccttcgcggacgaggaggagtacggcgacgaggacgagacgtcgtcgtcctcctcctcctcggaggctgacgaggttggcgccatgacggcgtgcagcgccagggattacttcgtggccagggaccggtggtcggagtgccgcttcaggaggctcgtggagcaggggttcgccgtggagccgagcaaggacggcgacgacgacgacgacgagccggccgagagggagaaggacagggcaagggcgacgacgaagaaggggaacaggaagaggcggaaggggaggcggcggagagaccgtcgtagtagtccggtgccccagctgctgccggtggggctcaggggattcgcgacggcgaggaggacgtgggagcccagcctgccgtccgtggaggaggaggaggaggaggccgccgtctctcctcgccaccgtcctccgtcgggggccaacaaaaggtcatgcatgaaccgctatcagtgagaaaacaacggactttt

SEQ ID NO: 11803 - DNA, 3097 bp, Zea Mays
aaacaaacaaaaaacttcgaacctagaactagaacgagcatccgagcaaggcaccaaatgacctatgcatggacgatgccgtgtcgacgagccggcccgtgggttgcgttgcattgacgtcaagcgtcagtgcgtgtcatgcatgtcggcgtgcccccatcgacctctccgccccgtcgtggccctacgtgagcgcatgggtcaccataaccttccctcgtcgtcgtccagctcgatccatgcatcgatgctcccaaggaagcccaaacaagacagaactgctaaatagctgatgaccccgagaacgtccaagcatcatcagccagacagccacccggaccggacgtatatcttggggcgccgccgccggcagatcgcatacggcgacacgaacaacggaagagggcaatatatctacaccaccacgccgcctccagccagcctcccttctcgtttgctttccttctgctagctcgccgatccgatcggtcctcttctacactcttccatcgagctagtgccatccatgatccatggcgcacggcgccacggttccgctgggcaaatcgatgcggcgcgcgctgcggaccgccatcggcatacccaagaagaataagccgccgccgccgccgctgttgccaaacggcagcggcagggacccgggcgtgtccatggagctgagcagctcgtcgtcggtggcggcgaggaaggaggcggtggtgcgggtggtgatgcgcggcggggtggtggaggtgtacccgggcgtggtgctggcgtgcaccgtcatccggaaccacccgccggggctgtgcctggcgcacccggacgtgttccgcaacccgcacggcgccgtcgtccgcccgctcgagccgctcttccccggccagaagttcctgctgctccccgagaccaccgtggtccggctcaagcagaggatcccggagagctccatcggcgccttcgcggacgaggaggagtacggcgacgaggacgagacgtcgtcgtcctcctcctcctcggaggctgacgaggttggcgccatgacggcgtgcagcgccagggattacttcgtggccagggaccggtggtcggagtgccgcttcaggaggctcgtggagcaggggttcgccgtggagccgagcaaggacggcgacgacgacgacgacgagccggccgagagggagaaggacagggcaagggcgacgacgaagaaggggaacaggaagaggcggaaggggaggcggcggagagaccgtcgtagtagtccggtgccccagctgctgccggtggggctcaggggattcgcgacggcgaggaggacgtgggagcccagcctgccgtccgtggaggaggaggaggaggaggccgccgtctctcctcgccaccgtcctccgtcgggggccaacaaaaggtcatgcatgaaccgctatcagtaagctgaccagtggtgttcgttgttacacttttgcttgcacttgcacatagtcgtgtcgtcgtcatggtgtcctgaggacagttcaaagcggccggccgatcactctctgcacatacagtgctctggcctctctggtccgatccgtgtgcgtgcggcttgaccttgttgtgatcgatcatcgtgtcgtgcgcgcattggtgttttcgatcgtggtggtattggcaatgcgtctttactagctgtctcatcatgcatacataaacaactctacgttgtctcgtaaaaaaccttagttctacttgaaacatgttttttaaggattaacacagtgctggttaatgctcttgggttttcctctggattattgtgctcaagagcacattcagaatgcaataggttcctttggcagggttattatatgggatgttgagaggtctaatcgcactacgttgcttataaaagctcgtgtcacgtctttggaagaggtacctcaattcatagtcttcagtatagcagaggactttcaggggattttctggactattcaatgtgaaattattcagaaaaacatgttaggtactcaacctgaagatgaagacgatgttccccttaccctcggaatggccagcagcttcttgtggagttttttgggtctgggacaacctgttgtccctggtggatttgatctcaatgtgccacctggtgttaatcctcacaatgctgatgaagatcggtgggatgagtgcatgtgatatcctggaccctaggatggtgatgtccttggccaaggcttaatagaattaatagagtatccatagcagcaagtgcatcttctttttcggaagcctatctcgaaagaacctccaagttaagcgtgctcgacttggagcaatttaggatgggtgaccgaccgggaagttttctcgggtgcgcatgagtgaggacaaagtgtgcacaaaagactcgtgttggtctgtggggacaatatatgatcctagcgagtaagtatctgtcaggagactgaagatgtcagagcgtaggaatgcggaagagtaattgactgagcgcagggaagctgatacagttccagaggctgaaacgaagatgggccgcagtcgtcgtgtgcgccggcccagtggatgttttccttctgatatatggaccaaatgagtccttgttctgtaatcgcataaaggggaaacagagaggaggaacaaatacttttgaacacaaagaatacgaatacttccaaccgccaactccttgtctccttccttcgtccttagaattcctggttagctacgtaggacgctaacaattggtattagatttcaaggttccaagtacgcttccctctctggtgattcgatggcgggtgcttcagacgccaggctcgcaggcgccctagaagcacaagcgaagacgatggcgatgcaagccaagttgttgcagcagatctgcgaccgattggatgcacaagaccgccattgggaggcattggagaggacggtcgcgggcaatgcttcttccatagcatcgctgaagccagcggtgagcggcatcgacgcgactgcagttcagtccgagattaccaagtccctctcgtcgcacttggagactcggctatccgacgtgaggtccttgacgtgggagcggatcgac

SEQ ID NO: 11804 - DNA, 1960 bp, Zea Mays
gacgggggagaatgttgccgagccacgtggcaatctatctcacagcctgaatcagaatcagcccgcgcctcccctcccacctccactcgtttcgctcctctgaatcccccccgggccccggcacggaattccccccggcacaccccccaaggccaccggacgccagcagccccgcccccgcccacacctacgtacgagcgcaatgctggcggcgtccctcaggccggggccttcgctcgcggccttccccggtaccgcccagaggagcccagttcctttcctccccttccctgcccgcctccaccaccggcccgtcctcctctccgcgaccgccgagggaaccggcgcccccgccggccagggagacgcctcggctgccccgctcgacgaggtgcgcctgccgcagttcgctgcggactgggaatccgcgcgcgcgtgcaaggaccaggggaggatcttctcgctgccggtgctgagggccaacagcggcgggctcatcgtcaggttcaactccctgcaggggttcgtgcccaaccctctcctcagccccgcgcactggtgtaaagaccccaaaaggcccatccaagatgttacgaaagacctagtaggaacgtccatttctgtcaaggtaactgatttctctctgccttctcaattgcagcttctgattctgttgcacagttgtctgtagctattttgttgcaatatactgtatggatgtgccaaaacttcgatccatatgtattctatattttttatgtaatgtcctggctcatatcacagcttcaatgatacctatcgttacttccagcatcataaaagaaacatagtgaaatgaacccaacaagttcaatgatacatgcctcacaaaattactctgaaaattggatgaaatggacccaagatttattaagaagctgaatctaaccgctctaggtggctgaagtgaatgaggaggaaaagaaacttgtcttctctgagaaggatgctagttggtcaacatactcttcccgaataaagattggcgacatctatgatggaattgtgggctcagtgttccactatggtgcatttgttcacctgcgatttcctgatggattatatcatcttactggccttgtacatatctcggaggtgtcttgggatcttgtccaagacgtcaaggattttctaaacgaaggggatgctgtcaaggtcatagttgtgaacattgatatgacgaagtcaaggatagctttatctatcagacaactggaggaagatcctttattggaaacattggacaaagttatccctttgtaatctttcttttcttctaggaagctgatcaatcacctaatcgaatgatgtctccttcggaagttgaacttctgccaggacttgatggtatatgcaatgaactattgcaagaggatggtataacagacgtacagtttgggcgccaggcattggagaaacgtgtcgtttcacaagatttagagctttggatttcgaatgttcaagctaaggacaacaggttcacacttcttgcacgagctgggaggcaggaagtgtatttgaccacttccctagaccaggagggcataaagaaagccgtgcaaagagtgctggggcgtgttccttgaacccgacacgcagcgtgtagaaaccgattttctaactaaagcattacaaggaatcaaaagtacgagcgaacagcctgaaacatttgccactgtcagtctgtcacaacacccggctaaatttttctctgttggatactacgacaaccaaaaatctgtaaatatttgcagtcctacacgagtaggttaggcaccttgggccctcccttcaaactaagacgttgctaagcagtggttctgtgtatttgctggggtctgtcttttgatgccatgtgcacttgtcatactgtgacttcagttcactgcttgcacttggctgaactcccgaggtaacttgt

SEQ ID NO: 11805 - DNA, 1421 bp, Zea Mays
cttttttttatgggagcctcagggcaaagccgtccgtcgtggtcaaccgcacctggtgtatttctagtggcgtcccgtccctccggccagatggacaccaaccaacacgagctgaggccgcgatgacgacgacgatgatgaggctgaggcagcacctgggcctggtctcctcccctagtatttatacctccgccatcgccagctcggtctcggaccatgtcgtcgtccgcctccgacgccgcgccgttcgagaagcccagggccgtggtcaagaaggtcctcgcggagtcgcagcccgaggggcagggcgccaccgtccgcaggagcatcggcaggcatgagctccgcaacctggaccccttcctcctgctcgacgagttcacagtctacaagcccgccgggtttcccgaccacccccacagaggattcgagaccgtcacctacatgctcgagggggcattcacccaccaggacttcgctgggcacaagggcaccatcaagacaggggacgtgcagtggatgacggcggggcgaggcatcgtgcactcggagatgccggcgggggacggcgtgcacaagggcctgcagctctggatcaacctctcctccaaggacaagatgatcgagccgcggtaccaggagctggagagcaaggacatcagccgcggggagagcgaggacggcggcgtggaggcccgcgtcattgccggggaggccctcggcgcggcgtcccccgtgtacacgcgcacccccaccatgtacgtggacttcaccatgcgtcccgggtctcgcctgcaccagcccgtcccggagggctggaacgccttcgtctacgtcgtcgacggcgagggcgtgttcgggcgggagacggccacggcgcactactgcctcgtcctcggccccggcgacggcgtcagcgtgtggaacaggtccaccaggccgctgaggttcgtcctcgtcgccgggcagccgctcggcgagcccgtggtgcagcacgggcccttcgtcatgaactcgcgcgcccagattcagaaggccatggaggactactactatggcaagaacggcttcgagagggccggacagtggagctcctccgcctgatcggcgaggcggggagccgatggcgccaaattaatctcccgtgcaaactaaatatactttattaaatttgttagggtgctgagtttgactattttttagcaactacacttgtattggtagtatgtcatctagtatggcgaattggatattgtaataaacagtaaggaaaattgatagtctcaataaaccattgtatttgtagcatatggaaaattgtatatcaaggccatttgtgggtgattgctgttttccagtctaaagtatcagttatttatgcgtggagacatttgaccctgtttggaacttgggcaatcgtt

SEQ ID NO: 11806 - DNA, 1517 bp, Zea Mays
ttttgatcaaggttgttgagcgatgataaataatctgtgggagattgtaccagcagaacctggtgataggttcctaagcatgcttccaacatggcatgcatatgagcgtgcttgtgagtacttcatcttctcgtatggtatccagcaagtttacactactgttaagtacctgaagattctagtatacaagaaaattcattcagcaatcgggatttcaaaggctggtattagtggcggtggaagtcttccgatgcatgttgataagttttttgaggccattggcattaaagtacaaaacggctatggccttactgagacttctcctgttgttgctgctagacgaccattctgtaatgttcttgggacagttggtcacccaataaagcatactgaaatcaagatttttgacattgagactggtgaggtccttccagatggttcaaaggggattgtgaaaattaaaggaccacaagtaatgaagggatactataagaacccatcggctacaaatgaagcttttgatcaagagggttggttcagcactggagatgtaggttggatagtacctcatcatgccatggggccaagtcgccagtgtggagggatgattgttcttgaagggcgtgcaaaggatacaatagtcctatctacaggtgaaaatgttgaacctgctgagatcgaggaagcagccagcaggagtaccttgattaatcagatagttgtgatcgggcaggatcaacggcgtcttggtgccataattgttcccaacaatgatgaagttctggcagaagcaaaaaggaagtccatccttggtgaggatggcgagctagcgaaagataaggtcatgaacatgctatatgatgaattgagaacctggacagcgcactgctccttccgtgtcgggccaattctggttgtcgacgaaccattcacgattgacaatggtctgatgacacccaccatgaaaataaggagggacaaagtgacagacaagtacaggagggagatcgaagccttgttcaagtgacacgcggagcgcgtgcgcacccatcagagttcccttttccgagtacaagacggcaaccgtacggcgtacatacagacacctgcaagctgcaatgcgtccatgtaccatgtatacgtacgtacttgcgtacggtcggaagatgactgggttggaactggaagagatgatatggcggagcggccggtgggagaacaccatgagacttgttactagactcgaatgttcgtaggttgcatgagcaaaatgacatgtgttccacaattgcatcattcaataagcgattcactgagccagataaggtcttgttcggttagttctcaatccatatatatggattgagtgagtttaaatcccaaacaagtcaaacttcttcttaatttttttcaatctcatccaatccatatgtaatgacaataaccgaacaaggcatgaatcaataaaattctcccaaaccaccgcaggtaccatgcaattggtaaaaatatcatgc

SEQ ID NO: 11807 - DNA, 1556 bp, Zea Mays
caattttgatcaaggttgttgagcgatgataaataatctgtgggagattgtaccagcagaacctggtgataggttcctaagcatgcttccaacatggcatgcatatgagcgtgcttgtgagtacttcatcttctcgtatggtatccagcaagtttacactactgttaagtacctgaagattctagtatacaagaaaattcattcagcaatcgggatttcaaaggctggtattagtggcggtggaagtcttccgatgcatgttgataagttttttgaggccattggcattaaagtacaaaacggctatggccttactgagacttctcctgttgttgctgctagacgaccattctgtaatgttcttgggacagttggtcacccaataaagcatactgaaatcaagatttttgacattgagactggtgaggtccttccagatggttcaaaggggattgtgaaaattaaaggaccacaagtaatgaagggatactataagaacccatcggctacaaatgaagcttttgatcaagagggttggttcagcactggagatgtaggttggatagtacctcatcatgccatggggccaagtcgccagtgtggagggatgattgttcttgaagggcgtgcaaaggatacaatagtcctatctacaggtgaaaatgttgaacctgctgagatcgaggaagcagccagcaggagtaccttgattaatcagatagttgtgatcgggcaggatcaacggcgtcttggtgccataattgttcccaacaatgatgaagttctggcagaagcaaaaaggaagtccatccttggtgaggatggcgagctagcgaaagataaggtcatgaacatgctatatgatgaattgagaacctggaggaagtgcttaattattttgttcacgcgtttcaggacagcgcactgctccttccgtgtcgggccaattctggttgtcgacgaaccattcacgattgacaatggtctgatgacacccaccatgaaaataaggagggacaaagtgacagacaagtacaggagggagatcgaagccttgttcaagtgacacgcggagcgcgtgcgcacccatcagagttcccttttccgagtacaagacggcaaccgtacggcgtacatacagacacctgcaagctgcaatgcgtccatgtaccatgtatacgtacgtacttgcgtacggtcggaagatgactgggttggaactggaagagatgatatggcggagcggccggtgggagaacaccatgagacttgttactagactcgaatgttcgtaggttgcatgagcaaaatgacatgtgttccacaattgcatcattcaataagcgattcactgagccagataaggtcttgttcggttagttctcaatccatatatatggattgagtgagtttaaatcccaaacaagtcaaacttcttcttaatttttttcaatctcatccaatccatatgtaatgacaataaccgaacaaggcatgaatcaataaaattctcccaaaccaccgcaggtaccatgcaattggtaaaaatatcatgc

SEQ ID NO: 11808 - DNA, 2826 bp, Zea Mays
atggagtcgaggtacggggtcgtggaacatggtatgctacactacttggaagagtttttttcacttcagatagaacatcaagtacgtaaaaagtgctcacctctactggagagtgctctgctgcctggtggaagtgattcgactctgcatgaatggaaggctgttccagatatttggaggacagcagcagaaaaatatgctgacctcgtagctgtggtagatccttaccatgaaccgccaacggaatggacgtatacacagcttgagcaagaaatattggatttttctcaaggtctaagggccattggtgttgctccggatgaaaagctagcactttttgctgataactcatgtcgttggctagttgcagatcaaggaatcatggcaaccggtgctataaatgttgttaggggaacaagatcatctgatgaagaattgtttcaaatatacactcattcagaaagagtctttcatgtcaaggattaatacaagattcattgttcttctttggggtgacaaatcatgcatagatagccaagctattaaggatataccactttatggatacaaggatatcatcgaacttggtcgagaaagccgcaatgcactgtttctttccgacgagcaaggtcagcaagatgtctttgaatctattagtcctgaagatgtggccacactaatatatactagtggaacaagtggcacaccaaaaggcgtaatgcttacccaccgaaatctcttgcatcaggtgaagatagaaacattacaattttgatcaaggttgttgagcgatggtatgccatgtgtattagttacttttttgttttaccttgatgtgattttctaatatctatgacttgaacataagcactcgtgctattaatattatgtttttccctggaatgtcctgtaattatttcaagcacccttctaaagaatgtgagcctaattgcttaggttttctgtttgatatatccctcgtacacattttgtgctgttcttttccacagataaataatctgtgggagattgtaccagcagaacctggtgataggttcctaagcatgcttccaacatggcatgcatatgagcgtgcttgtgagtacttcatcttctcgtatggtatccagcaagtttacactactgttaagtacctgaaggaagatttgcagcgttaccagcctcaatatattatatcagtaccactggtctacgaaactctgtacatttcaattcataggcagatttcatccagttctgctgctcgaaaaattattgctctttcacttatcaagataagtttcctatatatggaggcaaagaagatctatgagggaacagttttatcaaacaatcttgtcaaaccatcagtcatcgcctatatgatgaagtggctgtgggcaagattggttgctgcatttctttggcctttacataatctggcgaagattctagtatacaagaaaattcattcagcaatcgggatttcaaaggctggtattagtggcggtggaagtcttccgatgcatgttgataagttttttgaggccattggcattaaagtacaaaacggctatggccttactgagacttctcctgttgttgctgctagacgaccattctgtaatgttcttgggacagttggtcacccaataaagcatactgaaatcaagatttttgacattgagactggtgaggtccttccagatggttcaaaggggattgtgaaaattaaaggaccacaagtaatgaagggatactataagaacccatcggctacaaatgaagcttttgatcaagagggttggttcagcactggagatgtaggttggatagtacctcatcatgccatggggccaagtcgccagtgtggagggatgattgttcttgaagggcgtgcaaaggatacaatagtcctatctacaggtgaaaatgttgaacctgctgagatcgaggaagcagccagcaggagtaccttgattaatcagatagttgtgatcgggcaggatcaacggcgtcttggtgccataattgttcccaacaatgatgaagttctggcagaagcaaaaaggaagtccatccttggtgaggatggcgagctagcgaaagataaggtcatgaacatgctatatgatgaattgagaacctggaggaagtgcttaattattttgttcacgcgtttcaggacagcgcactgctccttccgtgtcgggccaattctggttgtcgacgaaccattcacgattgacaatggtctgatgacacccaccatgaaaataaggagggacaaagtgacagacaagtacaggagggagatcgaagccttgttcaagtgacacgcggagcgcgtgcgcacccatcagagttcccttttccgagtacaagacggcaaccgtacggcgtacatacagacacctgcaagctgcaatgcgtccatgtaccatgtatacgtacgtacttgcgtacggtcggaagatgactgggttggaactggaagagatgatatggcggagcggccggtgggagaacaccatgagacttgttactagactcgaatgttcgtaggttgcatgagcaaaatgacatgtgttccacaattgcatcattcaataagcgattcactgagccagataaggtcttgttcggttagttctcaatccatatatatggattgagtgagtttaaatcccaaacaagtcaaacttcttcttaatttttttcaatctcatccaatccatatgtaatgacaataaccgaacaaggcatgaatcaataaaattctcccaaaccaccgcaggtaccatgcaattggtaaaaatatcatgc

SEQ ID NO: 11809 - DNA, 2528 bp, Zea Mays
atggagtcgaggtacggggtcgtggaacatggtatgctacactacttggaagagtttttttcacttcagatagaacatcaagtacgtaaaaagtgctcacctctactggagagtgctctgctgcctggtggaagtgattcgactctgcatgaatggaaggctgttccagatatttggaggacagcagcagaaaaatatgctgacctcgtagctgtggtagatccttaccatgaaccgccaacggaatggacgtatacacagcttgagcaagaaatattggatttttctcaaggtctaagggccattggtgttgctccggatgaaaagctagcactttttgctgataactcatgtcgttggctagttgcagatcaaggaatcatggcaaccggtgctataaatgttgttaggggaacaagatcatctgatgaagaattgtttcaaatatacactcattcagaaagagtctttcatgtcaaggattaatacaagattcattgttcttctttggggtgacaaatcatgcatagatagccaagctattaaggatataccactttatggatacaaggatatcatcgaacttggtcgagaaagccgcaatgcactgtttctttccgacgagcaaggtcagcaagatgtctttgaatctattagtcctgaagatgtggccacactaatatatactagtggaacaagtggcacaccaaaaggcgtaatgcttacccaccgaaatctcttgcatcagataaataatctgtgggagattgtaccagcagaacctggtgataggttcctaagcatgcttccaacatggcatgcatatgagcgtgcttgtgagtacttcatcttctcgtatggtatccagcaagtttacactactgttaagtacctgaaggaagatttgcagcgttaccagcctcaatatattatatcagtaccactggtctacgaaactctgtacatttcaattcataggcagatttcatccagttctgctgctcgaaaaattattgctctttcacttatcaagataagtttcctatatatggaggcaaagaagatctatgagggaacagttttatcaaacaatcttgtcaaaccatcagtcatcgcctatatgatgaagtggctgtgggcaagattggttgctgcatttctttggcctttacataatctggcgaagattctagtatacaagaaaattcattcagcaatcgggatttcaaaggctggtattagtggcggtggaagtcttccgatgcatgttgataagttttttgaggccattggcattaaagtacaaaacggctatggccttactgagacttctcctgttgttgctgctagacgaccattctgtaatgttcttgggacagttggtcacccaataaagcatactgaaatcaagatttttgacattgagactggtgaggtccttccagatggttcaaaggggattgtgaaaattaaaggaccacaagtaatgaagggatactataagaacccatcggctacaaatgaagcttttgatcaagagggttggttcagcactggagatgtaggttggatagtacctcatcatgccatggggccaagtcgccagtgtggagggatgattgttcttgaagggcgtgcaaaggatacaatagtcctatctacaggtgaaaatgttgaacctgctgagatcgaggaagcagccagcaggagtaccttgattaatcagatagttgtgatcgggcaggatcaacggcgtcttggtgccataattgttcccaacaatgatgaagttctggcagaagcaaaaaggaagtccatccttggtgaggatggcgagctagcgaaagataaggtcatgaacatgctatatgatgaattgagaacctggacagcgcactgctccttccgtgtcgggccaattctggttgtcgacgaaccattcacgattgacaatggtctgatgacacccaccatgaaaataaggagggacaaagtgacagacaagtacaggagggagatcgaagccttgttcaagtgacacgcggagcgcgtgcgcacccatcagagttcccttttccgagtacaagacggcaaccgtacggcgtacatacagacacctgcaagctgcaatgcgtccatgtaccatgtatacgtacgtacttgcgtacggtcggaagatgactgggttggaactggaagagatgatatggcggagcggccggtgggagaacaccatgagacttgttactagactcgaatgttcgtaggttgcatgagcaaaatgacatgtgttccacaattgcatcattcaataagcgattcactgagccagataaggtcttgttcggttagttctcaatccatatatatggattgagtgagtttaaatcccaaacaagtcaaacttcttcttaatttttttcaatctcatccaatccatatgtaatgacaataaccgaacaaggcatgaatcaataaaattctcccaaaccaccgcaggtaccatgcaattggtaaaaatatcatgc

SEQ ID NO: 11810 - DNA, 2186 bp, Zea Mays
atggagtcgaggtacggggtcgtggaacatggtatgctacactacttggaagagtttttttcacttcagatagaacatcaagtacgtaaaaagtgctcacctctactggagagtgctctgctgcctggtggaagtgattcgactctgcatgaatggaaggctgttccagatatttggaggacagcagcagaaaaatatgctgacctcgtagctgtggtagatccttaccatgaaccgccaacggaatggacgtatacacagcttgagcaagaaatattggatttttctcaaggtctaagggccattggtgttgctccggatgaaaagctagcactttttgctgataactcatgtcgttggctagttgcagatcaaggaatcatggcaaccggtgctataaatgttgttaggggaacaagatcatctgatgaagaattgtttcaaatatacactcattcagaaagtcctcaattctttaaccggcttgcagagtctttcatgtcaaggattaatacaagattcattgttcttctttggggtgacaaatcatgcatagatagccaagctattaaggatataccactttatggatacaaggatatcatcgaacttggtcgagaaagccgcaatgcactgtttctttccgacgagcaaggtcagcaagatgtctttgaatctattagtcctgaagatgtggccacactaatatatactagtggaacaagtggcacaccaaaaggcgtaatgcttacccaccgaaatctcttgcatcagataaataatctgtgggagattgtaccagcagaacctggtgataggttcctaagcatgcttccaacatggcatgcatatgagcgtgcttgtgagtacttcatcttctcgtatggtatccagcaagtttacactactgttaagtacctgaagattctagtatacaagaaaattcattcagcaatcgggatttcaaaggctggtattagtggcggtggaagtcttccgatgcatgttgataagttttttgaggccattggcattaaagtacaaaacggctatggccttactgagacttctcctgttgttgctgctagacgaccattctgtaatgttcttgggacagttggtcacccaataaagcatactgaaatcaagatttttgacattgagactggtgaggtccttccagatggttcaaaggggattgtgaaaattaaaggaccacaagtaatgaagggatactataagaacccatcggctacaaatgaagcttttgatcaagagggttggttcagcactggagatgtaggttggatagtacctcatcatgccatggggccaagtcgccagtgtggagggatgattgttcttgaagggcgtgcaaaggatacaatagtcctatctacaggatcaacggcgtcttggtgccataattgttcccaacaatgatgaagttctggcagaagcaaaaaggaagtccatccttggtgaggatggcgagctagcgaaagataaggtcatgaacatgctatatgatgaattgagaacctggacagcgcactgctccttccgtgtcgggccaattctggttgtcgacgaaccattcacgattgacaatggtctgatgacacccaccatgaaaataaggagggacaaagtgacagacaagtacaggagggagatcgaagccttgttcaagtgacacgcggagcgcgtgcgcacccatcagagttcccttttccgagtacaagacggcaaccgtacggcgtacatacagacacctgcaagctgcaatgcgtccatgtaccatgtatacgtacgtacttgcgtacggtcggaagatgactgggttggaactggaagagatgatatggcggagcggccggtgggagaacaccatgagacttgttactagactcgaatgttcgtaggttgcatgagcaaaatgacatgtgttccacaattgcatcattcaataagcgattcactgagccagataaggtcttgttcggttagttctcaatccatatatatggattgagtgagtttaaatcccaaacaagtcaaacttcttcttaatttttttcaatctcatccaatccatatgtaatgacaataaccgaacaaggcatgaatcaataaaattctcccaaaccaccgcaggtaccatgcaattggtaaaaatatcatgc

SEQ ID NO: 11811 - DNA, 2580 bp, Zea Mays
atggagtcgaggtacggggtcgtggaacatggtatgctacactacttggaagagtttttttcacttcagatagaacatcaagtacgtaaaaagtgctcacctctactggagagtgctctgctgcctggtggaagtgattcgactctgcatgaatggaaggctgttccagatatttggaggacagcagcagaaaaatatgctgacctcgtagctgtggtagatccttaccatgaaccgccaacggaatggacgtatacacagcttgagcaagaaatattggatttttctcaaggtctaagggccattggtgttgctccggatgaaaagctagcactttttgctgataactcatgtcgttggctagttgcagatcaaggaatcatggcaaccggtgctataaatgttgttaggggaacaagatcatctgatgaagaattgtttcaaatatacactcattcagaaagcacagcattgcacttgttgtggacagtcctcaattctttaaccggcttgcagagtctttcatgtcaaggattaatacaagattcattgttcttctttggggtgacaaatcatgcatagatagccaagctattaaggatataccactttatggatacaaggatatcatcgaacttggtcgagaaagccgcaatgcactgtttctttccgacgagcaaggtcagcaagatgtctttgaatctattagtcctgaagatgtggccacactaatatatactagtggaacaagtggcacaccaaaaggcgtaatgcttacccaccgaaatctcttgcatcagataaataatctgtgggagattgtaccagcagaacctggtgataggttcctaagcatgcttccaacatggcatgcatatgagcgtgcttgtgagtacttcatcttctcgtatggtatccagcaagtttacactactgttaagtacctgaaggaagatttgcagcgttaccagcctcaatatattatatcagtaccactggtctacgaaactctgtacatttcaattcataggcagatttcatccagttctgctgctcgaaaaattattgctctttcacttatcaagataagtttcctatatatggaggcaaagaagatctatgagggaacagttttatcaaacaatcttgtcaaaccatcagtcatcgcctatatgatgaagtggctgtgggcaagattggttgctgcatttctttggcctttacataatctggcgaagattctagtatacaagaaaattcattcagcaatcgggatttcaaaggctggtattagtggcggtggaagtcttccgatgcatgttgataagttttttgaggccattggcattaaagtacaaaacggctatggccttactgagacttctcctgttgttgctgctagacgaccattctgtaatgttcttgggacagttggtcacccaataaagcatactgaaatcaagatttttgacattgagactggtgaggtccttccagatggttcaaaggggattgtgaaaattaaaggaccacaagtaatgaagggatactataagaacccatcggctacaaatgaagcttttgatcaagagggttggttcagcactggagatgtaggttggatagtacctcatcatgccatggggccaagtcgccagtgtggagggatgattgttcttgaagggcgtgcaaaggatacaatagtcctatctacaggtgaaaatgttgaacctgctgagatcgaggaagcagccagcaggagtaccttgattaatcagatagttgtgatcgggcaggatcaacggcgtcttggtgccataattgttcccaacaatgatgaagttctggcagaagcaaaaaggaagtccatccttggtgaggatggcgagctagcgaaagataaggtcatgaacatgctatatgatgaattgagaacctggacagcgcactgctccttccgtgtcgggccaattctggttgtcgacgaaccattcacgattgacaatggtctgatgacacccaccatgaaaataaggagggacaaagtgacagacaagtacaggagggagatcgaagccttgttcaagtgacacgcggagcgcgtgcgcacccatcagagttcccttttccgagtacaagacggcaaccgtacggcgtacatacagacacctgcaagctgcaatgcgtccatgtaccatgtatacgtacgtacttgcgtacggtcggaagatgactgggttggaactggaagagatgatatggcggagcggccggtgggagaacaccatgagacttgttactagactcgaatgttcgtaggttgcatgagcaaaatgacatgtgttccacaattgcatcattcaataagcgattcactgagccagataaggtcttgttcggttagttctcaatccatatatatggattgagtgagtttaaatcccaaacaagtcaaacttcttcttaatttttttcaatctcatccaatccatatgtaatgacaataaccgaacaaggcatgaatcaataaaattctcccaaaccaccgcaggtaccatgcaattggtaaaaatatcatgc

SEQ ID NO: 11812 - DNA, 2564 bp, Zea Mays
atggagtcgaggtacggggtcgtggaacatggtatgctacactacttggaagagtttttttcacttcagatagaacatcaagtacgtaaaaagtgctcacctctactggagagtgctctgctgcctggtggaagtgattcgactctgcatgaatggaaggctgttccagatatttggaggacagcagcagaaaaatatgctgacctcgtagctgtggtagatccttaccatgaaccgccaacggaatggacgtatacacagcttgagcaagaaatattggatttttctcaaggtctaagggccattggtgttgctccggatgaaaagctagcactttttgctgataactcatgtcgttggctagttgcagatcaaggaatcatggcaaccggtgctataaatgttgttaggggaacaagatcatctgatgaagaattgtttcaaatatacactcattcagaaagtcctcaattctttaaccggcttgcagagtctttcatgtcaaggattaatacaagattcattgttcttctttggggtgacaaatcatgcatagatagccaagctattaaggatataccactttatggatacaaggatatcatcgaacttggtcgagaaagccgcaatgcactgtttctttccgacgagcaaggtcagcaagatgtctttgaatctattagtcctgaagatgtggccacactaatatatactagtggaacaagtggcacaccaaaaggcgtaatgcttacccaccgaaatctcttgcatcaggtgaagatagaaacattacaattttgatcaaggttgttgagcgatggtatgccatgtgtattagttacttttttgttttaccttgatgtgattttctaatatctatgacttgaacataagcactcgtgctattaatattatgtttttccctggaatgtcctgtaattatttcaagcacccttctaaagaatgtgagcctaattgcttaggttttctgtttgatatatccctcgtacacattttgtgctgttcttttccacagataaataatctgtgggagattgtaccagcagaacctggtgataggttcctaagcatgcttccaacatggcatgcatatgagcgtgcttgtgagtacttcatcttctcgtatggtatccagcaagtttacactactgttaagtacctgaagattctagtatacaagaaaattcattcagcaatcgggatttcaaaggctggtattagtggcggtggaagtcttccgatgcatgttgataagttttttgaggccattggcattaaagtacaaaacggctatggccttactgagacttctcctgttgttgctgctagacgaccattctgtaatgttcttgggacagttggtcacccaataaagcatactgaaatcaagatttttgacattgagactggtgaggtccttccagatggttcaaaggggattgtgaaaattaaaggaccacaagtaatgaagggatactataagaacccatcggctacaaatgaagcttttgatcaagagggttggttcagcactggagatgtaggttggatagtacctcatcatgccatggggccaagtcgccagtgtggagggatgattgttcttgaagggcgtgcaaaggatacaatagtcctatctacaggtgaaaatgttgaacctgctgagatcgaggaagcagccagcaggagtaccttgattaatcagatagttgtgatcgggcaggatcaacggcgtcttggtgccataattgttcccaacaatgatgaagttctggcagaagcaaaaaggaagtccatccttggtgaggatggcgagctagcgaaagataaggtcatgaacatgctatatgatgaattgagaacctggaggaagtgcttaattattttgttcacgcgtttcaggacagcgcactgctccttccgtgtcgggccaattctggttgtcgacgaaccattcacgattgacaatggtctgatgacacccaccatgaaaataaggagggacaaagtgacagacaagtacaggagggagatcgaagccttgttcaagtgacacgcggagcgcgtgcgcacccatcagagttcccttttccgagtacaagacggcaaccgtacggcgtacatacagacacctgcaagctgcaatgcgtccatgtaccatgtatacgtacgtacttgcgtacggtcggaagatgactgggttggaactggaagagatgatatggcggagcggccggtgggagaacaccatgagacttgttactagactcgaatgttcgtaggttgcatgagcaaaatgacatgtgttccacaattgcatcattcaataagcgattcactgagccagataaggtcttgttcggttagttctcaatccatatatatggattgagtgagtttaaatcccaaacaagtcaaacttcttcttaatttttttcaatctcatccaatccatatgtaatgacaataaccgaacaaggcatgaatcaataaaattctcccaaaccaccgcaggtaccatgcaattggtaaaaatatcatgc

SEQ ID NO: 11813 - DNA, 2545 bp, Zea Mays
atggagtcgaggtacggggtcgtggaacatggtatgctacactacttggaagagtttttttcacttcagatagaacatcaagtacgtaaaaagtgctcacctctactggagagtgctctgctgcctggtggaagtgattcgactctgcatgaatggaaggctgttccagatatttggaggacagcagcagaaaaatatgctgacctcgtagctgtggtagatccttaccatgaaccgccaacggaatggacgtatacacagcttgagcaagaaatattggatttttctcaaggtctaagggccattggtgttgctccggatgaaaagctagcactttttgctgataactcatgtcgttggctagttgcagatcaaggaatcatggcaaccggtgctataaatgttgttaggggaacaagatcatctgatgaagaattgtttcaaatatacactcattcagaaagcattgcacttgttgtggacagtcctcaattctttaaccggcttgcagagtctttcatgtcaaggattaatacaagattcattgttcttctttggggtgacaaatcatgcatagatagccaagctattaaggatataccactttatggatacaaggatatcatcgaacttggtcgagaaagccgcaatgcactgtttctttccgacgagcaaggtcagcaagatgtctttgaatctattagtcctgaagatgtggccacactaatatatactagtggaacaagtggcacaccaaaaggcgtaatgcttacccaccgaaatctcttgcatcagataaataatctgtgggagattgtaccagcagaacctggtgataggttcctaagcatgcttccaacatggcatgcatatgagcgtgcttatttgcagcgttaccagcctcaatatattatatcagtaccactggtctacgaaactctgtacatttcaattcataggcagatttcatccagttctgctgctcgaaaaattattgctctttcacttatcaagataagtttcctatatatggaggcaaagaagatctatgagggaacagttttatcaaacaatcttgtcaaaccatcagtcatcgcctatatgatgaagtggctgtgggcaagattggttgctgcatttctttggcctttacataatctggcgaagattctagtatacaagaaaattcattcagcaatcgggatttcaaaggctggtattagtggcggtggaagtcttccgatgcatgttgataagttttttgaggccattggcattaaagtacaaaacggctatggccttactgagacttctcctgttgttgctgctagacgaccattctgtaatgttcttgggacagttggtcacccaataaagcatactgaaatcaagatttttgacattgagactggtgaggtccttccagatggttcaaaggggattgtgaaaattaaaggaccacaagtaatgaagggatactataagaacccatcggctacaaatgaagcttttgatcaagagggttggttcagcactggagatgtaggttggatagtacctcatcatgccatggggccaagtcgccagtgtggagggatgattgttcttgaagggcgtgcaaaggatacaatagtcctatctacaggtgaaaatgttgaacctgctgagatcgaggaagcagccagcaggagtaccttgattaatcagatagttgtgatcgggcaggatcaacggcgtcttggtgccataattgttcccaacaatgatgaagttctggcagaagcaaaaaggaagtccatccttggtgaggatggcgagctagcgaaagataaggtcatgaacatgctatatgatgaattgagaacctggaggaagtgcttaattattttgttcacgcgtttcaggacagcgcactgctccttccgtgtcgggccaattctggttgtcgacgaaccattcacgattgacaatggtctgatgacacccaccatgaaaataaggagggacaaagtgacagacaagtacaggagggagatcgaagccttgttcaagtgacacgcggagcgcgtgcgcacccatcagagttcccttttccgagtacaagacggcaaccgtacggcgtacatacagacacctgcaagctgcaatgcgtccatgtaccatgtatacgtacgtacttgcgtacggtcggaagatgactgggttggaactggaagagatgatatggcggagcggccggtgggagaacaccatgagacttgttactagactcgaatgttcgtaggttgcatgagcaaaatgacatgtgttccacaattgcatcattcaataagcgattcactgagccagataaggtcttgttcggttagttctcaatccatatatatggattgagtgagtttaaatcccaaacaagtcaaacttcttcttaatttttttcaatctcatccaatccatatgtaatgacaataaccgaacaaggcatgaatcaataaaattctcccaaaccaccgcaggtaccatgcaattggtaaaaatatcatgc

SEQ ID NO: 11814 - DNA, 2523 bp, Zea Mays
ccccagtccgccggctccgcgatagaacatcaagtacgtaaaaagtgctcacctctactggagagtgctctgctgcctggtggaagtgattcgactctgcatgaatggaaggctgttccagatatttggaggacagcagcagaaaaatatgctgacctcgtagctgtggtagatccttaccatgaaccgccaacggaatggacgtatacacagcttgagcaagaaatattggatttttctcaaggtctaagggccattggtgttgctccggatgaaaagctagcactttttgctgataactcatgtcgttggctagttgcagatcaaggaatcatggcaaccggtgctataaatgttgttaggggaacaagatcatctgatgaagaattgtttcaaatatacactcattcagaaagcattgcacttgttgtggacagtcctcaattctttaaccggcttgcagagtctttcatgtcaaggattaatacaagattcattgttcttctttggggtgacaaatcatgcatagatagccaagctattaaggatataccactttatggatacaaggatatcatcgaacttggtcgagaaagccgcaatgcactgtttctttccgacgagcaaggtcagcaagatgtctttgaatctattagtcctgaagatgtggccacactaatatatactagtggaacaagtggcacaccaaaaggcgtaatgcttacccaccgaaatctcttgcatcagataaataatctgtgggagattgtaccagcagaacctggtgataggttcctaagcatgcttccaacatggcatgcatatgagcgtgcttgtgagtacttcatcttctcgtatggtatccagcaagtttacactactgttaagtacctgaagatttgcagcgttaccagcctcaatatattatatcagtaccactggtctacgaaactctgtacatttcaattcataggcagatttcatccagttctgctgctcgaaaaattattgctctttcacttatcaagataagtttcctatatatggaggcaaagaagatctatgagggaacagttttatcaaacaatcttgtcaaaccatcagtcatcgcctatatgatgaagtggctgtgggcaagattggttgctgcatttctttggcctttacataatctggcgaagattctagtatacaagaaaattcattcagcaatcgggatttcaaaggctggtattagtggcggtggaagtcttccgatgcatgttgataagttttttgaggccattggcattaaagtacaaaacggctatggccttactgagacttctcctgttgttgctgctagacgaccattctgtaatgttcttgggacagttggtcacccaataaagcatactgaaatcaagatttttgacattgagactggtgaggtccttccagatggttcaaaggggattgtgaaaattaaaggaccacaagtaatgaagggatactataagaacccatcggctacaaatgaagcttttgatcaagagggttggttcagcactggagatgtaggttggatagtacctcatcatgccatggggccaagtcgccagtgtggagggatgattgttcttgaagggcgtgcaaaggatacaatagtcctatctacaggtgaaaatgttgaacctgctgagatcgaggaagcagccagcaggagtaccttgattaatcagatagttgtgatcgggcaggatcaacggcgtcttggtgccataattgttcccaacaatgatgaagttctggcagaagcaaaaaggaagtccatccttggtgaggatggcgagctagcgaaagataaggtcatgaacatgctatatgatgaattgagaacctggacagcgcactgctccttccgtgtcgggccaattctggttgtcgacgaaccattcacgattgacaatggtctgatgacacccaccatgaaaataaggagggacaaagtgacagacaagtacaggagggagatcgaagccttgttcaagtgacacgcggagcgcgtgcgcacccatcagagttcccttttccgagtacaagacggcaaccgtacggcgtacatacagacacctgcaagctgcaatgcgtccatgtaccatgtatacgtacgtacttgcgtacggtcggaagatgactgggttggaactggaagagatgatatggcggagcggccggtgggagaacaccatgagacttgttactagactcgaatgttcgtaggttgcatgagcaaaatgacatgtgttccacaattgcatcattcaataagcgattcactgagccagataaggtcttgttcggttagttctcaatccatatatatggattgagtgagtttaaatcccaaacaagtcaaacttcttcttaatttttttcaatctcatccaatccatatgtaatgacaataaccgaacaaggcatgaatcaataaaattctcccaaaccaccgcaggtaccatgcaattggtaaaaatatcatgc

SEQ ID NO: 11815 - DNA, 2569 bp, Zea Mays
gccccagtccgccggctccgcgatagaacatcaagtacgtaaaaagtgctcacctctactggagagtgctctgctgcctggtggaagtgattcgactctgcatgaatggaaggctgttccagatatttggaggacagcagcagaaaaatatgctgacctcgtagctgtggtagatccttaccatgaaccgccaacggaatggacgtatacacagcttgagcaagaaatattggatttttctcaaggtctaagggccattggtgttgctccggatgaaaagctagcactttttgctgataactcatgtcgttggctagttgcagatcaaggaatcatggcaaccggtgctataaatgttgttaggggaacaagatcatctgatgaagaattgtttcaaatatacactcattcagaaagcacagcattgcacttgttgtggacagtcctcaattctttaaccggcttgcagagtctttcatgtcaaggattaatacaagattcattgttcttctttggggtgacaaatcatgcatagatagccaagctattaaggatataccactttatggatacaaggatatcatcgaacttggtcgagaaagccgcaatgcactgtttctttccgacgagcaaggtcagcaagatgtctttgaatctattagtcctgaagatgtggccacactaatatatactagtggaacaagtggcacaccaaaaggcgtaatgcttacccaccgaaatctcttgcatcagataaataatctgtgggagattgtaccagcagaacctggtgataggttcctaagcatgcttccaacatggcatgcatatgagcgtgcttgtgagtacttcatcttctcgtatggtatccagcaagtttacactactgttaagtacctgaaggaagatttgcagcgttaccagcctcaatatattatatcagtaccactggtctacgaaactctgtacatttcaattcataggcagatttcatccagttctgctgctcgaaaaattattgctctttcacttatcaagataagtttcctatatatggaggcaaagaagatctatgagggaacagttttatcaaacaatcttgtcaaaccatcagtcatcgcctatatgatgaagtggctgtgggcaagattggttgctgcatttctttggcctttacataatctggcgaagattctagtatacaagaaaattcattcagcaatcgggatttcaaaggctggtattagtggcggtggaagtcttccgatgcatgttgataagttttttgaggccattggcattaaagtacaaaacggctatggccttactgagacttctcctgttgttgctgctagacgaccattctgtaatgttcttgggacagttggtcacccaataaagcatactgaaatcaagatttttgacattgagactggtgaggtccttccagatggttcaaaggggattgtgaaaattaaaggaccacaagtaatgaagggatactataagaacccatcggctacaaatgaagcttttgatcaagagggttggttcagcactggagatgtaggttggatagtacctcatcatgccatggggccaagtcgccagtgtggagggatgattgttcttgaagggcgtgcaaaggatacaatagtcctatctacaggtgaaaatgttgaacctgctgagatcgaggaagcagccagcaggagtaccttgattaatcagatagttgtgatcgggcaggatcaacggcgtcttggtgccataattgttcccaacaatgatgaagttctggcagaagcaaaaaggaagtccatccttggtgaggatggcgagctagcgaaagataaggtcatgaacatgctatatgatgaattgagaacctggaggaagtgcttaattattttgttcacgcgtttcaggacagcgcactgctccttccgtgtcgggccaattctggttgtcgacgaaccattcacgattgacaatggtctgatgacacccaccatgaaaataaggagggacaaagtgacagacaagtacaggagggagatcgaagccttgttcaagtgacacgcggagcgcgtgcgcacccatcagagttcccttttccgagtacaagacggcaaccgtacggcgtacatacagacacctgcaagctgcaatgcgtccatgtaccatgtatacgtacgtacttgcgtacggtcggaagatgactgggttggaactggaagagatgatatggcggagcggccggtgggagaacaccatgagacttgttactagactcgaatgttcgtaggttgcatgagcaaaatgacatgtgttccacaattgcatcattcaataagcgattcactgagccagataaggtcttgttcggttagttctcaatccatatatatggattgagtgagtttaaatcccaaacaagtcaaacttcttcttaatttttttcaatctcatccaatccatatgtaatgacaataaccgaacaaggcatgaatcaataaaattctcccaaaccaccgcaggtaccatgcaattggtaaaaatatcatgc

SEQ ID NO: 11816 - DNA, 2371 bp, Zea Mays
ctccgccgccccagtccgccggctccgcgatagaacatcaagtacgtaaaaagtgctcacctctactggagagtgctctgctgcctggtggaagtgattcgactctgcatgaatggaaggctgttccagatatttggaggacagcagcagaaaaatatgctgacctcgtagctgtggtagatccttaccatgaaccgccaacggaatggacgtatacacagcttgagcaagaaatattggatttttctcaaggtctaagggccattggtgttgctccggatgaaaagctagcactttttgctgataactcatgtcgttggctagttgcagatcaaggaatcatggcaaccggtgctataaatgttgttaggggaacaagatcatctgatgaagaattgtttcaaatatacactcattcagaaagtcctcaattctttaaccggcttgcagagtctttcatgtcaaggattaatacaagattcattgttcttctttggggtgacaaatcatgcatagatagccaagctattaaggatataccactttatggatacaaggatatcatcgaacttggtcgagaaagccgcaatgcactgtttctttccgacgagcaaggtcagcaagatgtctttgaatctattagtcctgaagatgtggccacactaatatatactagtggaacaagtggcacaccaaaaggcgtaatgcttacccaccgaaatctcttgcatcagataaataatctgtgggagattgtaccagcagaacctggtgataggttcctaagcatgcttccaacatggcatgcatatgagcgtgcttgtgagtacttcatcttctcgtatggtatccagcaagtttacactactgttaagtacctgaaggaagatttgcagcgttaccagcctcaatatattatatcagtaccactggtctacgaaactctgtacatttcaattcataggcagatttcatccagttctgctgctcgaaaaattattgctctttcacttatcaagataagtttcctatatatggaggcaaagaagatctatgagggaacagttttatcaaacaatcttgtcaaaccatcagtcatcgcctatatgatgaagtggctgtgggcaagattggttgctgcatttctttggcctttacataatctggcgaagattctagtatacaagaaaattcattcagcaatcgggatttcaaaggctggtattagtggcggtggaagtcttccgatgcatgttgataagttttttgaggccattggcattaaagtacaaaacggctatggccttactgagacttctcctgttgttgctgctagacgaccattctgtaatgttcttgggacagttggtcacccaataaagcatactgaaatcaagatttttgacattgagactggtgaggtccttccagatggttcaaaggggattgtgaaaattaaaggaccacaagtaatgaagggatactataagaacccatcggctacaaatgaagcttttgatcaagagggttggttcagcactggagatgtaggttggatagtacctcatcatgccatggggccaagtcgccagtgtggagggatgattgttcttgaagggcgtgcaaaggatacaatagtcctatctacaggtgaaaatgttgaacctgctgagatcgaggaagcagccagcaggagtaccttgattaatcagatagttgtgatcgggcaggacagcgcactgctccttccgtgtcgggccaattctggttgtcgacgaaccattcacgattgacaatggtctgatgacacccaccatgaaaataaggagggacaaagtgacagacaagtacaggagggagatcgaagccttgttcaagtgacacgcggagcgcgtgcgcacccatcagagttcccttttccgagtacaagacggcaaccgtacggcgtacatacagacacctgcaagctgcaatgcgtccatgtaccatgtatacgtacgtacttgcgtacggtcggaagatgactgggttggaactggaagagatgatatggcggagcggccggtgggagaacaccatgagacttgttactagactcgaatgttcgtaggttgcatgagcaaaatgacatgtgttccacaattgcatcattcaataagcgattcactgagccagataaggtcttgttcggttagttctcaatccatatatatggattgagtgagtttaaatcccaaacaagtcaaacttcttcttaatttttttcaatctcatccaatccatatgtaatgacaataaccgaacaaggcatgaatcaataaaattctcccaaaccaccgcaggtaccatgcaattggtaaaaatatcatgc

SEQ ID NO: 11817 - DNA, 2254 bp, Zea Mays
gccgcgtctccgccgccccagtccgccggctccgcgatagaacatcaagtacgtaaaaagtgctcacctctactggagagtgctctgctgcctggtggaagtgattcgactctgcatgaatggaaggctgttccagatatttggaggacagcagcagaaaaatatgctgacctcgtagctgtggtagatccttaccatgaaccgccaacggaatggacgtatacacagcttgagcaagaaatattggatttttctcaaggtctaagggccattggtgttgctccggatgaaaagctagcactttttgctgataactcatgtcgttggctagttgcagatcaaggaatcatggcaaccggtgctataaatgttgttaggggaacaagatcatctgatgaagaattgtttcaaatatacactcattcagaaagcattgcacttgttgtggacagtcctcaattctttaaccggcttgcagagtctttcatgtcaaggattaatacaagattcattgttcttctttggggtgacaaatcatgcatagatagccaagctattaaggatataccactttatggatacaaggatatcatcgaacttggtcgagaaagccgcaatgcactgtttctttccgacgagcaaggtcagcaagatgtctttgaatctattagtcctgaagatgtggccacactaatatatactagtggaacaagtggcacaccaaaaggcgtaatgcttacccaccgaaatctcttgcatcagataaataatctgtgggagattgtaccagcagaacctggtgataggttcctaagcatgcttccaacatggcatgcatatgagcgtgcttgtgagtacttcatcttctcgtatggtatccagcaagtttacactactgttaagtacctgaagattctagtatacaagaaaattcattcagcaatcgggatttcaaaggctggtattagtggcggtggaagtcttccgatgcatgttgataagttttttgaggccattggcattaaagtacaaaacggctatggccttactgagacttctcctgttgttgctgctagacgaccattctgtaatgttcttgggacagttggtcacccaataaagcatactgaaatcaagatttttgacattgagactggtgaggtccttccagatggttcaaaggggattgtgaaaattaaaggaccacaagtaatgaagggatactataagaacccatcggctacaaatgaagcttttgatcaagagggttggttcagcactggagatgtaggttggatagtacctcatcatgccatggggccaagtcgccagtgtggagggatgattgttcttgaagggcgtgcaaaggatacaatagtcctatctacaggtgaaaatgttgaacctgctgagatcgaggaagcagccagcaggagtaccttgattaatcagatagttgtgatcgggcaggatcaacggcgtcttggtgccataattgttcccaacaatgatgaagttctggcagaagcaaaaaggaagtccatccttggtgaggatggcgagctagcgaaagataaggtcatgaacatgctatatgatgaattgagaacctggacagcgcactgctccttccgtgtcgggccaattctggttgtcgacgaaccattcacgattgacaatggtctgatgacacccaccatgaaaataaggagggacaaagtgacagacaagtacaggagggagatcgaagccttgttcaagtgacacgcggagcgcgtgcgcacccatcagagttcccttttccgagtacaagacggcaaccgtacggcgtacatacagacacctgcaagctgcaatgcgtccatgtaccatgtatacgtacgtacttgcgtacggtcggaagatgactgggttggaactggaagagatgatatggcggagcggccggtgggagaacaccatgagacttgttactagactcgaatgttcgtaggttgcatgagcaaaatgacatgtgttccacaattgcatcattcaataagcgattcactgagccagataaggtcttgttcggttagttctcaatccatatatatggattgagtgagtttaaatcccaaacaagtcaaacttcttcttaatttttttcaatctcatccaatccatatgtaatgacaataaccgaacaaggcatgaatcaataaaattctcccaaaccaccgcaggtaccatgcaattggtaaaaatatcatgc

SEQ ID NO: 11818 - DNA, 2234 bp, Zea Mays
cgccgcgtctccgccgccccagtccgccggctccgcgatagaacatcaagtacgtaaaaagtgctcacctctactggagagtgctctgctgcctggtggaagtgattcgactctgcatgaatggaaggctgttccagatatttggaggacagcagcagaaaaatatgctgacctcgtagctgtggtagatccttaccatgaaccgccaacggaatggacgtatacacagcttgagcaagaaatattggatttttctcaaggtctaagggccattggtgttgctccggatgaaaagctagcactttttgctgataactcatgtcgttggctagttgcagatcaaggaatcatggcaaccggtgctataaatgttgttaggggaacaagatcatctgatgaagaattgtttcaaatatacactcattcagaaagtcctcaattctttaaccggcttgcagagtctttcatgtcaaggattaatacaagattcattgttcttctttggggtgacaaatcatgcatagatagccaagctattaaggatataccactttatggatacaaggatatcatcgaacttggtcgagaaagccgcaatgcactgtttctttccgacgagcaaggtcagcaagatgtctttgaatctattagtcctgaagatgtggccacactaatatatactagtggaacaagtggcacaccaaaaggcgtaatgcttacccaccgaaatctcttgcatcagataaataatctgtgggagattgtaccagcagaacctggtgataggttcctaagcatgcttccaacatggcatgcatatgagcgtgcttgtgagtacttcatcttctcgtatggtatccagcaagtttacactactgttaagtacctgaagattctagtatacaagaaaattcattcagcaatcgggatttcaaaggctggtattagtggcggtggaagtcttccgatgcatgttgataagttttttgaggccattggcattaaagtacaaaacggctatggccttactgagacttctcctgttgttgctgctagacgaccattctgtaatgttcttgggacagttggtcacccaataaagcatactgaaatcaagatttttgacattgagactggtgaggtccttccagatggttcaaaggggattgtgaaaattaaaggaccacaagtaatgaagggatactataagaacccatcggctacaaatgaagcttttgatcaagagggttggttcagcactggagatgtaggttggatagtacctcatcatgccatggggccaagtcgccagtgtggagggatgattgttcttgaagggcgtgcaaaggatacaatagtcctatctacaggtgaaaatgttgaacctgctgagatcgaggaagcagccagcaggagtaccttgattaatcagatagttgtgatcgggcaggatcaacggcgtcttggtgccataattgttcccaacaatgatgaagttctggcagaagcaaaaaggaagtccatccttggtgaggatggcgagctagcgaaagataaggtcatgaacatgctatatgatgaattgagaacctggacagcgcactgctccttccgtgtcgggccaattctggttgtcgacgaaccattcacgattgacaatggtctgatgacacccaccatgaaaataaggagggacaaagtgacagacaagtacaggagggagatcgaagccttgttcaagtgacacgcggagcgcgtgcgcacccatcagagttcccttttccgagtacaagacggcaaccgtacggcgtacatacagacacctgcaagctgcaatgcgtccatgtaccatgtatacgtacgtacttgcgtacggtcggaagatgactgggttggaactggaagagatgatatggcggagcggccggtgggagaacaccatgagacttgttactagactcgaatgttcgtaggttgcatgagcaaaatgacatgtgttccacaattgcatcattcaataagcgattcactgagccagataaggtcttgttcggttagttctcaatccatatatatggattgagtgagtttaaatcccaaacaagtcaaacttcttcttaatttttttcaatctcatccaatccatatgtaatgacaataaccgaacaaggcatgaatcaataaaattctcccaaaccaccgcaggtaccatgcaattggtaaaaatatcatgc

SEQ ID NO: 11819 - DNA, 2605 bp, Zea Mays
ccgccgccgccgcgtctccgccgccccagtccgccggctccgcgatagaacatcaagtacgtaaaaagtgctcacctctactggagagtgctctgctgcctggtggaagtgattcgactctgcatgaatggaaggctgttccagatatttggaggacagcagcagaaaaatatgctgacctcgtagctgtggtagatccttaccatgaaccgccaacggaatggacgtatacacagcttgagcaagaaatattggatttttctcaaggtctaagggccattggtgttgctccggatgaaaagctagcactttttgctgataactcatgtcgttggctagttgcagatcaaggaatcatggcaaccggtgctataaatgttgttaggggaacaagatcatctgatgaagaattgtttcaaatatacactcattcagaaagcattgcacttgttgtggacagtcctcaattctttaaccggcttgcagagtctttcatgtcaaggattaatacaagattcattgttcttctttggggtgacaaatcatgcatagatagccaagctattaaggatataccactttatggatacaaggatatcatcgaacttggtcgagaaagccgcaatgcactgtttctttccgacgagcaaggtcagcaagatgtctttgaatctattagtcctgaagatgtggccacactaatatatactagtggaacaagtggcacaccaaaaggcgtaatgcttacccaccgaaatctcttgcatcagataaataatctgtgggagattgtaccagcagaacctggtgataggttcctaagcatgcttccaacatggcatgcatatgagcgtgcttgtgagtacttcatcttctcgtatggtatccagcaagtttacactactgttaagtacctgaagaagatgctgaagttccttagggcattttgacatcttcttctatcttctttgataggaagatttgcagcgttaccagcctcaatatattatatcagtaccactggtctacgaaactctgtacatttcaattcataggcagatttcatccagttctgctgctcgaaaaattattgctctttcacttatcaagataagtttcctatatatggaggcaaagaagatctatgagggaacagttttatcaaacaatcttgtcaaaccatcagtcatcgcctatatgatgaagtggctgtgggcaagattggttgctgcatttctttggcctttacataatctggcgaagattctagtatacaagaaaattcattcagcaatcgggatttcaaaggctggtattagtggcggtggaagtcttccgatgcatgttgataagttttttgaggccattggcattaaagtacaaaacggctatggccttactgagacttctcctgttgttgctgctagacgaccattctgtaatgttcttgggacagttggtcacccaataaagcatactgaaatcaagatttttgacattgagactggtgaggtccttccagatggttcaaaggggattgtgaaaattaaaggaccacaagtaatgaagggatactataagaacccatcggctacaaatgaagcttttgatcaagagggttggttcagcactggagatgtaggttggatagtacctcatcatgccatggggccaagtcgccagtgtggagggatgattgttcttgaagggcgtgcaaaggatacaatagtcctatctacaggtgaaaatgttgaacctgctgagatcgaggaagcagccagcaggagtaccttgattaatcagatagttgtgatcgggcaggatcaacggcgtcttggtgccataattgttcccaacaatgatgaagttctggcagaagcaaaaaggaagtccatccttggtgaggatggcgagctagcgaaagataaggtcatgaacatgctatatgatgaattgagaacctggacagcgcactgctccttccgtgtcgggccaattctggttgtcgacgaaccattcacgattgacaatggtctgatgacacccaccatgaaaataaggagggacaaagtgacagacaagtacaggagggagatcgaagccttgttcaagtgacacgcggagcgcgtgcgcacccatcagagttcccttttccgagtacaagacggcaaccgtacggcgtacatacagacacctgcaagctgcaatgcgtccatgtaccatgtatacgtacgtacttgcgtacggtcggaagatgactgggttggaactggaagagatgatatggcggagcggccggtgggagaacaccatgagacttgttactagactcgaatgttcgtaggttgcatgagcaaaatgacatgtgttccacaattgcatcattcaataagcgattcactgagccagataaggtcttgttcggttagttctcaatccatatatatggattgagtgagtttaaatcccaaacaagtcaaacttcttcttaatttttttcaatctcatccaatccatatgtaatgacaataaccgaacaaggcatgaatcaataaaattctcccaaaccaccgcaggtaccatgcaattggtaaaaatatcatgc

SEQ ID NO: 11820 - DNA, 2687 bp, Zea Mays
ccgccgccgccgcgtctccgccgccccagtccgccggctccgcgatagaacatcaagtacgtaaaaagtgctcacctctactggagagtgctctgctgcctggtggaagtgattcgactctgcatgaatggaaggctgttccagatatttggaggacagcagcagaaaaatatgctgacctcgtagctgtggtagatccttaccatgaaccgccaacggaatggacgtatacacagcttgagcaagaaatattggatttttctcaaggtctaagggccattggtgttgctccggatgaaaagctagcactttttgctgataactcatgtcgttggctagttgcagatcaaggaatcatggcaaccggtgctataaatgttgttaggggaacaagatcatctgatgaagaattgtttcaaatatacactcattcagaaagcattgcacttgttgtggacagtcctcaattctttaaccggcttgcagagtctttcatgtcaaggattaatacaagattcattgttcttctttggggtgacaaatcatgcatagatagccaagctattaaggatataccactttatggatacaaggatatcatcgaacttggtcgagaaagccgcaatgcactgtttctttccgacgagcaaggtcagcaagatgtctttgaatctattagtcctgaagatgtggccacactaatatatactagtggaacaagtggcacaccaaaaggcgtaatgcttacccaccgaaatctcttgcatcaggtgaagatagaaacattacaattttgatcaaggttgttgagcgatgataaataatctgtgggagattgtaccagcagaacctggtgataggttcctaagcatgcttccaacatggcatgcatatgagcgtgcttgtgagtacttcatcttctcgtatggtatccagcaagtttacactactgttaagtacctgaagaagatgctgaagttccttagggcattttgacatcttcttctatcttctttgataggaagatttgcagcgttaccagcctcaatatattatatcagtaccactggtctacgaaactctgtacatttcaattcataggcagatttcatccagttctgctgctcgaaaaattattgctctttcacttatcaagataagtttcctatatatggaggcaaagaagatctatgagggaacagttttatcaaacaatcttgtcaaaccatcagtcatcgcctatatgatgaagtggctgtgggcaagattggttgctgcatttctttggcctttacataatctggcgaagattctagtatacaagaaaattcattcagcaatcgggatttcaaaggctggtattagtggcggtggaagtcttccgatgcatgttgataagttttttgaggccattggcattaaagtacaaaacggctatggccttactgagacttctcctgttgttgctgctagacgaccattctgtaatgttcttgggacagttggtcacccaataaagcatactgaaatcaagatttttgacattgagactggtgaggtccttccagatggttcaaaggggattgtgaaaattaaaggaccacaagtaatgaagggatactataagaacccatcggctacaaatgaagcttttgatcaagagggttggttcagcactggagatgtaggttggatagtacctcatcatgccatggggccaagtcgccagtgtggagggatgattgttcttgaagggcgtgcaaaggatacaatagtcctatctacaggtgaaaatgttgaacctgctgagatcgaggaagcagccagcaggagtaccttgattaatcagatagttgtgatcgggcaggatcaacggcgtcttggtgccataattgttcccaacaatgatgaagttctggcagaagcaaaaaggaagtccatccttggtgaggatggcgagctagcgaaagataaggtcatgaacatgctatatgatgaattgagaacctggaggaagtgcttaattattttgttcacgcgtttcaggacagcgcactgctccttccgtgtcgggccaattctggttgtcgacgaaccattcacgattgacaatggtctgatgacacccaccatgaaaataaggagggacaaagtgacagacaagtacaggagggagatcgaagccttgttcaagtgacacgcggagcgcgtgcgcacccatcagagttcccttttccgagtacaagacggcaaccgtacggcgtacatacagacacctgcaagctgcaatgcgtccatgtaccatgtatacgtacgtacttgcgtacggtcggaagatgactgggttggaactggaagagatgatatggcggagcggccggtgggagaacaccatgagacttgttactagactcgaatgttcgtaggttgcatgagcaaaatgacatgtgttccacaattgcatcattcaataagcgattcactgagccagataaggtcttgttcggttagttctcaatccatatatatggattgagtgagtttaaatcccaaacaagtcaaacttcttcttaatttttttcaatctcatccaatccatatgtaatgacaataaccgaacaaggcatgaatcaataaaattctcccaaaccaccgcaggtaccatgcaattggtaaaaatatcatgc

SEQ ID NO: 11821 - DNA, 2562 bp, Zea Mays
gcgacctccgccccgccgccgccgcgtctccgccgccccagtccgccggctccgcgatagaacatcaagtacgtaaaaagtgctcacctctactggagagtgctctgctgcctggtggaagtgattcgactctgcatgaatggaaggctgttccagatatttggaggacagcagcagaaaaatatgctgacctcgtagctgtggtagatccttaccatgaaccgccaacggaatggacgtatacacagcttgagcaagaaatattggatttttctcaaggtctaagggccattggtgttgctccggatgaaaagctagcactttttgctgataactcatgtcgttggctagttgcagatcaaggaatcatggcaaccggtgctataaatgttgttaggggaacaagatcatctgatgaagaattgtttcaaatatacactcattcagaaagcattgcacttgttgtggacagtcctcaattctttaaccggcttgcagagtctttcatgtcaaggattaatacaagattcattgttcttctttggggtgacaaatcatgcatagatagccaagctattaaggatataccactttatggatacaaggatatcatcgaacttggtcgagaaagccgcaatgcactgtttctttccgacgagcaaggtcagcaagatgtctttgaatctattagtcctgaagatgtggccacactaatatatactagtggaacaagtggcacaccaaaaggcgtaatgcttacccaccgaaatctcttgcatcagataaataatctgtgggagattgtaccagcagaacctggtgataggttcctaagcatgcttccaacatggcatgcatatgagcgtgcttgtgagtacttcatcttctcgtatggtatccagcaagtttacactactgttaagtacctgaaggaagatttgcagcgttaccagcctcaatatattatatcagtaccactggtctacgaaactctgtacatttcaattcataggcagatttcatccagttctgctgctcgaaaaattattgctctttcacttatcaagataagtttcctatatatggaggcaaagaagatctatgagggaacagttttatcaaacaatcttgtcaaaccatcagtcatcgcctatatgatgaagtggctgtgggcaagattggttgctgcatttctttggcctttacataatctggcgaagattctagtatacaagaaaattcattcagcaatcgggatttcaaaggctggtattagtggcggtggaagtcttccgatgcatgttgataagttttttgaggccattggcattaaagtacaaaacggctatggccttactgagacttctcctgttgttgctgctagacgaccattctgtaatgttcttgggacagttggtcacccaataaagcatactgaaatcaagatttttgacattgagactggtgaggtccttccagatggttcaaaggggattgtgaaaattaaaggaccacaagtaatgaagggatactataagaacccatcggctacaaatgaagcttttgatcaagagggttggttcagcactggagatgtaggttggatagtacctcatcatgccatggggccaagtcgccagtgtggagggatgattgttcttgaagggcgtgcaaaggatacaatagtcctatctacaggtgaaaatgttgaacctgctgagatcgaggaagcagccagcaggagtaccttgattaatcagatagttgtgatcgggcaggatcaacggcgtcttggtgccataattgttcccaacaatgatgaagttctggcagaagcaaaaaggaagtccatccttggtgaggatggcgagctagcgaaagataaggtcatgaacatgctatatgatgaattgagaacctggacagcgcactgctccttccgtgtcgggccaattctggttgtcgacgaaccattcacgattgacaatggtctgatgacacccaccatgaaaataaggagggacaaagtgacagacaagtacaggagggagatcgaagccttgttcaagtgacacgcggagcgcgtgcgcacccatcagagttcccttttccgagtacaagacggcaaccgtacggcgtacatacagacacctgcaagctgcaatgcgtccatgtaccatgtatacgtacgtacttgcgtacggtcggaagatgactgggttggaactggaagagatgatatggcggagcggccggtgggagaacaccatgagacttgttactagactcgaatgttcgtaggttgcatgagcaaaatgacatgtgttccacaattgcatcattcaataagcgattcactgagccagataaggtcttgttcggttagttctcaatccatatatatggattgagtgagtttaaatcccaaacaagtcaaacttcttcttaatttttttcaatctcatccaatccatatgtaatgacaataaccgaacaaggcatgaatcaataaaattctcccaaaccaccgcaggtaccatgcaattggtaaaaatatcatgc

SEQ ID NO: 11822 - DNA, 1065 bp, Zea Mays
ctgcaattatgctttcgagcaaaggttctgtacactatgggtggcttggaaaatcttcagacagctaagaagtactatgcatcaacaatccagttgactggaggcaagaatacaagagccctctttggtgtatgtctgttgaccaaaggaaggaataaagaggaagagggctcggagctgcagagattggctgcagaagtactgctgaataattacaagcagcaggctccatcaaaggcgccccttatcagcagcttgttgaagaacatgaaactcagctgataccaactagctctacacattcagaatgtcctgattcgatagatagttaagttaaattgatgtggcataatgcttgtttttttttgtggcactggcaccaacattgtgcaatggttaaaaagtaggtgctcccaaggccatgggttgtgtacactacacctgtttgcttgccgagaaatatgcatgacttctttttcattggatgttctattatagatcacaataaaccccggccattgtacttcagcacaaacaaaactttgaatcagtcgctggtgaagttgtacctgttgattttgattggtatctgactgttgtagccttgtagatgaatccctgactcggagcatttttttctttatcgtcgaattctcggttgctcattgttttcgctgcaatgactcagaaatcttgagcttggaatgtgaaacgtacccaatggacctattatctgtattgttggagaggcttggagcaatacttttatggtcccatcattcgtactattggcgtgaaggtgaggcagttgcttctccaaaagagtcaaacgctgcaattaaagtttagagaatatcaatagaacgagataaagttaattatattatttatcatattttataagaggttgataaaatttgacgtacatattttacacaaaggttatacagtttaagtcacgttccgaaccatggcttgggtgccccgttccggcttttttttttcgttttctagacgccaaaactcaaatgtataactttttagtctattttagagttagtttgg

SEQ ID NO: 11823 - DNA, 1878 bp, Zea Mays
gaagatcgacgacagccgcggcctcttggcctcaatccctgaagtgcctgccaccacgccgcgccgcgccgcgcccgccatacaacgacttcctgcagtcctgcgctgcgcccctcctttccgcctccacgctgccgacgtccaccacacagcacggtcgactcacccgatccctccatggcggcggcggtggcggcggtcgcggctgccacgacggcggaggacgaggcgcgcctgctgcgtctggaggagcaggcggagcacggcggcggcggcgcctgggactacctctgcctcgcccgccggctccgcgcccgccgccccgcccacgtcctccgcgtcggcctcgctctcctcaacaacgcctccgctcgctccgagtggacgctctacgagcaggtggccacggcggccatggattgccagcgtctcgatgtggcaaaggactgtattggagtcctttcaaagcaatttcctggcagcacccgggttgcccggctagaagctcttctgtttgaagcgaaaagtgaatgggctgaagctgaaagagcttacacgcaaatcctggaaatcaatccatttgaccagattgtccacaagaggaaaattgctattgcaaaagcacaaggcaatatgtcgctagcaattggttatctcaataagtatctggaattatttatggcagatcatgatgcctggagagaacttgctgaaacatatgtttccttacaaatgtacaagcaagctgccttttgttatgaggagctaatattatcccaaccaactattccactctatcatatagcctatgctgaggttctgtacactatgggtggcttggaaaatcttcagacagctaagaagtactatgcatcaacaatccagttgactggaggcaagaatacaagagccctctttggtgtatgtctgtgtacttcggcaatcaatcagttgaccaaaggaaggaataaagaggaagagggctcggagctgcagagattggctgcagaagtactgctgaataattacaagcagcaggctccatcaaaggcgccccttatcagcagcttgttgaagaacatgaaactcagctgataccaactagctctacacattcagaatgtcctgattcgatagatagttaagttaaattgatgtggcataatgcttgtttttttttgtggcactggcaccaacattgtgcaatggttaaaaagtaggtgctcccaaggccatgggttgtgtacactacacctgtttgcttgccgagaaatatgcatgacttctttttcattggatgttctattatagatcacaataaaccccggccattgtacttcagcacaaacaaaactttgaatcagtcgctggtgaagttgtacctgttgattttgattggtatctgactgttgtagccttgtagatgaatccctgactcggagcatttttttctttatcgtcgaattctcggttgctcattgttttcgctgcaatgactcagaaatcttgagcttggaatgtgaaacgtacccaatggacctattatctgtattgttggagaggcttggagcaatacttttatggtcccatcattcgtactattggcgtgaaggtgaggcagttgcttctccaaaagagtcaaacgctgcaattaaagtttagagaatatcaatagaacgagataaagttaattatattatttatcatattttataagaggttgataaaatttgacgtacatattttacacaaaggttatacagtttaagtcacgttccgaaccatggcttgggtgccccgttccggcttttttttttcgttttctagacgccaaaactcaaatgtataactttttagtctattttagagttagtttgg

SEQ ID NO: 11824 - DNA, 2435 bp, Zea Mays
gtttggaacaaatcaaccacaagcagatttatctcagccaccaccaccagcagcagcagctcaaatccatccaactactgtaataaatgaagaagaatctcaagtcttttccctctccctcctctctctaatgtacatctttggtattaaaaatgttattacacctcaacagatcaaaattgtgcagcgataacacctaaccaactccattacagatcccagcctcctggcagccaacactgtttgttcgactttccacgcagcacgcccacggcaaagggagtggtgcatgaagctatctatctatgccacacaagctacttgtaaaagctggcaacacatcccagccacacaaagttgctgttgttcattgatgtctcagcttcacaggtgattgtcactcagctaaaagggtatcacgtatggcagagcaatgacatcagcatggtcaattttcagagcctgagcccacacttgggggactccatcagcctcaggcgctgaactggccggcttccttggctgggtgccgcctttgtcgaacagccagtcctcaccttcctgcccaggcaattccatcatttgaggtgcttcaggaatgctgtatatctggctaagatacttgcagtcggggtgaggtggcttcctagagcttgtgccattctcataagcagccaccggatcgactggacctcgctgctgaccctgttggttgccattgaccttctcttccttgtggagcctttcagccttttcaatatttatggcttcctgcttcacagaagagagtggcgcggctacatgagatgctgtaccattctccacacgattgctggggagtgctggtctcggcaactttgtaggccgcatatcaaggttgtctgtacagcagcatcagaagtcttataatataaagcaccataaaaaaggataatggtgtcatacaagactcgcatgctgttaagtgcaaaagaaaaaaagaaaagctaggaactcactttgtaagtaaccattcgtttcatggttctttcgcttcttcaggttctcatcaggcacaacagattttccatcatcaactggtggggctaaaggagggaccgagtgcttcaagttaagactatctatgggataacttatactgttttctcttgttttattatgctctttgtggttatgttcccttttctccttctttgcctctttctcctttttcttctctttgtgtttatctttctctttccttttctttttctcatgccgatcactctttttgtcctctttcttggcaatatctggtgccccatctctgaccttctccatcctttcagctctcccatctgcagctttctccacagctggaggctttgacataaccagtttctgatcagttgaaatattagcctgcagcaaccttccaccttgttccttttccttgcccatagcaggtgaaaggcctcctgcatcaggtttcttagcagagacagaaagattttcagctggtcgtaccatgccattcggtctccgtattgtaatgctcgggcttgggatggatgacctaggtgctcctctatccatcccccatgttgcacttgatgttgatgggctgccaaatctctgcatggatccttgtgtgttgtccattggcctaccaaccttgccatttcccttatgcatagcattagcaggatttggaggcaatggagaggaggtgccaacttctttcttcgcgacatctttgtttgtgttctcagttctcttttgaagcgatatgctaatgttactgattcgctgtccaaccccctcttttctgggtgcagcttcattactggatgaaagccttgcagctttgaatttatcctccgttgtaggtgctggtggaaagccaccagcagttcttcgagcagaagtggtgaagctttcagaatgttgtactgatgtcccattcttttgtcgattggcattgatgctctgttgtataaatccctcagttttccttgaagcattaccagactgaatatgcactttattatgcgcggacctttcagtctccattgcaggtgaagcaatgaagcctttgcgatttcgatcatttgaaacagcataattttcaatagtttgactcgctgcccctttctcatcctgtactcctctgaccaactcctccctgaatttaagatccttaatttcttcagaccccctgctgctctctccaaccttctgaccatggagagcctcgtcatttctttgaattccttcgcctgactccctgtttttatctttgctcttgtcttttttctcgtctttgtgtttttctttacgatctttcttatctttgtgcttatccctactcctgtctttatccttcttttctttaccttcctttctatctttgtccttcttgtccttcttatgtttcttctctttgtgtttctcct

SEQ ID NO: 11825 - DNA, 3982 bp, Zea Mays
gtttggaacaaatcaaccacaagcagatttatctcagccaccaccaccagcagcagcagctcaaatccatccaactactgtaataaatgaagaagaatctcaagtcttttccctctccctcctctctctaatgtacatctttggtattaaaaatgttattacacctcaacagatcaaaattgtgcagcgataacacctaaccaactccattacagatcccagcctcctggcagccaacactgtttgttcgactttccacgcagcacgcccacggcaaagggagtggtgcatgaagctatctatctatgccacacaagctacttgtaaaagctggcaacacatcccagccacacaaagttgctgttgttcattgatgtctcagcttcacaggtgattgtcactcagctaaaagggtatcacgtatggcagagcaatgacatcagcatggtcaattttcagagcctgagcccacacttgggggactccatcagcctcaggcgctgaactggccggcttccttggctgggtgccgcctttgtcgaacagccagtcctcaccttcctgcccaggcaattccatcatttgaggtgcttcaggaatgctgtatatctggctaagatacttgcagtcggggtgaggtggcttcctagagcttgtgccattctcataagcagccaccggatcgactggacctcgctgctgaccctgttggttgccattgaccttctcttccttgtggagcctttcagccttttcaatatttatggcttcctgcttcacagaagagagtggcgcggctacatgagatgctgtaccattctccacacgattgctggggagtgctggtctcggcaactttgtaggccgcatatcaaggttgtctgtacagcagcatcagaagtcttataatataaagcaccataaaaaaggataatggtgtcatacaagactcgcatgctgttaagtgcaaaagaaaaaaagaaaagctaggaactcactttgtaagtaaccattcgtttcatggttctttcgcttcttcaggttctcatcaggcacaacagattttccatcatcaactggtggggctaaaggagggaccgagtgcttcaagttaagactatctatgggataacttatactgttttctcttgttttattatgctctttgtggttatgttcccttttctccttctttgcctctttctcctttttcttctctttgtgtttatctttctctttccttttctttttctcatgccgatcactctttttgtcctctttcttggcaatatctggtgccccatctctgaccttctccatcctttcagctctcccatctgcagctttctccacagctggaggctttgacataaccagtttctgatcagttgaaatattagcctgcagcaaccttccaccttgttccttttccttgcccatagcaggtgaaaggcctcctgcatcaggtttcttagcagagacagaaagattttcagctggtcgtaccatgccattcggtctccgtattgtaatgctcgggcttgggatggatgacctaggtgctcctctatccatcccccatgttgcacttgatgttgatgggctgccaaatctctgcatggatccttgtgtgttgtccattggcctaccaaccttgccatttcccttatgcatagcattagcaggatttggaggcaatggagaggaggtgccaacttctttcttcgcgacatctttgtttgtgttctcagttctcttttgaagcgatatgctaatgttactgattcgctgtccaaccccctcttttctgggtgcagcttcattactggatgaaagccttgcagctttgaatttatcctccgttgtaggtgctggtggaaagccaccagcagttcttcgagcagaagtggtgaagctttcagaatgttgtactgatgtcccattcttttgtcgattggcattgatgctctgttgtataaatccctcagttttccttgaagcattaccagactgaatatgcactttattatgcgcggacctttcagtctccattgcaggtgaagcaatgaagcctttgcgatttcgatcatttgaaacagcataattttcaatagtttgactcgctgcccctttctcatcctgtactcctctgaccaactcctccctgaatttaagatccttaatttcttcagaccccctgctgctctctccaaccttctgaccatggagagcctcgtcatttctttgaattccttcgcctgactccctgtttttatctttgctcttgtcttttttctcgtctttgtgtttttctttacgatctttcttatctttgtgcttatccctactcctgtctttatccttcttttctttaccttcctttctatctttgtccttcttgtccttcttatgtttcttctctttgtgtttctcctgagatgacaacgttgtttcaagtcaagtaaacgccagttacagaaaaaaaaaactagcaaatgagtaaaaaataaaggccaggagcaagccttagtgaaatacagtacataaaataaccattaactaaaatgtacaaaacgatgaacagtgatgttttagggtgaacggtgacatcaatactccatttgcacaactattcaaggccacactgcctaaaagcatactgaatgacaagttattaactgcaaataaagttgtatccatggtacaacaaatctgcaaggtgcaaagtataggcaatatgcaatacagatcactgaactacattgacaccctattaggacatctaccttctcatatgtgcaagggacatgctacatttgaaccaaattcacaaaaactggaaataaattaggagatagctggttttccaactacaactttgacctatgaactatgaaaggaacaagatagttattagcctattagtactttatgcgctctcaagttaatgtcttcaatagtaaccacaaattaggttaacctgtgcaaatttttattaggctgcatccatatgcatggaaggattagacaggccatgggatgtccgaaaatcatgcaatcaatttcaccaaacaatagtgatcggttaaaaagcctaaaccatcacacttttatacatctttttttttctgcattggctagagcctacagccaaacctactcatagtaaacatgatcaataaaacttctataacaacacaaagctccaggcaaaacttatccatcttaagggctactttgggaacctcaaatcccatttgggattggaggggattgaggtggaaatgaactaatttcctctccaatccccttcaatcccgaagaggatttgagtttctaaactagccctaacaagtgctacaggcctacaatatttaagttacatggtactgtcgtgtaacaacatttctgaattttcttgcactagtatcaggttcatagattccagtattgtccgagggagcaattttgcattgttaatcttgttaaaacttggtattaggcactggcaatccaaaatgtactgtttcaggccatatttttagtttgtcatttaattataatcaactgtcagaagacacaaaaaattgatcatgtggagtccaaaacacagcaaaaagaatgggatacataacttgagttgccaagaacaatgatataaggacccccaagccaatgaatacagcaaacaaagtagctactgggctgtatgcagccattattcatttggaatgtagtatgacaccagcaatttcatggtaccctctatggtgccctggcactgatttcatataaggataaggacagataacaagtccaaaacaggaaatatgctgattaaatatctaaagcatatcccaccatgtcatgaatcatgaaatgacaatagtagaacacaaacagactaaccaatctaactcttcgtgtttgccttcaactatagatgaaaagatatcgatgcaaggtggtctactctctattg

SEQ ID NO: 11826 - DNA, 645 bp, Zea Mays
gtgtcacatatgtagcctagacacatgattcagttggaataaatgcagtgtcgtgtgatcgtgtctcgagtactcagctctggctgttgcaattgtgcgtgtccgttgccggtttcgttcgaggccatgagcatatattgatcctatgttatgagagcatgcatatagtgtaacgtgggctccaaataacagaactgcttttatgctcgcggtgtgcattctgttgtgccttgctttcatgattttcctgttctctggtgaattggtggtagcctgaacatcaggttatcttctcttatatatgggcatatttctgacctggattttttttcaagcacatgttaatcaaaatgtttggtgcagaatgaaccccgtcagtgtatatgtagcagaaatgttgttcagctgttcttatagtctcttttgattctgaatgttgcagagtcgtcaatccaatagatggcgttattgtttccaaaaagcagatgccaccaagaaagacatggaagcttgttcccatgtgaactttcaaaagaaaacttatcatccgtcaaggatacagttgaaatggttgtcaaagaatggggagagaaatcattaactgaattggaagcagaagagcggctgtcctattcatgtgagaag

SEQ ID NO: 11827 - DNA, 2560 bp, Zea Mays
tcgggtccccttcccctccgtccagctcgccgtctgagggaagcagggcgcagcagtcaccagtgaccagtcatggctcgctgcgttgccggcagctgccctcccgtcaccttcgcgtgttgcccccgccggactggacgaagtgctgttgttcagtgtggcactgcatcgagcacaccagcaatatctggaactggaccttcatcatctggatcctcggggcttgttcaagattgtactgcccctctggtctgtgcactgcaattaactgccagacaagatgtttcctgctttcacttcccaggacacaacagaggaaaagctgctccatcttccttgtcgaaactcattggctcaggggcatttctgcatgacttgcccgagctacccgagctcgatgatctcttctccccaaaaggtgtgattctagatgcccagaggcgagcagctcaactgtttgggtcatctaaaacttggttccttgtcaacggaacgacctgtggaatccaggcctcagtgatggctacctgttctcctggcgactacctcattgtgccacggaactgccacctttcagtgatctctgcgctggtcttgtctggtgtggtgcctaaatacataataccagaatataattctgggtgggacattgctggtggtatcaccccgctgcagctggatgaagcagtaaaagagctggaggaggatgggaagagggtaggcgctgttcttgttacttcacccacctaccatggtgtatgcagcaatgtgcaaggtattgtcagtgtttgtcatccacgaggcattccggttatagttgatgaagcgcatggtgcacatttcaggttccatgacagtttgccaagcactgcaattgagcaaggtgctgacctagctgtgcaatccacacacaaggtcctgtgctcccttacacagtcttcaatgcttcacatgtctggagatcttgtcgatgtagataaagtaagccagtgccttcagctcctccagagctcgagcccgagttaccttctactgtcatctttagatgccgcgagagatcagctgagccagaacacaaatatatttgatgagccattagctatagcatcggaaacaaaagacctgctggcgagaatccctgggatatctgttctagacttaccatgctttgcttctgatttccctgccattgatccgttgcgcatcacactcagtgcctcagatctgcaattatcgggatacgaagccgatgacattttatatgaaggccatcaaatcgtatctgagcttgttggcacaagggccgtgacatttgcagtcaacttaggaaccagagtgcaggacgctgagaagcttgtgcagtctgcaaagcatctatcagaaaaacatttctttgcaaatagcctgaaacccgtgaaggagaatcgtgtgcatggcccattagagaatatctctgtgcatctgagtccaagagaggccttctttacagagaagaggagagtgaaaatcgaggacagccttggtgaaatctgtggtgagctaatatgcccgtatccacctggtatcccagttctgattccaggcgaggtagtaacccatgattcactgtcctacttgatgagcgttagacaccaaggcatcacgatcagtggagcggctgatgctgagctaaattccattctggtgtgcgacttatgatgattgccctattgtttgtcacaagactgtgttgtcgcagagataccgtgggtgggagagatcaagtatggtttatgccaagtcaagagcacaatgtattgtccgcttgatggatgtaaaccaacggctggcggtttgtagccaccggccacttggccaaataatttagtctgtgttgtgttgtgtctcggtctcgtgagccgaaagagttgccaagctgcgacatatgatgccaaagcatgaataagggtctatagcatgtgatctcctgtgttgttgtttgaagtatgagttgctagggagggagggctacctttctatctgaagtgccgtgcaatgtttcctctttgcttctcttctgaactgggaggtccggtctgaactggcagtaaagctgaagcatcatatgcaggtctgcacacctccacggttgtgctacctccggctgcatgttttgcagggcttctgaaacaacttgataggcccccctacacactgccatcaacaagacaacaaccatgaagtaatgtgacagtgatgatgacgacgacgatgcagttgggttcgtcacgggccagccggcggtctttccctaacaaagcgcgcgcaccataaacaataaggacctattgtgcgggtttggtaaagggagccaaggacaagcatttgagggttaaggggcatgtcaggatccctactaaggttctccacatcaccactcgtgtgtccccttgcggtgaaagtatcaagctgttttctagcctctgctgttgaaactgtctcctggttggctttgtttaattttactgattgaatttttagtgctttcattaaaaggaatacataataaattgatctgttc

SEQ ID NO: 11828 - DNA, 2406 bp, Zea Mays
tcgggtccccttcccctccgtccagctcgccgtctgagggaagcagggcgcagcagtcaccagtgaccagtcatggctcgctgcgttgccggcagctgccctcccgtcaccttcgcgtgttgcccccgccggactggacgaagtgctgttgttcagtgtggcactgcatcgagcacaccagcaatatctggaactggaccttcatcatctggatcctcggggcttgttcaagattgtactgcccctctggtctgtgcactgcaattaactgccagacaagatgtttcctgctttcacttcccaggacacaacagaggaaaagctgctccatcttccttgtcgaaactcattggctcaggggcatttctgcatgacttgcccgagctacccgagctcgatgatctcttctccccaaaaggtgtgattctagatgcccagaggcgagcagctcaactgtttgggtcatctaaaacttggttccttgtcaacggaacgacctgtggaatccaggcctcagtgatggctacctgttctcctggcgactacctcattgtgccacggaactgccacctttcagtgatctctgcgctggtcttgtctggtgtggtgcctaaatacataataccagaatataattctgggtgggacattgctggtggtatcaccccgctgcagctggatgaagcagtaaaagagctggaggaggatgggaagagggtaggcgctgttcttgttacttcacccacctaccatggtgtatgcagcaatgtgcaaggtattgtcagtgtttgtcatccacgaggcattccggttatagttgatgaagcgcatggtgcacatttcaggttccatgacagtttgccaagcactgcaattgagcaaggtgctgacctagctgtgcaatccacacacaaggtcctgtgctcccttacacagtcttcaatgcttcacatgtctggagatcttgtcgatgtagataaagtaagccagtgccttcagctcctccagagctcgagcccgagttaccttctactgtcatctttagatgccgcgagagatcagctgagccagaacacaaatatatttgatgagccattagctatagcatcggaaacaaaagacctgctggcgagaatccctgggatatctgttctagacttaccatgctttgcttctgatttccctgccattgatccgttgcgcatcacactcagtgcctcagatctgcaattatcgggatacgaagccgatgacattttatatgaaggccatcaaatcgtatctgagcttgttggcacaagggccgtgacatttgcagtcaacttaggaaccagagtgcaggacgctgagaagcttgtgcagtctgcaaagcatctatcagaaaaacatttctttgcaaatagcctgaaacccgtgaaggagaatcgtgtgcatggcccattagagaatatctctgtgcatctgagtccaagagaggccttctttacagagaagaggagagtgaaaatcgaggacagccttggtgaaatctgtggtgagctaatatgcccgtatccacctggtatcccagttctgattccaggcgaggtagtaacccatgattcactgtcctacttgatgagcgttagacaccaaggcatcacgatcagtggagcggctgatgctgagctaaattccattctggtgtgcgacttatgatgattgccctattgtttgtcacaagactgtgttgtcgcagagataccgtgggtgggagagatcaagtatggtttatgccaagtcaagagcacaatgtattgtccgcttgatggatgtaaaccaacggctggcggtttgtagccaccggccacttggccaaataatttagtctgtgttgtgttgtgtctcggtctcgtgagccgaaagagttgccaagctgcgacatatgatgccaaagcatgaataagggtctatagcatgtgatctcctgtgttgttgtttgaagtatgagttgctagggagggagggctacctttctatctgaagtgccgtgcaatgtttcctctttgcttctcttctgaactgggaggtccggtctgaactggcagtaaagctgaagcatcatatgcaggtctgcacacctccacggttgtgctacctccggctgcatgttttgcagggcttctgaaacaaattgtgcgggtttggtaaagggagccaaggacaagcatttgagggttaaggggcatgtcaggatccctactaaggttctccacatcaccactcgtgtgtccccttgcggtgaaagtatcaagctgttttctagcctctgctgttgaaactgtctcctggttggctttgtttaattttactgattgaatttttagtgctttcattaaaaggaatacataataaattgatctgttc

SEQ ID NO: 11829 - DNA, 2489 bp, Zea Mays
ctagaattccataaagttgggccgggccaagtttgcatcgatcagggaacgttatccccagctgcccagcaccacaatcgggtccccttcccctccgtccagctcgccgtctgagggaagcagggcgcagcagtcaccagtgaccagtcatggctcgctgcgttgccggcagctgccctcccgtcaccttcgcgtgttgcccccgccggactggacgaagtgctgttgttcagtgtggcactgcatcgagcacaccagcaatatctggaactggaccttcatcatctggatcctcggggcttgttcaagattgtactgcccctctggtctgtgcactgcaattaactgccagacaagatgtttcctgctttcacttcccaggacacaacagaggaaaagctgctccatcttccttgtcgaaactcattggctcaggggcatttctgcatgacttgcccgagctacccgagctcgatgatctcttctccccaaaaggtgtgattctagatgcccagaggcgagcagctcaactgtttgggtcatctaaaacttggttccttgtcaacggaacgacctgtggaatccaggcctcagtgatggctacctgttctcctggcgactacctcattgtgccacggaactgccacctttcagtgatctctgcgctggtcttgtctggtgtggtgcctaaatacataataccagaatataattctgggtgggacattgctggtggtatcaccccgctgcagctggatgaagcagtaaaagagctggaggaggatgggaagagggtaggcgctgttcttgttacttcacccacctaccatggtgtatgcagcaatgtgcaaggtattgtcagtgtttgtcatccacgaggcattccggttatagttgatgaagcgcatggtgcacatttcaggttccatgacagtttgccaagcactgcaattgagcaaggtgctgacctagctgtgcaatccacacacaaggtcctgtgctcccttacacagtcttcaatgcttcacatgtctggagatcttgtcgatgtagataaagtaagccagtgccttcagctcctccagagctcgagcccgagttaccttctactgtcatctttagatgccgcgagagatcagctgagccagaacacaaatatatttgatgagccattagctatagcatcggaaacaaaagacctgctggcgagaatccctgggatatctgttctagacttaccatgctttgcttctgatttccctgccattgatccgttgcgcatcacactcagtgcctcagatctgcaattatcgggatacgaagccgatgacattttatatgaaggccatcaaatcgtatctgagcttgttggcacaagggccgtgacatttgcagtcaacttaggaaccagagtgcaggacgctgagaagcttgtgcagtctgcaaagcatctatcagaaaaacatttctttgcaaatagcctgaaacccgtgaaggagaatcgtgtgcatggcccattagagaatatctctgtgcatctgagtccaagagaggccttctttacagagaagaggagagtgaaaatcgaggacagccttggtgaaatctgtggtgagctaatatgcccgtatccacctggtatcccagttctgattccaggcgaggtagtaacccatgattcactgtcctacttgatgagcgttagacaccaaggcatcacgatcagtggagcggctgatgctgagctaaattccattctggtgtgcgacttatgatgattgccctattgtttgtcacaagactgtgttgtcgcagagataccgtgggtgggagagatcaagtatggtttatgccaagtcaagagcacaatgtattgtccgcttgatggatgtaaaccaacggctggcggtttgtagccaccggccacttggccaaataatttagtctgtgttgtgttgtgtctcggtctcgtgagccgaaagagttgccaagctgcgacatatgatgccaaagcatgaataagggtctatagcatgtgatctcctgtgttgttgtttgaagtatgagttgctagggagggagggctacctttctatctgaagtgccgtgcaatgtaatggtttcctctttgcttctcttctgaactgggaggtccggtctgaactggcagtaaagctgaagcatcatatgcaggtctgcacacctccacggttgtgctacctccggctgcatgttttgcagggcttctgaaacaaattgtgcgggtttggtaaagggagccaaggacaagcatttgagggttaaggggcatgtcaggatccctactaaggttctccacatcaccactcgtgtgtccccttgcggtgaaagtatcaagctgttttctagcctctgctgttgaaactgtctcctggttggctttgtttaattttactgattgaatttttagtgctttcattaaaaggaatacataataaattgatctgttc

SEQ ID NO: 11830 - DNA, 2270 bp, Zea Mays
tcgggtccccttcccctccgtccagctcgccgtctgagggaagcagggcgcagcagtcaccagtgaccagtcatggctcgctgcgttgccggcagctgccctcccgtcaccttcgcgtgttgcccccgccggactggacgaagtgctgttgttcagtgtggcactgcatcgagcacaccagcaatatctggaactggaccttcatcatctggatcctcggggcttgttcaagattgtactgcccctctggtctgtgcactgcaattaactgccagacaagatgtttcctgctttcacttcccaggacacaacagaggaaaagctgctccatcttccttgtcgaaactcattggctcaggggcatttctgcatgacttgcccgagctacccgagctcgatgatctcttctccccaaaaggtgtgattctagatgcccagaggcgagcagctcaactgtttgggtcatctaaaacttggttccttgtcaacggaacgacctgtggaatccaggcctcagtgatggctacctgttctcctggcgactacctcattgtgccacggaactgccacctttcagtgatctctgcgctggtcttgtctggtgtggtgcctaaatacataataccagaatataattctgggtgggacattgctggtggtatcaccccgctgcagctggatgaagcagtaaaagagctggaggaggatgggaagagggtaggcgctgttcttgttacttcacccacctaccatggtgtatgcagcaatgtgcaaggtattgtcagtgtttgtcatccacgaggcattccggttatagttgatgaagcgcatggtgcacatttcaggttccatgacagtttgccaagcactgcaattgagcaaggtgctgacctagctgtgcaatccacacacaaggtcctgtgctcccttacacagtcttcaatgcttcacatgtctggagatcttgtcgatgtagataaagtaagccagtgccttcagctcctccagagctcgagcccgagttaccttctactgtcatctttagatgccgcgagagatcagctgagccagaacacaaatatatttgatgagccattagctatagcatcggaaacaaaagacctgctggcgagaatccctgggatatctgttctagacttaccatgctttgcttctgatttccctgccattgatccgttgcgcatcacactcagtgcctcagatctgcaattatcgggatacgaagccgatgacattttatatgaaggccatcaaatcgtatctgagcttgttggcacaagggccgtgacatttgcagtcaacttaggaaccagagtgcaggacgctgagaagcttgtgcagtctgcaaagcatctatcagaaaaacatttctttgcaaatagcctgaaacccgtgaaggagaatcgtgtgcatggcccattagagaatatctctgtgcatctgagtccaagagaggccttctttacagagaagaggagagtgaaaatcgaggacagccttggtgaaatctgtggtgagctaatatgcccgtatccacctggtatcccagttctgattccaggcgaggtagtaacccatgattcactgtcctacttgatgagcgttagacaccaaggcatcacgatcagtggagcggctgatgctgagctaaattccattctggtgtgcgacttatgatgattgccctattgtttgtcacaagactgtgttgtcgcagagataccgtgggtgggagagatcaagtatggtttatgccaagtcaagagcacaatgtattgtccgcttgatggatgtaaaccaacggctggcggtttgtagccaccggccacttggccaaataatttagtctgtgttgtgttgtgtctcggtctcgtgagccgaaagagttgccaagctgcgacatatgatgccaaagcatgaataagggtctatagcatgtgatctcctgtgttgttgtttgaagtatgagttgctagggagggagggctacctttctatctgaagtgccgtgcaatgtaatggtttcctctttgcttctcttctgaactgggaggtccggtctgaactggcagtaaagctgaagcatcatatgcaggtctgcacacctccacggttgtgctacctccggctgcatgttttgcagggcttctgaaacaagcccccctacacactgccatcaacaagacaacaaccatgaagtaatgtgacagtgatgatgacgacgacgatgcagttgggttcgtcacggg

SEQ ID NO: 11831 - DNA, 2387 bp, Zea Mays
tcgggtccccttcccctccgtccagctcgccgtctgagggaagcagggcgcagcagtcaccagtgaccagtcatggctcgctgcgttgccggcagctgccctcccgtcaccttcgcgtgttgcccccgccggactgggagtcttccagacgaagtgctgttgttcagtgtggcactgcatcgagcacaccagcaatatctggaactggaccttcatcatctggatcctcggggcttgttcaagattgtactgcccctctggtctgtgcactgcaattaactgccagacaagatgtttcctgctttcacttcccaggacacaacagaggaaaagctgctccatcttccttgtcgaaactcattggctcaggggcatttctgcatgacttgcccgagctacccgagctcgatgatctcttctccccaaaaggtgtgattctagatgcccagaggcgagcagctcaactgtttgggtcatctaaaacttggttccttgtcaacggaacgacctgtggaatccaggcctcagtgatggctacctgttctcctggcgactacctcattgtgccacggaactgccacctttcagtgatctctgcgctggtcttgtctggtgtggtgcctaaatacataataccagaatataattctgggtgggacattgctggtggtatcaccccgctgcagctggatgaagcagtaaaagagctggaggaggatgggaagagggtaggcgctgttcttgttacttcacccacctaccatggtgtatgcagcaatgtgcaaggtattgtcagtgtttgtcatccacgaggcattccggttatagttgatgaagcgcatggtgcacatttcaggttccatgacagtttgccaagcactgcaattgagcaaggtgctgacctagctgtgcaatccacacacaaggtcctgtgctcccttacacagtcttcaatgcttcacatgtctggagatcttgtcgatgtagataaagtaagccagtgccttcagctcctccagagctcgagcccgagttaccttctactgtcatctttagatgccgcgagagatcagctgagccagaacacaaatatatttgatgagccattagctatagcatcggaaacaaaagacctgctggcgagaatccctgggatatctgttctagacttaccatgctttgcttctgatttccctgccattgatccgttgcgcatcacactcagtgcctcagatctgcaattatcgggatacgaagccgatgacattttatatgaaggccatcaaatcgtatctgagcttgttggcacaagggccgtgacatttgcagtcaacttaggaaccagagtgcaggacgctgagaagcttgtgcagtctgcaaagcatctatcagaaaaacatttctttgcaaatagcctgaaacccgtgaaggagaatcgtgtgcatggcccattagagaatatctctgtgcatctgagtccaagagaggccttctttacagagaagaggagagtgaaaatcgaggacagccttggtgaaatctgtggtgagctaatatgcccgtatccacctggtatcccagttctgattccaggcgaggtagtaacccatgattcactgtcctacttgatgagcgttagacaccaaggcatcacgatcagtggagcggctgatgctgagctaaattccattctggtgtgcgacttatgatgattgccctattgtttgtcacaagactgtgttgtcgcagagataccgtgggtgggagagatcaagtatggtttatgccaagtcaagagcacaatgtattgtccgcttgatggatgtaaaccaacggctggcggtttgtagccaccggccacttggccaaataatttagtctgtgttgtgttgtgtctcggtctcgtgagccgaaagagttgccaagctgcgacatatgatgccaaagcatgaataagggtctatagcatgtgatctcctgtgttgttgtttgaagtatgagttgctagggagggagggctacctttctatctgaagtgccgtgcaatgtaatggtttcctctttgcttctcttctgaactgggaggtccggtctgaactggcagtaaagctgaagcatcatatgcaggtctgcacacctccacggttgtgctacctccggctgcatgttttgcagggcttctgaaacaagtactatctaccttctcttctaagtttatccatcaactcatgaattcacgaacattccacaactcgtacacacacacacaaaaaaggaaacataggaatggaccgcatcattgtaatcacaattttttttcttcatttcgtagaatggcactcttgctctatagtataagaaatgaagggcgcttatatatatacaaa

SEQ ID NO: 11832 - DNA, 2381 bp, Zea Mays
tcgggtccccttcccctccgtccagctcgccgtctgagggaagcagggcgcagcagtcaccagtgaccagtcatggctcgctgcgttgccggcagctgccctcccgtcaccttcgcgtgttgcccccgccggactgggagtcttccagacgaagtgctgttgttcagtgtggcactgcatcgagcacaccagcaatatctggaactggaccttcatcatctggatcctcggggcttgttcaagattgtactgcccctctggtctgtgcactgcaattaactgccagacaagatgtttcctgctttcacttcccaggacacaacagaggaaaagctgctccatcttccttgtcgaaactcattggctcaggggcatttctgcatgacttgcccgagctacccgagctcgatgatctcttctccccaaaaggtgtgattctagatgcccagaggcgagcagctcaactgtttgggtcatctaaaacttggttccttgtcaacggaacgacctgtggaatccaggcctcagtgatggctacctgttctcctggcgactacctcattgtgccacggaactgccacctttcagtgatctctgcgctggtcttgtctggtgtggtgcctaaatacataataccagaatataattctgggtgggacattgctggtggtatcaccccgctgcagctggatgaagcagtaaaagagctggaggaggatgggaagagggtaggcgctgttcttgttacttcacccacctaccatggtgtatgcagcaatgtgcaaggtattgtcagtgtttgtcatccacgaggcattccggttatagttgatgaagcgcatggtgcacatttcaggttccatgacagtttgccaagcactgcaattgagcaaggtgctgacctagctgtgcaatccacacacaaggtcctgtgctcccttacacagtcttcaatgcttcacatgtctggagatcttgtcgatgtagataaagtaagccagtgccttcagctcctccagagctcgagcccgagttaccttctactgtcatctttagatgccgcgagagatcagctgagccagaacacaaatatatttgatgagccattagctatagcatcggaaacaaaagacctgctggcgagaatccctgggatatctgttctagacttaccatgctttgcttctgatttccctgccattgatccgttgcgcatcacactcagtgcctcagatctgcaattatcgggatacgaagccgatgacattttatatgaaggccatcaaatcgtatctgagcttgttggcacaagggccgtgacatttgcagtcaacttaggaaccagagtgcaggacgctgagaagcttgtgcagtctgcaaagcatctatcagaaaaacatttctttgcaaatagcctgaaacccgtgaaggagaatcgtgtgcatggcccattagagaatatctctgtgcatctgagtccaagagaggccttctttacagagaagaggagagtgaaaatcgaggacagccttggtgaaatctgtggtgagctaatatgcccgtatccacctggtatcccagttctgattccaggcgaggtagtaacccatgattcactgtcctacttgatgagcgttagacaccaaggcatcacgatcagtggagcggctgatgctgagctaaattccattctggtgtgcgacttatgatgattgccctattgtttgtcacaagactgtgttgtcgcagagataccgtgggtgggagagatcaagtatggtttatgccaagtcaagagcacaatgtattgtccgcttgatggatgtaaaccaacggctggcggtttgtagccaccggccacttggccaaataatttagtctgtgttgtgttgtgtctcggtctcgtgagccgaaagagttgccaagctgcgacatatgatgccaaagcatgaataagggtctatagcatgtgatctcctgtgttgttgtttgaagtatgagttgctagggagggagggctacctttctatctgaagtgccgtgcaatgtttcctctttgcttctcttctgaactgggaggtccggtctgaactggcagtaaagctgaagcatcatatgcaggtctgcacacctccacggttgtgctacctccggctgcatgttttgcagggcttctgaaacaagtactatctaccttctcttctaagtttatccatcaactcatgaattcacgaacattccacaactcgtacacacacacacaaaaaaggaaacataggaatggaccgcatcattgtaatcacaattttttttcttcatttcgtagaatggcactcttgctctatagtataagaaatgaagggcgcttatatatatacaaa

SEQ ID NO: 11833 - DNA, 2398 bp, Zea Mays
caacaatagtgggaacgtgcgatgggtgcagaggacatgagcagtggccggccaatctcatcggtcggcggcggcatctcccatggcgggcgatgggatattcctcccgatcctgcagcatcatcctctcttttctttctccgaccacaggaagaaaagctcaaagctactacaggtactgtacgcgtagcctaggcaactgttcgccacgtagcaccacattgaccgtctggcccgcaactccccaccctttcccggccgctcgccttttctcctcttctccgatctctctccccctcttgaccgcccttgggatttggggggccctgggcaaattgcggtggccggggcccgccgccgcgacagctccgtccgtcctcggttccgctcttccgtccgatccatacgtttccgttccctataaattctttaaattcccgcaagtcccgtaccgctcagccaacccaacacgacggcgagtcgacggcgagtgggagggaacaccgcagcagcgatgcgtcggggctcgctttcgctgctgctgcttgcggcggtggcggcggtagcggccaccgcggttcccgccgagccggcgtcgacgctgtccgggccgtcgcggccggtgacggtggcgatcggagacaggggccacgcggtggacctgccggacacggacccgcgggtgcagcgccgcgtcacgggctgggcgcccgagcagatcgccgtcgcgctctccgcctcgcccacctccgcctgggtctcctggatcacaggggactaccagatgggcggcgccgtggagccgctggaccccggcgcggtgggcagcgtcgtgcggtacggcctccagaactacacctccggcatcatccaccacgtccgcctccagggcctggagcctgggaccaggtacttgtaccggtgcggcgacccggccatcccggacgccatgagcgacgtgcacgcgttccgcacgatgccggccgtcgggccggggagctacccggggcggatcgccgtggtcggggacctcgggctcacctacaacaccacctcgacggtggaccacttggtgcgcaaccgccccgacctggtgctcctcctcggcgacgtctgctacgccaacctgtacctgaccaacggcaccggggcggactgctactcctgcgccttcgccaagtccacgcccatccacgagacgtaccagccgcgctgggattactggggaaggtacatggagcccgtgacgtcgagcatcccgatgatggtggtggagggcaaccatgagatcgagcagcagatccacaacaggacgttcgcggcctacagctcgcggttcgcgttcccgtcggaggagagcgggtcctcctcgccgttctactactcgttcgacgccggcggcatccacttcgtcatgcttgcgtcctacgccgactacagcagatcaggtgcgcagtacaagtggctggaggcggacctggagaaggtggacaggtcggtgacgccatggctgatcgcgggctggcacgcgccctggtacaccacctacaaggctcactacagggaagccgagtgcatgagggtggagatggaggagctcctctacgcctacggtgtcgacgtcgtcttcaccggccacgtaagccttcggagtcggctgcttagtgcacgcgtacgagcggtcgaaccgggtgttcaactacacgctggacgcgtgcggccccgtgcacatctcggtgggcgacggcggcaaccgcgagaagatggcgacggcgcacgcggacgaggccggccactgcccggacccggcgtcgacgccggaccccttcatggggggccgcctctgcgccgccaacttcacgtcgggccccgccgcgggccgcttctgctgggaccgccagccggagtacagcgcgtacagggagagcagcttcgggcacggcgtcctggaggtcaggaacgacacgcacgcgctctggcggtggcaccgcaaccaggacctccatgccgccgccgccgccaacgtcgccgccgacgaggtctacatcgtcagggagcccgacaagtgcctcgccaagacggccagattgttggcctattgattgatccatcactcctagctactcctactctggtcgctgcctattgattgatccatcaatcctgttaattttcagaagagtttcagaagagtcttaatactcctagtcttaatagtcctagctatgcaaatatgcagtgttaatttgcggcagtaccagattaagcttccatccagattggcagcggtcaattcttgtccttggcacactactcgagatgaaataagctttaccttaaaaccaactgtttagatcggtgcaattataatttatagagacaaaaatatttaaaaacg

SEQ ID NO: 11834 - DNA, 1205 bp, Zea Mays
agtcccgtaccgctcagccaacccaacacgacggcgagtcgacggcgagtgggagggaacaccgcagcagcgatgcgtcggggctcgctttcgctgctgctgcttgcggcggtggcggcggtagcggccaccgcggttcccgccgagccggcgtcgacgctgtccgggccgtcgcggccggtgacggtggcgatcggagacaggggccacgcggtggacctgccggacacggacccgcgggtgcagcgccgcgtcacgggctgggcgcccgagcagatcgccgtcgcgctctccgcctcgcccacctccgcctgggtctcctggatcacaggggactaccagatgggcggcgccgtggagccgctggaccccggcgcggtgggcagcgtcgtgcggtacggcctccagaactacacctccggcatcatccaccacgtccgcctccagggcctggagcctgggaccaggtacttgtaccggtgcggcgacccggccatcccggacgccatgagcgacgtgcacgcgttccgcacgatgccggccgtcgggccggggagctacccggggcggatcgccgtggtcggggacctcgggctcacctacaacaccacctcgacggtggaccacttggtgcgcaaccgccccgacctggtgctcctcctcggcgacgtctgctacgccaacctgtacctgaccaacggcaccggggcggactgctactcctgcgccttcgccaagtccacgcccatccacgagacgtaccagccgcgctgggattactggggaaggtacatggagcccgtgacgtcgagcatcccgatgatggtggtggagggcaaccatgagatcgagcagcagatccacaacaggacgttcgcggcctacagctcgcggttcgcgttcccgtcggaggagagcgggtcctcctcgccgttctactactcgttcgacgccggcggcatccacttcgtcatgcttgcgtcctacgccgactacagcagatcaggtgcgcagtacaagtggctggaggcggacctggagaaggtggacaggtcggtgacgccatggctgatcgcgggctggcacgcgccctggtacaccacctacaaggctcactacagggaagccgagtgcatgagggtggagatggaggagctcctctacgcctacgactgacggatgatggtctgagactctaagctgag

SEQ ID NO: 11835 - DNA, 822 bp, Zea Mays
ctaaaaatgatacaaaggagaatttccgtttatcagagagattcctatcaaaaaaatggtaaaggatacacgctattccttgcatttgtaatcgaccggctgcaccactacctgcgaaagctgatgacactgaggaaaacatccagcacatccagagaggaggtggagaaacttcagatggagaaccggtcgctccgcgaaaaggaggagaagtcctccagtgagacgaagaggcttcagcgagagattgcgaggctgaatgagggcatgaagaagctgaaatctgagaccgaagagcacgagaggaaggcgtcggtggcagaggcccatgtcgacgcgctgcagaagcagtcggaggagctgctcctggagtacgaccggttgctggaagacaaccagattctgcagactcagctacttagcagaggctaagctaaggagcttggtttgttagcaagactcctttaccaggtagtgtcgtagagccaaggacttgcccgattctgaatgcttacatgccgcggttctaaatttcggcatgtccattgtggttcttggcgtccatgctgttcctaacttgtgatcttgttgatgtatggatgcagcgtgtatttttagagttcatgtttcttccatttccgatagatggaggtacatgatgtaaggtccaggaacgacgggacgtccttgaggaattcggtagtcaaggctctcagaatgtgcttgaaaaaaatcggagtggcatgttacgcagattctgattcgtcctgaacttgaagcctgcatgaatgaaccaaagttgcctgaaaaaaaaggctgaac

SEQ ID NO: 11836 - DNA, 883 bp, Zea Mays
ttggtctaacgcttcgcctttcgacccccctttcctccgacttctttcagcagcatcccctagtcctcgcctggactccgcggagtctttggttgctccgagttcctcgcctggttttcggcaaggatacacgctattccttgcatttgtaatcgaccggctgcaccactacctgcgaaagctgatgacactgaggaaaacatccagcacatccagagaggaggtggagaaacttcagatggagaaccggtcgctccgcgaaaaggaggagaagtcctccagtgagacgaagaggcttcagcgagagattgcgaggctgaatgagggcatgaagaagctgaaatctgagaccgaagagcacgagaggaaggcgtcggtggcagaggcccatgtcgacgcgctgcagaagcagtcggaggagctgctcctggagtacgaccggttgctggaagacaaccagattctgcagactcagctacttagcagaggctaagctaaggagcttggtttgttagcaagactcctttaccaggtagtgtcgtagagccaaggacttgcccgattctgaatgcttacatgccgcggttctaaatttcggcatgtccattgtggttcttggcgtccatgctgttcctaacttgtgatcttgttgatgtatggatgcagcgtgtatttttagagttcatgtttcttccatttccgatagatggaggtacatgatgtaaggtccaggaacgacgggacgtccttgaggaattcggtagtcaaggctctcagaatgtgcttgaaaaaaatcggagtggcatgttacgcagattctgattcgtcctgaacttgaagcctgcatgaatgaaccaaagttgcctgaaaaaaaaggctgaac

SEQ ID NO: 11837 - DNA, 2051 bp, Zea Mays
gaacatcgctgtttcacaccaacctcccttttattgagaacatggagaagaggatccaaggtgctacaaaactgctggatggtagtttggagcgctgctttgtggatggtctggaacaccgtgatgctaaagttatatacaactgtttgcgtgcttatgctgcaattgacaatacatcatcagccgaagagctttttcgtacaacagtggtgtctccattgatccagaaaatagttcctcaaaactatgcaagagctgttgctggggcatcatctgatgagctagaagaggattatcaacagataaaggcatgcgtagaaaaagattgcaaatttatattggaaatatcttcgtcagaaaactctggattgcatgtttttgattttctgggtaattcaatactcaaagaagtcctttctgcaatccagaaaggcaagcctggggccttttctcctggaaagcctaaagaattcttgaggaactacaaagtgagcttaggatttcttgattttcttgaaggctactgcttctccaagtctgctgtaacgaagttacgctatgagcctgcttacacagatttcatgcgacagtggaatgttggtgtctacttttcgttgcgatttcaggaaattgcgggtggccttgattctactcttacaaatacctttagtcctactggattgaatgaggctcaacagaaaccgttgctcttgaaacaaagtattaagctcttagaaagtttggattcatgttggagtgatgaggttcttgtattctctcactgcgataaattcctccgtctgtccttgcagcttatttcaaggtatacaacatggctttcatgtggtttatcagcacgtaaagcttctgacaggagcccaaattcacctgcagatgctgaatgggcactgtctattcctatagaagatttcatatatataatgcatgatgtgcatgctgtaattggtgagctttcagaatcaggcagctttattggacatgtgaatcagtcactagggtcatgccccattgaagtatttaatcttgtgaaaggaagtatattgcaagctgctgaacctttaaaggagctgttgcctgcaataatggatgtcatgattggaatcatagttaagaagtctaatgaggacctgaagcacctgaaaggaataacagcgacatataggatgacgagtaaacttccagtcaggcattctccatatgtatcagggattttacatccactgaaggtgtttcttgaaggggaccgtatgcactatctatcagaagatgataaaactaagttgtgtcgtgggtctgcaaataagattactgcaacctactatgacttggtctctgaagttgtcactgtggcaaggaaaaccgagtcttcattgcagagactgcgccaaggtgcacaaaggcgagtaggagctagtacagatgcctcagatagcatcatatctgatacagacaagatctgtatgcagctatttcttgatattcaggagtacgcacggaaccttcgtgcgataggaatagacgcgagagagattgattcctacagagctctatggcagtgtgttgccccaaaggacaggcacgagaacatccagttttgatgtaaagaacgctgtcagtatatataaaataaaattgtcaacccgtagatatctcagtatgtgaaaatgatacggttggcactggttcatccagtcttcaacgacatgacaccctgtcagtttgtgaaacaaggacgtgtttggtttgatgaatgaggtggtacatttctctcttacttcttatttttatatttggtttttagaatagtacgagttgattcatcaccatttcattcctcgtaagctaataattagtatataagtaatgaatgagttgatcctatggaaatttatagatgaaattatgatgcatcatattataaagcatgagtgactctacgaaccaaataagtgttgtttttgcaattgcggccatgattggagttggagctggagcggctatagcctgtgtgtcactggtgatgacaggac

SEQ ID NO: 11838 - DNA, 1907 bp, Zea Mays
ctcagtgcatgatgaacatcgctgtttcacacctgcagaacctcccttttattgagaacatggagaagaggatccaaggtgctacaaaactgctggatggtagtttggagcgctgctttgtggatggtctggaacaccgtgatgctaaagttatatacaactgtttgcgtgcttatgctgcaattgacaatacatcatcagccgaagagctttttcgtacaacagtggtgtctccattgatccagaaaatagttcctcaaaactatgcaagagctgttgctggggcatcatctgatgagctagaagaggattatcaacagataaaggcatgcgtagaaaaagattgcaaatttatattggaaatatcttcgtcaggctactgcttctccaagtctgctgtaacgaagttacgctatgagcctgcttacacagatttcatgcgacagtggaatgttggtgtctacttttcgttgcgatttcaggaaattgcgggtggccttgattctactcttacaaatacctttagtcctactggattgaatgaggctcaacagaaaccgttgctcttgaaacaaagtattaagctcttagaaagtttggattcatgttggagtgatgaggttcttgtattctctcactgcgataaattcctccgtctgtccttgcagcttatttcaaggtatacaacatggctttcatgtggtttatcagcacgtaaagcttctgacaggagcccaaattcacctgcagatgctgaatgggcactgtctattcctatagaagatttcatatatataatgcatgatgtgcatgctgtaattggtgagctttcagaatcaggcagctttattggacatgtgaatcagtcactagggtcatgccccattgaagtatttaatcttgtgaaaggaagtatattgcaagctgctgaacctttaaaggagctgttgcctgcaataatggatgtcatgattggaatcatagttaagaagtctaatgaggacctgaagcacctgaaaggaataacagcgacatataggatgacgagtaaacttccagtcaggcattctccatatgtatcagggattttacatccactgaaggtgtttcttgaaggggaccgtatgcactatctatcagaagatgataaaactaagttgtgtcgtgggtctgcaaataagattactgcaacctactatgacttggtctctgaagttgtcactgtggcaaggaaaaccgagtcttcattgcagagactgcgccaaggtgcacaaaggcgagtaggagctagtacagatgcctcagatagcatcatatctgatacagacaagatctgtatgcagctatttcttgatattcaggagtacgcacggaaccttcgtgcgataggaatagacgcgagagagattgattcctacagagctctatggcagtgtgttgccccaaaggacaggcacgagaacatccagttttgatgtaaagaacgctgtcagtatatataaaataaaattgtcaacccgtagatatctcagtatgtgaaaatgatacggttggcactggttcatccagtcttcaacgacatgacaccctgtcagtttgtgaaacaaggacgtgtttggtttgatgaatgaggtggtacatttctctcttacttcttatttttatatttggtttttagaatagtacgagttgattcatcaccatttcattcctcgtaagctaataattagtatataagtaatgaatgagttgatcctatggaaatttatagatgaaattatgatgcatcatattataaagcatgagtgactctacgaaccaaataagtgttgtttttgcaattgcggccatgattggagttggagctggagcggctatagcctgtgtgtcactggtgatgacaggac

SEQ ID NO: 11839 - DNA, 2057 bp, Zea Mays
ctcagtgcatgatgaacatcgctgtttcacaccaacctcccttttattgagaacatggagaagaggatccaaggtgctacaaaactgctggatggtagtttggagcgctgctttgtggatggtctggaacaccgtgatgctaaagttatatacaactgtttgcgtgcttatgctgcaattgacaatacatcatcagccgaagagctttttcgtacaacagtggtgtctccattgatccagaaaatagttcctcaaaactatgcaagagctgttgctggggcatcatctgatgagctagaagaggattatcaacagataaaggcatgcgtagaaaaagattgcaaatttatattggaaatatcttcgtcagaaaactctggattgcatgtttttgattttctgggtaattcaatactcaaagaagtcctttctgcaatccagaaaggcaagcctggggccttttctcctggaaagcctaaagaattcttgaggaactacaaagtgagcttaggatttcttgattttcttgaaggctactgcttctccaagtctgctgtaacgaagttacgctatgagcctgcttacacagatttcatgcgacagtggaatgttggtgtctacttttcgttgcggaaattgcgggtggccttgattctactcttacaaatacctttagtcctactggattgaatgaggctcaacagaaaccgttgctcttgaaacaaagtattaagctcttagaaagtttggattcatgttggagtgatgaggttcttgtattctctcactgcgataaattcctccgtctgtccttgcagcttatttcaaggtatacaacatggctttcatgtggtttatcagcacgtaaagcttctgacaggagcccaaattcacctgcagatgctgaatgggcactgtctattcctatagaagatttcatatatataatgcatgatgtgcatgctgtaattggtgagctttcagaatcaggcagctttattggacatgtgaatcagtcactagggtcatgccccattgaagtatttaatcttgtgaaaggaagtatattgcaagctgctgaacctttaaaggagctgttgcctgcaataatggatgtcatgattggaatcatagttaagaagtctaatgaggacctgaagcacctgaaaggaataacagcgacatataggatgacgagtaaacttccagtcaggcattctccatatgtatcagggattttacatccactgaaggtgtttcttgaaggggaccgtatgcactatctatcagaagatgataaaactaagttgtgtcgtgggtctgcaaataagattactgcaacctactatgacttggtctctgaagttgtcactgtggcaaggaaaaccgagtcttcattgcagagactgcgccaaggtgcacaaaggcgagtaggagctagtacagatgcctcagatagcatcatatctgatacagacaagatctgtatgcagctatttcttgatattcaggagtacgcacggaaccttcgtgcgataggaatagacgcgagagagattgattcctacagagctctatggcagtgtgttgccccaaaggacaggcacgagaacatccagttttgatgtaaagaacgctgtcagtatatataaaataaaattgtcaacccgtagatatctcagtatgtgaaaatgatacggttggcactggttcatccagtcttcaacgacatgacaccctgtcagtttgtgaaacaaggacgtgtttggtttgatgaatgaggtggtacatttctctcttacttcttatttttatatttggtttttagaatagtacgagttgattcatcaccatttcattcctcgtaagctaataattagtatataagtaatgaatgagttgatcctatggaaatttatagatgaaattatgatgcatcatattataaagcatgagtgactctacgaaccaaataagtgttgtttttgcaattgcggccatgattggagttggagctggagcggctatagcctgtgtgtcactggtgatgacaggac

SEQ ID NO: 11840 - DNA, 2493 bp, Zea Mays
cccagaaggaaaatgtgctcagtgcatgatgaacatcgctgtttcacaccaacctcccttttattgagaacatggagaagaggatccaaggtgctacaaaactgctggatggtagtttggagcgctgctttgtggatggtctggaacaccgtgatgctaaagttatatacaactgtttgcgtgcttatgctgcaattgacaatacatcatcagccgaagagctttttcgtacaacagtggtgtctccattgatccagaaaatagttcctcaaaactatgcaagagctgttgctggggcatcatctgatgagctagaagaggattatcaacagataaaggcatgcgtagaaaaagattgcaaatttatattggaaatatcttcgtcaggctactgcttctccaagtctgctgtaacgaagttacgctatgagcctgcttacacagatttcatgcgacagtggaatgttggtgtctacttttcgttgcggaaattgcgggtggccttgattctactcttacaaatacctttagtcctactggattgaatgaggctcaacagaaaccgttgctcttgaaacaaagtattaagctcttagaaagtttggattcatgttggagtgatgaggttcttgtattctctcactgcgataaattcctccgtctgtccttgcagcttatttcaaggtatacaacatggctttcatgtggtttatcagcacgtaaagcttctgacaggagcccaaattcacctgcagatgctgaatgggcactgtctattcctatagaagatttcatatatgtaagttacatctgcaataatgtctgaactcgtcatgtcccaataggatctagcgtttttcattctgtactatggacctagctgcttaggactgaaattttgggtgctattgtcctatttattaacattattctatgtttctgtattaagtttatgcttagcttgaaatttctggagtttcgaagtagttataagatgactagttgcttcagaagtgctcagtaagtctgcaggaagtcactgtttccaccttttgactagagagacatgtactggtgttggttcagtggaaaaagaactgcagtttgtactttgtagtccaatttgtggcaactctgaggtaatacaagctcttagtaagtgccttctgtttttcatatacatatgaactgaaaagcctgtttgtcccttattgttgtacgttcagttgtatgaatggaggtaagttcgtgttacttagtcttggtgcgcctttcctgtttctgactcctaaggcatgagtcttgttacgctaaaaaggttatgcaatgttgagcaatggggctgtgtgaattctaatgtctttgttcattgatttacagataatgcatgatgtgcatgctgtaattggtgagctttcagaatcaggcagctttattggacatgtgaatcagtcactagggtcatgccccattgaagtatttaatcttgtgaaaggaagtatattgcaagctgctgaacctttaaaggagctgttgcctgcaataatggatgtcatgattggaatcatagttaagaagtctaatgaggacctgaagcacctgaaaggaataacagcgacatataggatgacgagtaaacttccagtcaggcattctccatatgtatcagggattttacatccactgaaggtgtttcttgaaggggaccgtatgcactatctatcagaagatgataaaactaagttgtgtcgtgggtctgcaaataagattactgcaacctactatgacttggtctctgaagttgtcactgtggcaaggaaaaccgagtcttcattgcagagactgcgccaaggtgcacaaaggcgagtaggagctagtacagatgcctcagatagcatcatatctgatacagacaagatctgtatgcagctatttcttgatattcaggagtacgcacggaaccttcgtgcgataggaatagacgcgagagagattgattcctacagagctctatggcagtgtgttgccccaaaggacaggcacgagaacatccagttttgatgtaaagaacgctgtcagtatatataaaataaaattgtcaacccgtagatatctcagtatgtgaaaatgatacggttggcactggttcatccagtcttcaacgacatgacaccctgtcagtttgtgaaacaaggacgtgtttggtttgatgaatgaggtggtacatttctctcttacttcttatttttatatttggtttttagaatagtacgagttgattcatcaccatttcattcctcgtaagctaataattagtatataagtaatgaatgagttgatcctatggaaatttatagatgaaattatgatgcatcatattataaagcatgagtgactctacgaaccaaataagtgttgtttttgcaattgcggccatgattggagttggagctggagcggctatagcctgtgtgtcactggtgatgacaggac

SEQ ID NO: 11841 - DNA, 3325 bp, Zea Mays
cccctgcggccctgcctgaccctgctctagatctccatcgcgcgcgcgcagatctcagtcctaagtctagacctctatggcggacctcgtcatggcccctccgccggccatggacctcttcggggagccgatcgaggcgcaccctccctggttcaagcccgacgccttcctccgcgcgggcttcgacgcggacgcctacgtcgccgagctccgctcctacgtcccgctcgacagcctcgccgccgagctccgcgcccacctcgccgcgctccgcgccgagctcgtcggcctcatcaaccgcgactacgccgacttcgtcggcctcagcgcgcacctcaagggcgtcgacgccgccgcggcccggatgcgcgccccgctcgccgacctcagggacaaggtcgccgccttccgcgccggggcatccgccgcgctcgccgcgctcagggaggggctccagcagcgggccgccgccaccgccgcgcgcgagctgctcgagctcctgctcgacacctcccacgtcgtctccaaggttgagaaattgatcaaggaactaccaactgcaccgtcagattcatctaatgctgaaattcctatcaatgacactggaacaccaaatgggaaggctgggacaggtgtcagagaaacacagagcattctcctagaaagaattgccagcgagatgaaccgtcttaaattctacattagtcatgcagagtgcagaacctcccttttattgagaacatggagaagaggatccaaggtgctacaaaactgctggatggtagtttggagcgctgctttgtggatggtctggaacaccgtgatgctaaagttatatacaactgtttgcgtgcttatgctgcaattgacaatacatcatcagccgaagagctttttcgtacaacagtggtgtctccattgatccagaaaatagttcctcaaaactatgcaagagctgttgctggggcatcatctgatgagctagaagaggattatcaacagataaaggcatgcgtagaaaaagattgcaaatttatattggaaatatcttcgtcagaaaactctggattgcatgtttttgattttctgggtaattcaatactcaaagaagtcctttctgcaatccagaaaggcaagcctggggccttttctcctggaaagcctaaagaattcttgaggaactacaaagtgagcttaggatttcttgattttcttgaaggctactgcttctccaagtctgctgtaacgaagttacgctatgagcctgcttacacagatttcatgcgacagtggaatgttggtgtctacttttcgttgcggaaattgcgggtggccttgattctactcttacaaatacctttagtcctactggattgaatgaggctcaacagaaaccgttgctcttgaaacaaagtattaagctcttagaaagtttggattcatgttggagtgatgaggttcttgtattctctcactgcgataaattcctccgtctgtccttgcagcttatttcaaggtatacaacatggctttcatgtggtttatcagcacgtaaagcttctgacaggagcccaaattcacctgcagatgctgaatgggcactgtctattcctatagaagatttcatatatgtaagttacatctgcaataatgtctgaactcgtcatgtcccaataggatctagcgtttttcattctgtactatggacctagctgcttaggactgaaattttgggtgctattgtcctatttattaacattattctatgtttctgtattaagtttatgcttagcttgaaatttctggagtttcgaagtagttataagatgactagttgcttcagaagtgctcagtaagtctgcaggaagtcactgtttccaccttttgactagagagacatgtactggtgttggttcagtggaaaaagaactgcagtttgtactttgtagtccaatttgtggcaactctgaggtaatacaagctcttagtaagtgccttctgtttttcatatacatatgaactgaaaagcctgtttgtcccttattgttgtacgttcagttgtatgaatggaggtaagttcgtgttacttagtcttggtgcgcctttcctgtttctgactcctaaggcatgagtcttgttacgctaaaaaggttatgcaatgttgagcaatggggctgtgtgaattctaatgtctttgttcattgatttacagataatgcatgatgtgcatgctgtaattggtgagctttcagaatcaggcagctttattggacatgtgaatcagtcactagggtcatgccccattgaagtatttaatcttgtgaaaggaagtatattgcaagctgctgaacctttaaaggagctgttgcctgcaataatggatgtcatgattggaatcatagttaagaagtctaatgaggacctgaagcacctgaaaggaataacagcgacatataggatgacgagtaaacttccagtcaggcattctccatatgtatcagggattttacatccactgaaggtgtttcttgaaggggaccgtatgcactatctatcagaagatgataaaactaagttgtgtcgtgggtctgcaaataagattactgcaacctactatgacttggtctctgaagttgtcactgtggcaaggaaaaccgagtcttcattgcagagactgcgccaaggtgcacaaaggcgagtaggagctagtacagatgcctcagatagcatcatatctgatacagacaagatctgtatgcagctatttcttgatattcaggagtacgcacggaaccttcgtgcgataggaatagacgcgagagagattgattcctacagagctctatggcagtgtgttgccccaaaggacaggcacgagaacatccagttttgatgtaaagaacgctgtcagtatatataaaataaaattgtcaacccgtagatatctcagtatgtgaaaatgatacggttggcactggttcatccagtcttcaacgacatgacaccctgtcagtttgtgaaacaaggacgtgtttggtttgatgaatgaggtggtacatttctctcttacttcttatttttatatttggtttttagaatagtacgagttgattcatcaccatttcattcctcgtaagctaataattagtatataagtaatgaatgagttgatcctatggaaatttatagatgaaattatgatgcatcatattataaagcatgagtgactctacgaaccaaataagtgttgtttttgcaattgcggccatgattggagttggagctggagcggctatagcctgtgtgtcactggtgatgacaggac

SEQ ID NO: 11842 - DNA, 3325 bp, Zea Mays
cccctgcggccctgcctgaccctgctctagatctccatcgcgcgcgcgcagatctcagtcctaagtctagacctctatggcggacctcgtcatggcccctccgccggccatggacctcttcggggagccgatcgaggcgcaccctccctggttcaagcccgacgccttcctccgcgcgggcttcgacgcggacgcctacgtcgccgagctccgctcctacgtcccgctcgacagcctcgccgccgagctccgcgcccacctcgccgcgctccgcgccgagctcgtcggcctcatcaaccgcgactacgccgacttcgtcggcctcagcgcgcacctcaagggcgtcgacgccgccgcggcccggatgcgcgccccgctcgccgacctcagggacaaggtcgccgccttccgcgccggggcatccgccgcgctcgccgcgctcagggaggggctccagcagcgggccgccgccaccgccgcgcgcgagctgctcgagctcctgctcgacacctcccacgtcgtctccaaggttgagaaattgatcaaggaactaccaactgcaccgtcagattcatctaatgctgaaattcctatcaatgacactggaacaccaaatgggaaggctgggacaggtgtcagagaaacacagagcattctcctagaaagaattgccagcgagatgaaccgtcttaaattctacattagtcatgcagagaacctcccttttattgagaacatggagaagaggatccaaggtgctacaaaactgctggatggtagtttggagcgctgctttgtggatggtctggaacaccgtgatgctaaagttatatacaactgtttgcgtgcttatgctgcaattgacaatacatcatcagccgaagagctttttcgtacaacagtggtgtctccattgatccagaaaatagttcctcaaaactatgcaagagctgttgctggggcatcatctgatgagctagaagaggattatcaacagataaaggcatgcgtagaaaaagattgcaaatttatattggaaatatcttcgtcagtgcagaaaactctggattgcatgtttttgattttctgggtaattcaatactcaaagaagtcctttctgcaatccagaaaggcaagcctggggccttttctcctggaaagcctaaagaattcttgaggaactacaaagtgagcttaggatttcttgattttcttgaaggctactgcttctccaagtctgctgtaacgaagttacgctatgagcctgcttacacagatttcatgcgacagtggaatgttggtgtctacttttcgttgcggaaattgcgggtggccttgattctactcttacaaatacctttagtcctactggattgaatgaggctcaacagaaaccgttgctcttgaaacaaagtattaagctcttagaaagtttggattcatgttggagtgatgaggttcttgtattctctcactgcgataaattcctccgtctgtccttgcagcttatttcaaggtatacaacatggctttcatgtggtttatcagcacgtaaagcttctgacaggagcccaaattcacctgcagatgctgaatgggcactgtctattcctatagaagatttcatatatgtaagttacatctgcaataatgtctgaactcgtcatgtcccaataggatctagcgtttttcattctgtactatggacctagctgcttaggactgaaattttgggtgctattgtcctatttattaacattattctatgtttctgtattaagtttatgcttagcttgaaatttctggagtttcgaagtagttataagatgactagttgcttcagaagtgctcagtaagtctgcaggaagtcactgtttccaccttttgactagagagacatgtactggtgttggttcagtggaaaaagaactgcagtttgtactttgtagtccaatttgtggcaactctgaggtaatacaagctcttagtaagtgccttctgtttttcatatacatatgaactgaaaagcctgtttgtcccttattgttgtacgttcagttgtatgaatggaggtaagttcgtgttacttagtcttggtgcgcctttcctgtttctgactcctaaggcatgagtcttgttacgctaaaaaggttatgcaatgttgagcaatggggctgtgtgaattctaatgtctttgttcattgatttacagataatgcatgatgtgcatgctgtaattggtgagctttcagaatcaggcagctttattggacatgtgaatcagtcactagggtcatgccccattgaagtatttaatcttgtgaaaggaagtatattgcaagctgctgaacctttaaaggagctgttgcctgcaataatggatgtcatgattggaatcatagttaagaagtctaatgaggacctgaagcacctgaaaggaataacagcgacatataggatgacgagtaaacttccagtcaggcattctccatatgtatcagggattttacatccactgaaggtgtttcttgaaggggaccgtatgcactatctatcagaagatgataaaactaagttgtgtcgtgggtctgcaaataagattactgcaacctactatgacttggtctctgaagttgtcactgtggcaaggaaaaccgagtcttcattgcagagactgcgccaaggtgcacaaaggcgagtaggagctagtacagatgcctcagatagcatcatatctgatacagacaagatctgtatgcagctatttcttgatattcaggagtacgcacggaaccttcgtgcgataggaatagacgcgagagagattgattcctacagagctctatggcagtgtgttgccccaaaggacaggcacgagaacatccagttttgatgtaaagaacgctgtcagtatatataaaataaaattgtcaacccgtagatatctcagtatgtgaaaatgatacggttggcactggttcatccagtcttcaacgacatgacaccctgtcagtttgtgaaacaaggacgtgtttggtttgatgaatgaggtggtacatttctctcttacttcttatttttatatttggtttttagaatagtacgagttgattcatcaccatttcattcctcgtaagctaataattagtatataagtaatgaatgagttgatcctatggaaatttatagatgaaattatgatgcatcatattataaagcatgagtgactctacgaaccaaataagtgttgtttttgcaattgcggccatgattggagttggagctggagcggctatagcctgtgtgtcactggtgatgacaggac

SEQ ID NO: 11843 - DNA, 3261 bp, Zea Mays
cccctgcggccctgcctgaccctgctctagatctccatcgcgcgcgcgcagatctcagtcctaagtctagacctctatggcggacctcgtcatggcccctccgccggccatggacctcttcggggagccgatcgaggcgcaccctccctggttcaagcccgacgccttcctccgcgcgggcttcgacgcggacgcctacgtcgccgagctccgctcctacgtcccgctcgacagcctcgccgccgagctccgcgcccacctcgccgcgctccgcgccgagctcgtcggcctcatcaaccgcgactacgccgacttcgtcggcctcagcgcgcacctcaagggcgtcgacgccgccgcggcccggatgcgcgccccgctcgccgacctcagggacaaggtcgccgccttccgcgccggggcatccgccgcgctcgccgcgctcagggaggggctccagcagcgggccgccgccaccgccgcgcgcgagctgctcgagctcctgctcgacacctcccacgtcgtctccaaggttgagaaattgatcaaggaactaccaactgcaccgtcagattcatctaatgctgaaattcctatcaatgacactggaacaccaaatgggaaggctgggacaggtgtcagagaaacacagagcattctcctagaaagaattgccagcgagatgaaccgtcttaaattctacattagtcatgcagagtgcagaacctcccttttattgagaacatggagaagaggatccaaggtgctacaaaactgctggatggtagtttggagcgctgctttgtggatggtctggaacaccgtgatgctaaagttatatacaactgtttgcgtgcttatgctgcaattgacaatacatcatcagccgaagagctttttcgtacaacagtggtgtctccattgatccagaaaatagttcctcaaaactatgcaagagctgttgctggggcatcatctgatgagctagaagaggattatcaacagataaaggcatgcgtagaaaaagattgcaaatttatattggaaatatcttcgtcagaaaactctggattgcatgtttttgattttctgggtaattcaatactcaaagaagtcctttctgcaatccagaaaggcaagcctggggccttttctcctggaaagcctaaagaattcttgaggaactacaaagtgagcttaggatttcttgattttcttgaaggctactgcttctccaagtctgctgtaacgaagttacgctatgagcctgcttacacagatttcatgcgacagtggaatgttggtgtctacttttcgttgcgatttcaggaaattgcgggtggccttgattctactcttacaaatacctttagtcctactggattgaatgaggctcaacagaaaccgttgctcttgaaacaaagtattaagctcttagaaagtttggattcatgttggagtgatgaggttcttgtattctctcactgcgataaattcctccgtctgtccttgcagcttatttcaagatgctgaatgggcactgtctattcctatagaagatttcatatatgtaagttacatctgcaataatgtctgaactcgtcatgtcccaataggatctagcgtttttcattctgtactatggacctagctgcttaggactgaaattttgggtgctattgtcctatttattaacattattctatgtttctgtattaagtttatgcttagcttgaaatttctggagtttcgaagtagttataagatgactagttgcttcagaagtgctcagtaagtctgcaggaagtcactgtttccaccttttgactagagagacatgtactggtgttggttcagtggaaaaagaactgcagtttgtactttgtagtccaatttgtggcaactctgaggtaatacaagctcttagtaagtgccttctgtttttcatatacatatgaactgaaaagcctgtttgtcccttattgttgtacgttcagttgtatgaatggaggtaagttcgtgttacttagtcttggtgcgcctttcctgtttctgactcctaaggcatgagtcttgttacgctaaaaaggttatgcaatgttgagcaatggggctgtgtgaattctaatgtctttgttcattgatttacagataatgcatgatgtgcatgctgtaattggtgagctttcagaatcaggcagctttattggacatgtgaatcagtcactagggtcatgccccattgaagtatttaatcttgtgaaaggaagtatattgcaagctgctgaacctttaaaggagctgttgcctgcaataatggatgtcatgattggaatcatagttaagaagtctaatgaggacctgaagcacctgaaaggaataacagcgacatataggatgacgagtaaacttccagtcaggcattctccatatgtatcagggattttacatccactgaaggtgtttcttgaaggggaccgtatgcactatctatcagaagatgataaaactaagttgtgtcgtgggtctgcaaataagattactgcaacctactatgacttggtctctgaagttgtcactgtggcaaggaaaaccgagtcttcattgcagagactgcgccaaggtgcacaaaggcgagtaggagctagtacagatgcctcagatagcatcatatctgatacagacaagatctgtatgcagctatttcttgatattcaggagtacgcacggaaccttcgtgcgataggaatagacgcgagagagattgattcctacagagctctatggcagtgtgttgccccaaaggacaggcacgagaacatccagttttgatgtaaagaacgctgtcagtatatataaaataaaattgtcaacccgtagatatctcagtatgtgaaaatgatacggttggcactggttcatccagtcttcaacgacatgacaccctgtcagtttgtgaaacaaggacgtgtttggtttgatgaatgaggtggtacatttctctcttacttcttatttttatatttggtttttagaatagtacgagttgattcatcaccatttcattcctcgtaagctaataattagtatataagtaatgaatgagttgatcctatggaaatttatagatgaaattatgatgcatcatattataaagcatgagtgactctacgaaccaaataagtgttgtttttgcaattgcggccatgattggagttggagctggagcggctatagcctgtgtgtcactggtgatgacaggac

SEQ ID NO: 11844 - DNA, 2833 bp, Zea Mays
cccctgcggccctgcctgaccctgctctagatctccatcgcgcgcgcgcagatctcagtcctaagtctagacctctatggcggacctcgtcatggcccctccgccggccatggacctcttcggggagccgatcgaggcgcaccctccctggttcaagcccgacgccttcctccgcgcgggcttcgacgcggacgcctacgtcgccgagctccgctcctacgtcccgctcgacagcctcgccgccgagctccgcgcccacctcgccgcgctccgcgccgagctcgtcggcctcatcaaccgcgactacgccgacttcgtcggcctcagcgcgcacctcaagggcgtcgacgccgccgcggcccggatgcgcgccccgctcgccgacctcagggacaaggtcgccgccttccgcgccggggcatccgccgcgctcgccgcgctcagggaggggctccagcagcgggccgccgccaccgccgcgcgcgagctgctcgagctcctgctcgacacctcccacgtcgtctccaaggttgagaaattgatcaaggaactaccaactgcaccgtcagattcatctaatgctgaaattcctatcaatgacactggaacaccaaatgggaaggctgggacaggtgtcagagaaacacagagcattctcctagaaagaattgccagcgagatgaaccgtcttaaattctacattagtcatgcagagaacctcccttttattgagaacatggagaagaggatccaaggtgctacaaaactgctggatggtagtttggagcgctgctttgtggatggtctggaacaccgtgatgctaaagttatatacaactgtttgcgtgcttatgctgcaattgacaatacatcatcagccgaagagctttttcgtacaacagtggtgtctccattgatccagaaaatagttcctcaaaactatgcaagagctgttgctggggcatcatctgatgagctagaagaggattatcaacagataaaggcatgcgtagaaaaagattgcaaatttatattggaaatatcttcgtcagaaaactctggattgcatgtttttgattttctgggtaattcaatactcaaagaagtcctttctgcaatccagaaaggcaagcctggggccttttctcctggaaagcctaaagaattcttgaggaactacaaagtgagcttaggatttcttgattttcttgaaggctactgcttctccaagtctgctgtaacgaagttacgctatgagcctgcttacacagatttcatgcgacagtggaatgttggtgtctacttttcgttgcgatttcaggaaattgcgggtggccttgattctactcttacaaatacctttagtcctactggattgaatgaggctcaacagaaaccgttgctcttgaaacaaagtattaagctcttagaaagtttggattcatgttggagtgatgaggttcttgtattctctcactgcgataaattcctccgtctgtccttgcagcttatttcaaggtatacaacatggctttcatgtggtttatcagcacgtaaagcttctgacaggagcccaaattcacctgcagatgctgaatgggcactgtctattcctatagaagatttcatatatataatgcatgatgtgcatgctgtaattggtgagctttcagaatcaggcagctttattggacatgtgaatcagtcactagggtcatgccccattgaagtatttaatcttgtgaaaggaagtatattgcaagctgctgaacctttaaaggagctgttgcctgcaataatggatgtcatgattggaatcatagttaagaagtctaatgagtgaagagctaattttacattctatgcaaaagagagaacataatggaaaagctgcacagtgtacacttaggaatcaaatattgcctaggacctgaagcacctgaaaggaataacagcgacatataggatgacgagtaaacttccagtcaggcattctccatatgtatcagggattttacatccactgaaggtgtttcttgaaggggaccgtatgcactatctatcagaagatgataaaactaagttgtgtcgtgggtctgcaaataagattactgcaacctactatgacttggtctctgaagttgtcactgtggcaaggaaaaccgagtcttcattgcagagactgcgccaaggtgcacaaaggcgagtaggagctagtacagatgcctcagatagcatcatatctgatacagacaagatctgtatgcagctatttcttgatattcaggagtacgcacggaaccttcgtgcgataggaatagacgcgagagagattgattcctacagagctctatggcagtgtgttgccccaaaggacaggcacgagaacatccagttttgatgtaaagaacgctgtcagtatatataaaataaaattgtcaacccgtagatatctcagtatgtgaaaatgatacggttggcactggttcatccagtcttcaacgacatgacaccctgtcagtttgtgaaacaaggacgtgtttggtttgatgaatgaggtggtacatttctctcttacttcttatttttatatttggtttttagaatagtacgagttgattcatcaccatttcattcctcgtaagctaataattagtatataagtaatgaatgagttgatcctatggaaatttatagatgaaattatgatgcatcatattataaagcatgagtgactctacgaaccaaataagtgttgtttttgcaattgcggccatgattggagttggagctggagcggctatagcctgtgtgtcactggtgatgacaggac

SEQ ID NO: 11845 - DNA, 3256 bp, Zea Mays
cccctgcggccctgcctgaccctgctctagatctccatcgcgcgcgcgcagatctcagtcctaagtctagacctctatggcggacctcgtcatggcccctccgccggccatggacctcttcggggagccgatcgaggcgcaccctccctggttcaagcccgacgccttcctccgcgcgggcttcgacgcggacgcctacgtcgccgagctccgctcctacgtcccgctcgacagcctcgccgccgagctccgcgcccacctcgccgcgctccgcgccgagctcgtcggcctcatcaaccgcgactacgccgacttcgtcggcctcagcgcgcacctcaagggcgtcgacgccgccgcggcccggatgcgcgccccgctcgccgacctcagggacaaggtcgccgccttccgcgccggggcatccgccgcgctcgccgcgctcagggaggggctccagcagcgggccgccgccaccgccgcgcgcgagctgctcgagctcctgctcgacacctcccacgtcgtctccaaggttgagaaattgatcaaggaactaccaactgcaccgtcagattcatctaatgctgaaattcctatcaatgacactggaacaccaaatgggaaggctgggacaggtgtcagagaaacacagagcattctcctagaaagaattgccagcgagatgaaccgtcttaaattctacattagtcatgcagagaacctcccttttattgagaacatggagaagaggatccaaggtgctacaaaactgctggatggtagtttggagcgctgctttgtggatggtctggaacaccgtgatgctaaagttatatacaactgtttgcgtgcttatgctgcaattgacaatacatcatcagccgaagagctttttcgtacaacagtggtgtctccattgatccagaaaatagttcctcaaaactatgcaagagctgttgctggggcatcatctgatgagctagaagaggattatcaacagataaaggcatgcgtagaaaaagattgcaaatttatattggaaatatcttcgtcagaaaactctggattgcatgtttttgattttctgggtaattcaatactcaaagaagtcctttctgcaatccagaaaggcaagcctggggccttttctcctggaaagcctaaagaattcttgaggaactacaaagtgagcttaggatttcttgattttcttgaaggctactgcttctccaagtctgctgtaacgaagttacgctatgagcctgcttacacagatttcatgcgacagtggaatgttggtgtctacttttcgttgcgatttcaggaaattgcgggtggccttgattctactcttacaaatacctttagtcctactggattgaatgaggctcaacagaaaccgttgctcttgaaacaaagtattaagctcttagaaagtttggattcatgttggagtgatgaggttcttgtattctctcactgcgataaattcctccgtctgtccttgcagcttatttcaagatgctgaatgggcactgtctattcctatagaagatttcatatatgtaagttacatctgcaataatgtctgaactcgtcatgtcccaataggatctagcgtttttcattctgtactatggacctagctgcttaggactgaaattttgggtgctattgtcctatttattaacattattctatgtttctgtattaagtttatgcttagcttgaaatttctggagtttcgaagtagttataagatgactagttgcttcagaagtgctcagtaagtctgcaggaagtcactgtttccaccttttgactagagagacatgtactggtgttggttcagtggaaaaagaactgcagtttgtactttgtagtccaatttgtggcaactctgaggtaatacaagctcttagtaagtgccttctgtttttcatatacatatgaactgaaaagcctgtttgtcccttattgttgtacgttcagttgtatgaatggaggtaagttcgtgttacttagtcttggtgcgcctttcctgtttctgactcctaaggcatgagtcttgttacgctaaaaaggttatgcaatgttgagcaatggggctgtgtgaattctaatgtctttgttcattgatttacagataatgcatgatgtgcatgctgtaattggtgagctttcagaatcaggcagctttattggacatgtgaatcagtcactagggtcatgccccattgaagtatttaatcttgtgaaaggaagtatattgcaagctgctgaacctttaaaggagctgttgcctgcaataatggatgtcatgattggaatcatagttaagaagtctaatgaggacctgaagcacctgaaaggaataacagcgacatataggatgacgagtaaacttccagtcaggcattctccatatgtatcagggattttacatccactgaaggtgtttcttgaaggggaccgtatgcactatctatcagaagatgataaaactaagttgtgtcgtgggtctgcaaataagattactgcaacctactatgacttggtctctgaagttgtcactgtggcaaggaaaaccgagtcttcattgcagagactgcgccaaggtgcacaaaggcgagtaggagctagtacagatgcctcagatagcatcatatctgatacagacaagatctgtatgcagctatttcttgatattcaggagtacgcacggaaccttcgtgcgataggaatagacgcgagagagattgattcctacagagctctatggcagtgtgttgccccaaaggacaggcacgagaacatccagttttgatgtaaagaacgctgtcagtatatataaaataaaattgtcaacccgtagatatctcagtatgtgaaaatgatacggttggcactggttcatccagtcttcaacgacatgacaccctgtcagtttgtgaaacaaggacgtgtttggtttgatgaatgaggtggtacatttctctcttacttcttatttttatatttggtttttagaatagtacgagttgattcatcaccatttcattcctcgtaagctaataattagtatataagtaatgaatgagttgatcctatggaaatttatagatgaaattatgatgcatcatattataaagcatgagtgactctacgaaccaaataagtgttgtttttgcaattgcggccatgattggagttggagctggagcggctatagcctgtgtgtcactggtgatgacaggac

SEQ ID NO: 11846 - DNA, 3316 bp, Zea Mays
cttttcttccctcgcatcctcccctgcggccctgcctgaccctgctctagatctccatcgcgcgcgcgcagatctcagtcctaagtctagacctctatggcggacctcgtcatggcccctccgccggccatggacctcttcggggagccgatcgaggcgcaccctccctggttcaagcccgacgccttcctccgcgcgggcttcgacgcggacgcctacgtcgccgagctccgctcctacgtcccgctcgacagcctcgccgccgagctccgcgcccacctcgccgcgctccgcgccgagctcgtcggcctcatcaaccgcgactacgccgacttcgtcggcctcagcgcgcacctcaagggcgtcgacgccgccgcggcccggatgcgcgccccgctcgccgacctcagggacaaggtcgccgccttccgcgccggggcatccgccgcgctcgccgcgctcagggaggggctccagcagcgggccgccgccaccgccgcgcgcgagctgctcgagctcctgctcgacacctcccacgtcgtctccaaggttgagaaattgatcaaggaactaccaactgcaccgtcagattcatctaatgctgaaattcctatcaatgacactggaacaccaaatgggaaggctgggacaggtgtcagagaaacacagagcattctcctagaaagaattgccagcgagatgaaccgtcttaaattctacattagtcatgcagagaacctcccttttattgagaacatggagaagaggatccaaggtgctacaaaactgctggatggtagtttggagcgctgctttgtggatggtctggaacaccgtgatgctaaagttatatacaactgtttgcgtgcttatgctgcaattgacaatacatcatcagccgaagagctttttcgtacaacagtggtgtctccattgatccagaaaatagttcctcaaaactatgcaagagctgttgctggggcatcatctgatgagctagaagaggattatcaacagataaaggcatgcgtagaaaaagattgcaaatttatattggaaatatcttcgtcagaaaactctggattgcatgtttttgattttctgggtaattcaatactcaaagaagtcctttctgcaatccagaaaggcaagcctggggccttttctcctggaaagcctaaagaattcttgaggaactacaaagctactgcttctccaagtctgctgtaacgaagttacgctatgagcctgcttacacagatttcatgcgacagtggaatgttggtgtctacttttcgttgcgatttcaggaaattgcgggtggccttgattctactcttacaaatacctttagtcctactggattgaatgaggctcaacagaaaccgttgctcttgaaacaaagtattaagctcttagaaagtttggattcatgttggagtgatgaggttcttgtattctctcactgcgataaattcctccgtctgtccttgcagcttatttcaaggtatacaacatggctttcatgtggtttatcagcacgtaaagcttctgacaggagcccaaattcacctgcagatgctgaatgggcactgtctattcctatagaagatttcatatatgtaagttacatctgcaataatgtctgaactcgtcatgtcccaataggatctagcgtttttcattctgtactatggacctagctgcttaggactgaaattttgggtgctattgtcctatttattaacattattctatgtttctgtattaagtttatgcttagcttgaaatttctggagtttcgaagtagttataagatgactagttgcttcagaagtgctcagtaagtctgcaggaagtcactgtttccaccttttgactagagagacatgtactggtgttggttcagtggaaaaagaactgcagtttgtactttgtagtccaatttgtggcaactctgaggtaatacaagctcttagtaagtgccttctgtttttcatatacatatgaactgaaaagcctgtttgtcccttattgttgtacgttcagttgtatgaatggaggtaagttcgtgttacttagtcttggtgcgcctttcctgtttctgactcctaaggcatgagtcttgttacgctaaaaaggttatgcaatgttgagcaatggggctgtgtgaattctaatgtctttgttcattgatttacagataatgcatgatgtgcatgctgtaattggtgagctttcagaatcaggcagctttattggacatgtgaatcagtcactagggtcatgccccattgaagtatttaatcttgtgaaaggaagtatattgcaagctgctgaacctttaaaggagctgttgcctgcaataatggatgtcatgattggaatcatagttaagaagtctaatgaggacctgaagcacctgaaaggaataacagcgacatataggatgacgagtaaacttccagtcaggcattctccatatgtatcagggattttacatccactgaaggtgtttcttgaaggggaccgtatgcactatctatcagaagatgataaaactaagttgtgtcgtgggtctgcaaataagattactgcaacctactatgacttggtctctgaagttgtcactgtggcaaggaaaaccgagtcttcattgcagagactgcgccaaggtgcacaaaggcgagtaggagctagtacagatgcctcagatagcatcatatctgatacagacaagatctgtatgcagctatttcttgatattcaggagtacgcacggaaccttcgtgcgataggaatagacgcgagagagattgattcctacagagctctatggcagtgtgttgccccaaaggacaggcacgagaacatccagttttgatgtaaagaacgctgtcagtatatataaaataaaattgtcaacccgtagatatctcagtatgtgaaaatgatacggttggcactggttcatccagtcttcaacgacatgacaccctgtcagtttgtgaaacaaggacgtgtttggtttgatgaatgaggtggtacatttctctcttacttcttatttttatatttggtttttagaatagtacgagttgattcatcaccatttcattcctcgtaagctaataattagtatataagtaatgaatgagttgatcctatggaaatttatagatgaaattatgatgcatcatattataaagcatgagtgactctacgaaccaaataagtgttgtttttgcaattgcggccatgattggagttggagctggagcggctatagcctgtgtgtcactggtgatgacaggac

SEQ ID NO: 11847 - DNA, 1652 bp, Zea Mays
agcaagctaggggaacatgtcatattgtcacgtttcgttgaaaggtcggtcgtcgccacgtgcccgcatgcatgctcgttgctcgtcgcccgcgaaccgacggcggcattttctacctactatacggtggcgaccgctatcctcgagagttgctggttgctttcgcgagtcaaacgatcagatggctctgaatcccttcttactagatgatttttgcctggctggagtagttctgatccaagagcttgttgctttgatttttgcttgctcttagacttgtccacactgttaaattttgtgcccctcaaacaagcctgtgctcgctcactttcaactcagagcgatcacgaccagtcggctactccaacttcaagaacggaagcctcggcctctcgggcgtgaaagctggattgtggttgtcccgtactattcactatgggtgatgtttgatctttatatatgaaactgatgatattaccaatattttgtccttcaacttagacttgtcaatatctgggcacatgttgttttcttcagttcattgagaatagcctaatgaagatacaacccgttgctttcctctttcctgctttcagagttttagtaccatgaacatgattgcgattttttgctaactacttctaaataactgtagtttgtttagatacataccatcaagtcaaatagacacctgacctttggaataaattactccaaaacaattcttgtttttcatgcagatcatgaacccaatggtaagttaattaattacatgggcaaggatggggtgaataagcagacacaggccacgcacatgacaattgatgcacatataaaccacagaaacccaaatccgaagcaatgaaagccctgtgttcaaagattagaatcatccaacacagatttgtacatatatttttataggaaataattcttgtttgtttttttttttgcacacatatttgtgtagctatctgtatggggtctcaaggctatagatctttgctctccctcctttaaaataagatacttgtacctacacaccataaacatgttatcagacatctagcattgaagaatgcacccagctatctgatagttgaaaaaaaaatattttgcttgattaaatgttcatctaagaaattaaatgatagtctcattatatgccaaaaaatggtacccttaatttcaggacttggtgcatcatgtagatcatgtgcttctctagcagatgcccagttcacagctttcttatgggaataagccttgcaatgaaggctatggtcccgcaataaaccccttaccatcgcaaccttggtctgttgatgccaatgcaaagggtcgttgttctgcatattgggaagtaaattatgttaaattcaagaagcaagtaacgccagaaaataagatagtttcacccaatctgcttcctaagcctttctattgcaactttgacctatgctgttgttcgaaacattatttgatctattaagatatgttgattgtgcacaatgagcagcccgtgacaggatagctattctcccttgagatcgaaaacttacaaactcatcaagtgcttgagaaagagacaaatctccataggctgagatgatgtatagagacattgttgtattgcgacaaccatacacctc

SEQ ID NO: 11848 - DNA, 1229 bp, Zea Mays
cgcccggccacactcgattcaagctgacgttctattcccacaatcccactccagaagctgccgagaccgagagagcctgcggattacacgcatctcgccgacccccgccccccatggccgatctccgcccgccggagccgggcacgaacggctccagcgccggcgtggtcgccgcgctgccggccgtggaggccgtagcggccgcagagaccgccatggccgccacgggcggaccacagccgcccgcgccgccctactccaagcgacgccgccgccccagcgtccgcctcggggacatcgacgctccgcccccgcgccgcaaccacaagccgccgtcctcgtcgcacccgcgcccgccgcgccgcgcgcacccggacgacctcgacccgcacgcgcacagccgccgggggtccaagccgccggcgcagcgccgcccgcggaccgcctggattcccgccgcgcccgcttcggcggggcccgccgagggctacgacgacgacgaggagcgctactacgacgacgaggaccagtccgactccgcggccgccgccgccgcgagggctagggtttcgggcagccgcgacgccagcggcgacgagtcggacggggtggcggactggggcctccccaacggtcgccttccctccgcgacggggtatggcggcgtcaaggcctggctcgatgggttggggctttctcggtacgcgcccgtctttgagatccatgaggtggacgacgaggtgctccccatgctcacgctggaggacctcaaggacatgggcattggggctgttggctccaggaggaagatgtacgccgccatcctcaagctccggagcgacaacgcgtcctgagttgggaccggcttctttgttttgaccttgcacatcttgcgagaaatcaatcaaaaagaagatctcttttgaaatatgtgtgcctcttgagcctcccttaaggccagggtttgatgaacagaatccaatgttctaaagggctattgagcaactggttaaggcgtgctgtgggcagagagctgcacggaaggtgcaaggaaacgataagctgatgaggcattgatacccaaagagtagcagatggatcatgagagatcatagtttttggtctttttgaaatgtcatctccaaaaaaaatgtgatggttgtcgaacacgatagtccggtacattttttgccataagtataagcatgctagaggatcattgagctgga

SEQ ID NO: 11849 - DNA, 2523 bp, Zea Mays
tgactctgagaccgagagcctccagaaacccacgcgacgcgaccgaccaccatggccgcctccgcgctcctcctctcgccgcggctcgtgtctttcccgcctcacccgagcctcgccccactcttcaccaagagaccaccgccctaccccctcggcggcgccggcgcgaggctccgggccgtcggggacgggcccggcgcggggctgccacccgagcaggccacggtctacgacggcgcctacggtccctggaccctggaggactccgacgtgcgcgaggtcctgctgtaccggtcggggctggtgacggctgcggcgtccttcgtggcggcgtcctccgcggcgttcctgccggaagggaaccccgccgcctccgccgtcaccggcgccgccgacctcctgtacgccgccggcgccgcggggctggggctgtcgctggtcctcatccacatctacgtcaccccgataaagcgcttcctccaggcgctgtgggcggccggggcgctcggctccgtcgggacctacctcgtcgccgcccgcccgctggatgagggcctcgtgcagtacgtgctggaccaccccgccgcgctgtggttcgtcggccccacgttcgccgcgctcactggcctcgtcttcaaggaaggtctctgctatgggaaactggaagctggcatcttgacgtttcttatccctgggcttcttcttgggcatttgtctggtttaatggataacagcacaaaggcaggtcttttaggactgtggatgcttcttttcacaatcttcgccgctagaaaattccagcagcccatcaaggatgacgtcggagacaaatctgttttcatgttcaacgctctccctgaagaggaaaagaaggcttggatccagaaactcgagaggcaaaaggggcaagagttgtttgagtagaaaagagtagcttgtcttggtgcagccaatagttcgtccgtgaatgtttgtagctcatgtatatgattatggctccagaaatttgacaaatacacccaaagacatgaagacgagaacacgttccaatagagatgtaattacaaatctgttagatcacaggtaagatgtaactaaataaagcagttttgttgttatagtcgttgacaatattttagtttgttgctcccatgccttaatcaagtaaatacaaaattcactacttgattggaaggtggaggaaacagaaaaagttatctatgaacgtacatatgatgagcaaacagataatggtaacagaaacagaagaccacattcgcttgcatgataatggaccatccaccgagttcagtctaaaactaccaaacttaatcaccacaatacaactcaatagttctcacatacaatacaactcagatacatataagccttggaatgccttaaacatgtggcagatccccaagacattggctactacttggtagcacccaatcgcaaggtataccatgcagactgttctggtaataagctcttaaaacatcaagaaaatttgcaccaacatgactgatgccctaaataaatagctatgaatcaccaccattcaacctaccaatggtacacaaattttgaagaaatcagttgcagagtcgactagtttccatagacagcgccatttgagttcagagaggctccgttctggggaacgtcagctccctctacctccgacaagaagccattctcaaagaacgctgaatggagggcttgtacgcactgttttgcctcactgtcattgactaccaaggaaatgttcaccttggacgccccttgtgagatcatctggacattaacaccatttcttcgcagaacgttgaatgcctggcatgcagcaaaacagggtcagccattcatgttctcatgtccattatctaaaataaaagcacgacctagcatgaaagttcagaatcacaagatgtcatgttacaagtagtatcatgaaaagctatgaccttttcaagaatcaatgacgatcgctgtacattccctatcagtgagatgatcgatctacgttgcagcagatgaacaactgcaaattttttaagctcttcaacgacatgatcaagttcctgccacatcattgtaaaaaaaaagaatgagggcagtaaaaaaacttgctgaaaaaaaatgccaggttaaacttgcaaagtaaaactatgagaagcaaaaacagcaaaagaattcaatatgttatctgttctgtaagtttaacatgtacctaaaaggctatcgtgggttctcaactgctgcaagaatccatattgatcaaaactcatagttacaaaatgtgtaatttaggttttaccaagcatttcaaaattcctagcttaatcataccattgaacagagaggataacaaatgcagagtaaaacatttggtagccggttgttattggaagtactgcctgtattgtttgctgaaagttgaacaaaaaatatttccttactcagatgcttacctgctggatcaattcacgactccatagttttgatggatctagagtcaac

SEQ ID NO: 11850 - DNA, 2538 bp, Zea Mays
aacgaacggcgctcgaaaaaatatcggggccgacgcatccgctgtctgactctgagaccgagagcctccagaaacccacgcgacgcgaccgaccaccatggccgcctccgcgctcctcctctcgccgcggctcgtgtctttcccgcctcacccgagcctcgccccactcttcaccaagagaccaccgccctaccccctcggcggcgccggcgcgaggctccgggccgtcggggacgggcccggcgcggggctgccacccgagcaggccacggtctacgacggcgcctacggtccctggaccctggaggactccgacgtgcgcgaggtcctgctgtaccggtcggggctggtgacggctgcggcgtccttcgtggcggcgtcctccgcggcgttcctgccggaagggaaccccgccgcctccgccgtcaccggcgccgccgacctcctgtacgccgccggcgccgcggggctggggctgtcgctggtcctcatccacatctacgtcaccccgataaagcgcttcctccaggcgctgtgggcggccggggcgctcggctccgtcgggacctacctcgtcgccgcccgcccgctggatgagggcctcgtgcagtacgtgctggaccaccccgccgcgctgtggttcgtcggccccacgttcgccgcgctcactggcctcgtcttcaaggaaggtctctgctatgggaaactggaagctggcatcttgacgtttcttatccctgggcttcttcttgggcatttggtcttttaggactgtggatgcttcttttcacaatcttcgccgctagaaaattccagcagcccatcaaggatgacgtcggagacaaatctgttttcatgttcaacgctctccctgaagaggaaaagaaggcttggatccagaaactcgagaggcaaaaggggcaagagttgtttgagtagaaaagagtagcttgtcttggtgcagccaatagttcgtccgtgaatgtttgtagctcatgtatatgattatggctccagaaatttgacaaatacacccaaagacatgaagacgagaacacgttccaatagagatgtaattacaaatctgttagatcacaggtaagatgtaactaaataaagcagttttgttgttatagtcgttgacaatattttagtttgttgctcccatgccttaatcaagtaaatacaaaattcactacttgattggaaggtggaggaaacagaaaaagttatctatgaacgtacatatgatgagcaaacagataatggtaacagaaacagaagaccacattcgcttgcatgataatggaccatccaccgagttcagtctaaaactaccaaacttaatcaccacaatacaactcaatagttctcacatacaatacaactcagatacatataagccttggaatgccttaaacatgtggcagatccccaagacattggctactacttggtagcacccaatcgcaaggtataccatgcagactgttctggtaataagctcttaaaacatcaagaaaatttgcaccaacatgactgatgccctaaataaatagctatgaatcaccaccattcaacctaccaatggtacacaaattttgaagaaatcagttgcagagtcgactagtttccatagacagcgccatttgagttcagagaggctccgttctggggaacgtcagctccctctacctccgacaagaagccattctcaaagaacgctgaatggagggcttgtacgcactgttttgcctcactgtcattgactaccaaggaaatgttcaccttggacgccccttgtgagatcatctggacattaacaccatttcttcgcagaacgttgaatgcctggcatgcagcaaaacagggtcagccattcatgttctcatgtccattatctaaaataaaagcacgacctagcatgaaagttcagaatcacaagatgtcatgttacaagtagtatcatgaaaagctatgaccttttcaagaatcaatgacgatcgctgtacattccctatcagtgagatgatcgatctacgttgcagcagatgaacaactgcaaattttttaagctcttcaacgacatgatcaagttcctgccacatcattgtaaaaaaaaagaatgagggcagtaaaaaaacttgctgaaaaaaaatgccaggttaaacttgcaaagtaaaactatgagaagcaaaaacagcaaaagaattcaatatgttatctgttctgtaagtttaacatgtacctaaaaggctatcgtgggttctcaactgctgcaagaatccatattgatcaaaactcatagttacaaaatgtgtaatttaggttttaccaagcatttcaaaattcctagcttaatcataccattgaacagagaggataacaaatgcagagtaaaacatttggtagccggttgttattggaagtactgcctgtattgtttgctgaaagttgaacaaaaaatatttccttactcagatgcttacctgctggatcaattcacgactccatagttttgatggatctagagtcaac

SEQ ID NO: 11851 - DNA, 3307 bp, Zea Mays
attagccactttatgtattgagaagaaattattggacaaggttgatagtaacactattatcaacgacttcacatcaagaaatgttagaagaaatttttgaggtaggaccgcctacgttatgagctttgaggtgggagcggtgctggaggacgcggcgtggcaggccccggagtactgcttcaccaacaacggtgggcttgggctggccgacgagaccaccaccaccatcgctggcggcagcagcttcgtccccaggagcgtgctgtgaggtccccacgagcggcagcagcttcagtatttggagaaatacgatcgatatgtgcacagcgtacgcgcagtaatgtatgtaatcttttgcctgtctgttgtttatctctgagcgaaacgtgtggcttttgtggtgtccacgagctctgcggactgcgtgacactattgaggaagagacggaaacaaaagcaaaaaaagaaagacatcggcatgcacaaatagcatgacgagacgactgtacgaaaaccacaaaacttgcacgtctttcatctaccatcggagcagctagctttcgttgcttccagcacaacacacacgtgtgccaggccgcccagggaaacgctcgaggaggtagtatctgtgtgggctttgatttcatccgtgcatcgctcgagaccagaaggcctgtcaactatcccgatcacttcttgggcctccgttctcaaacgcccagtacgcagcccatcaaccactggccaccgtcaccggaaacgaacggcgctcgaaaaaatatcggggccgacgcatccgctgtctgactctgagaccgagagcctccagaaacccacgcgacgcgaccgaccaccatggccgcctccgcgctcctcctctcgccgcggctcgtgtctttcccgcctcacccgagcctcgccccactcttcaccaagagaccaccgccctaccccctcggcggcgccggcgcgaggctccgggccgtcggggacgggcccggcgcggggctgccacccgagcaggccacggtctacgacggcgcctacggtccctggaccctggaggactccgacgtgcgcgaggtcctgctgtaccggtcggggctggtgacggctgcggcgtccttcgtggcggcgtcctccgcggcgttcctgccggaagggaaccccgccgcctccgccgtcaccggcgccgccgacctcctgtacgccgccggcgccgcggggctggggctgtcgctggtcctcatccacatctacgtcaccccgataaagcgcttcctccaggcgctgtgggcggccggggcgctcggctccgtcgggacctacctcgtcgccgcccgcccgctggatgagggcctcgtgcagtacgtgctggaccaccccgccgcgctgtggttcgtcggccccacgttcgccgcgctcactggcctcgtcttcaaggaaggtctctgctatgggaaactggaagctggcatcttgacgtttcttatccctgggcttcttcttgggcatttgcacaaaggcaggtcttttaggactgtggatgcttcttttcacaatcttcgccgctagaaaattccagcagcccatcaaggatgacgtcggagacaaatctgttttcatgttcaacgctctccctgaagaggaaaagaaggcttggatccagaaactcgagaggcaaaaggggcaagagttgtttgagtagaaaagagtagcttgtcttggtgcagccaatagttcgtccgtgaatgtttgtagctcatgtatatgattatggctccagaaatttgacaaatacacccaaagacatgaagacgagaacacgttccaatagagatgtaattacaaatctgttagatcacaggtaagatgtaactaaataaagcagttttgttgttatagtcgttgacaatattttagtttgttgctcccatgccttaatcaagtaaatacaaaattcactacttgattggaaggtggaggaaacagaaaaagttatctatgaacgtacatatgatgagcaaacagataatggtaacagaaacagaagaccacattcgcttgcatgataatggaccatccaccgagttcagtctaaaactaccaaacttaatcaccacaatacaactcaatagttctcacatacaatacaactcagatacatataagccttggaatgccttaaacatgtggcagatccccaagacattggctactacttggtagcacccaatcgcaaggtataccatgcagactgttctggtaataagctcttaaaacatcaagaaaatttgcaccaacatgactgatgccctaaataaatagctatgaatcaccaccattcaacctaccaatggtacacaaattttgaagaaatcagttgcagagtcgactagtttccatagacagcgccatttgagttcagagaggctccgttctggggaacgtcagctccctctacctccgacaagaagccattctcaaagaacgctgaatggagggcttgtacgcactgttttgcctcactgtcattgactaccaaggaaatgttcaccttggacgccccttgtgagatcatctggacattaacaccatttcttcgcagaacgttgaatgcctggcatgcagcaaaacagggtcagccattcatgttctcatgtccattatctaaaataaaagcacgacctagcatgaaagttcagaatcacaagatgtcatgttacaagtagtatcatgaaaagctatgaccttttcaagaatcaatgacgatcgctgtacattccctatcagtgagatgatcgatctacgttgcagcagatgaacaactgcaaattttttaagctcttcaacgacatgatcaagttcctgccacatcattgtaaaaaaaaagaatgagggcagtaaaaaaacttgctgaaaaaaaatgccaggttaaacttgcaaagtaaaactatgagaagcaaaaacagcaaaagaattcaatatgttatctgttctgtaagtttaacatgtacctaaaaggctatcgtgggttctcaactgctgcaagaatccatattgatcaaaactcatagttacaaaatgtgtaatttaggttttaccaagcatttcaaaattcctagcttaatcataccattgaacagagaggataacaaatgcagagtaaaacatttggtagccggttgttattggaagtactgcctgtattgtttgctgaaagttgaacaaaaaatatttccttactcagatgcttacctgctggatcaattcacgactccatagttttgatggatctagagtcaac

SEQ ID NO: 11852 - DNA, 602 bp, Zea Mays
gctgttcctatctcctccgcggtgccagtcactcagtcagcctctgcgagcatccaacgccgaccaaccaccaccacaagttcaccgctaccaccactgcacggagtcacggcgatgacgccgcctcaccaccccgtaaacttcgccgtccttctcctcttcctatgcctcccggcagtcccacccgccgccgccgcggccgacccgaccccgaccccatggcccccgcagttccacgcgacgctggtgatggactaccacggcaacatgtccgtggccgacctctggtacgactggccgggcggccgcaacctgcacgtcatccgctaccagctcgccgccgacgcgccatactacgacaacgagtggaacaacggcacctccttcttctacacgccggcgctccgcacctgccgctccgccgccgtcggggtcggcatcctccgcccggactggctccgccccggggccgtctacctcggccgccgcgacgccggcggattcgactgccacgtctgggccaaggccgacttcatcacctactacgaggacgtcaacaccaagcgacccgtcaagtgggtcttctacacagctgagagaag

SEQ ID NO: 11853 - DNA, 750 bp, Zea Mays
cacaggtccccgctgttcctatctcctccgcggtgccagtcactcagtcagcctctgcgagcatccaacgccgaccaaccaccaccacaagttcaccgctaccaccactgcacggagtcacggcgatgacgccgcctcaccaccccgtaaacttcgccgtccttctcctcttcctatgcctcccggcagtcccacccgccgccgccgcggccgacccgaccccgaccccatggcccccgcagttccacgcgacgctggtgatggactaccacggcaacatgtccgtggccgacctctggtacgactggccgggcggccgcaacctgcacgtcatccgctaccagctcgccgccgacgcgccatactacgacaacgagtggaacaacggcacctccttcttctacacgccggcgctccgcacctgccgctccgccgccgtcggggtcggcatcctccgcccggactggctccgccccggggccgtctacctcggccgccgcgacgccggcggattcgactgccacgtctgggccaaggccgacttcatcacctactacgaggacgtcaacaccaagcgacccgtcaagtgggtcttctacacaggtccctaggcctgctgtgctgcctattcacgaaatcacaacacaggtcacggcttcaactgcttgaagctaagtttacctgaaagtccaatgtcttctataaagatctttgagtatgttcagcaaatggattcgtatccaaatattt

SEQ ID NO: 11854 - DNA, 2257 bp, Zea Mays
gccgcacggtatgcgtctgccggccgttctcattcccctccaaacttaaagccctaaacccatcttgctcccccctcgtctccactgctctgctgctcctcgcgccgccgcagcgacgtaatggcttccgccgcggtgctccggaacgccggctcccggcgcctcttctcctaccctactctccgcgccgctgcgatatatgtaccttctgcgctacccgatgcgcccgcggcggcggcagcgccggcccagccgccaccgacggccgggaccctctgggcgaggtctatggccaccttcacgcgcacgaagccccatgtgaacgtcggcaccattgggcacgtcgatcacggcaaaaccactctcactgctgccattaccaaggtcctggccgaggcagggaaggccaaagccgttgctttcgacgagatcgacaaggctccggaggagaaagccagaggaatcaccattgcgacagctcacgtcgagtatgagacggctaaaaggcattatgctcacgttgattgtccaggtcacgcagattatgtcaagaacatgatcactggagctgctcaaatggatggtggtattcttgtcgtgtcagctcctgatggcccgatgccacaaactaaggagcatattcttcttgcccgtcaggttggtgtaccttcccttgtgtgcttcttaaacaaagttgatgctgttgatgatccagagcttctggaacttgtagagatggagcttcgggagctcctcagtttctacaagttccccggtgatgagattccgatcatccgtgggtctgcgttgtctgctttgcaagggaacaatgatgagataggaaagaatgcaattttgaaattaatggacgcagttgatgagtacatccctgatcctgtgaggcagcttgataagcctttcttgatgccgatagaagatgtgttttctattcagggtcgtggaactgttgttactgggcgtgttgaacagggaacaatcaaaactggtgaagatgttgagatcttgggtttggcacagactggtcccttgaagactacagttactggtgttgagatgttcaaaaagatactggaccatggagaggctggtgacaacgttggccttcttctccgtggtcttaagcgtggtgatgttgagcgtggccaggttagatttcctgaattcgaaattgtctgagaagtttttcgaaatattcattgaactgttttgcctggaaaccgccttgcatttgatggtacatggttgcgtgatcaccaaacaaattatacagttctcttaatcctgatcctctgtggtgtgcaaacctggtagtctgaagacatgcaaaaagttcgaggcggaaatatatgtcctgacaaaggatgaaggtggccggcacactgcctttgtcacaaattacagcccccaattctacttcaggacagctgatgtcactggaagggttgagctgcttggggagatgaagatggttttgcccggtgacaatgtaactgcgaattttgagttgatatcacctgttcctcttgaacctgggcaaagatttgcgattagggaaggaggaagaacggtcggtgctggagtcgtctccaaagttcttagctgatcagtttccactttcttctccgtagcaattcagtgaacaaacgagtgttgatatgtccgaccgggttagaaacgagcgcaaagcaccgggttttcttttgcatttttcttggaatgcctgagcaaaggcagagctggcctggccagtggccaccattttattgttgaggcgtggtgctgtgtaacaccacggttagtttggttgacacgcaagttgggcataactttgattgaataatactagtctcatcataaacatattttctagcaattttgtcatgtcggtcttggaggcgctttgtcaagtccgcagaaaaaaaatgctggttggactatatatgtgtatgtatttgtgatgtttaccgtcgctagcttctgatctggtgatgcgaaattttaatggcatggatattatctatttgttttcgaatttgattcgactacaaggactaaacccgatccgtatctgagtccatgttctttagtatctgatatgtatttgatatttatccgtattcataaagtcataaagttggatatgtattatgttgatactgttttaaatattagctgacataatttaataacatttgtattcgatgtgaatcgaaaagaaaaaaatgtaaaaataaac

SEQ ID NO: 11855 - DNA, 2060 bp, Zea Mays
gccgcacggtatgcgtctgccggccgttctcattcccctccaaacttaaagccctaaacccatcttgctcccccctcgtctccactgctctgctgctcctcgcgccgccgcagcgacgtaatggcttccgccgcggtgctccggaacgccggctcccggcgcctcttctcctaccctactctccgcgccgctgcgatatatgtaccttctgcgctacccgatgcgcccgcggcggcggcagcgccggcccagccgccaccgacggccgggaccctctgggcgaggtctatggccaccttcacgcgcacgaagccccatgtgaacgtcggcaccattgggcacgtcgatcacggcaaaaccactctcactgctgccattaccaaggtcctggccgaggcagggaaggccaaagccgttgctttcgacgagatcgacaaggctccggaggagaaagccagaggaatcaccattgcgacagctcacgtcgagtatgagacggctaaaaggcattatgctcacgttgattgtccaggtcacgcagattatgtcaagctcctgatggcccgatgccacaaactaaggagcatattcttcttgcccgtcaggttggtgtaccttcccttgtgtgcttcttaaacaaagttgatgctgttgatgatccagagcttctggaacttgtagagatggagcttcgggagctcctcagtttctacaagttccccggtgatgagattccgatcatccgtgggtctgcgttgtctgctttgcaagggaacaatgatgagataggaaagaatgcaattttgaaattaatggacgcagttgatgagtacatccctgatcctgtgaggcagcttgataagcctttcttgatgccgatagaagatgtgttttctattcagggtcgtggaactgttgttactgggcgtgttgaacagggaacaatcaaaactggtgaagatgttgagatcttgggtttggcacagactggtcccttgaagactacagttactggtgttgagatgttcaaaaagatactggaccatggagaggctggtgacaacgttggccttcttctccgtggtcttaagcgtggtgatgttgagcgtggccaggtggtgtgcaaacctggtagtctgaagacatgcaaaaagttcgaggcggaaatatatgtcctgacaaaggatgaaggtggccggcacactgcctttgtcacaaattacagcccccaattctacttcaggacagctgatgtcactggaagggttgagctgcttggggagatgaagatggttttgcccggtgacaatgtaactgcgaattttgagttgatatcacctgttcctcttgaacctgggcaaagatttgcgattagggaaggaggaagaacggtcggtgctggagtcgtctccaaagttcttagctgatcagtttccactttcttctccgtagcaattcagtgaacaaacgagtgttgatatgtccgaccgggttagaaacgagcgcaaagcaccgggttttcttttgcatttttcttggaatgcctgagcaaaggcagagctggcctggccagtggccaccattttattgttgaggcgtggtgctgtgtaacaccacggttagtttggttgacacgcaagttgggcataactttgattgaataatactagtctcatcataaacatattttctagcaattttgtcatgtcggtcttggaggcgctttgtcaagtccgcagaaaaaaaatgctggttggactatatatgtgtatgtatttgtgatgtttaccgtcgctagcttctgatctggtgatgcgaaattttaatggcatggatattatctatttgttttcgaatttgattcgactacaaggactaaacccgatccgtatctgagtccatgttctttagtatctgatatgtatttgatatttatccgtattcataaagtcataaagttggatatgtattatgttgatactgttttaaatattagctgacataatttaataacatttgtattcgatgtgaatcgaaaagaaaaaaatgtaaaaataaac

SEQ ID NO: 11856 - DNA, 350 bp, Zea Mays
gattcattgaaacaaattcgatgctacgtgattttttctataaacttgaacagtgtgagatgtgtatattagaggtaagcaacaaaaaagtattgcatatatactaatagttccataatccataccaattgtagctgacaacatttttttgcaagacaaagctaccaaaacgagcaaacaacatagtaccagcgttacaacagctcaaggacctagcagcaatgggatgggtatctgatagacttactgatcaacaacagtagagcacagcccctcaagcgcaaatctaaacagaacagggccggcatagacgatgtggagaaattgttggtcttctatggtttcggagt

SEQ ID NO: 11857 - DNA, 6108 bp, Zea Mays
gattcattgaaacaaattcgatgctacgtgattttttctataaacttgaacagtgtgagatgtgtatattagaggtaagcaacaaaaaagtattgcatatatactaatagttccataatccataccaattgtagctgacaacatttttttgcaagacaaagctaccaaaacgagcaaacaacatagtaccagcgttacaacagctcaaggacctagcagcaatgggatgggtatctgatagacttactgatcaacaacagtagagcacagcccctcaagcgcaaatctaaacagaacagggccggcatagacgatgtggagaaattgttggtcttctatggtgtctcgtcttcatggtacaggtaaaggccgaaaccgaacctcgcgcaggctttgcagaacgctgcctcttctgccgcagacacggggtcgtcgaaccgttcatcgctcagcgatgctgttccagcagcctccctgtgaacctgcatcagtggaaacagatacaagtgattcatttcattttatgcctgcaaatgaaacatctccttcagaacacaaactgcatagcctaaagtgtaatcgggcatggaccgcagaatgttcaagccatggcgtcggagacaaacgaagggttatgatctgatccgttgctgaatctcaaaaccttatgccctctgctgacataccatatataacagggttcactgtcacccagaggctttactgagcaggccgagagttccttgtgccattgtgtggtatgagtttatgacttagcatgcatgtaccaaatcgttttatatctggttagttgcagaaaacgaattcaggcaacagatatggctggctcttattagagcaactccaagagatcatgaaaaaaatgttccccaaaatctggtattgggagttgttgaaaaacagatgatgctaaaaaaaatgtgaacgcacatcagacccttaaaatgtaaaccctaaaatatttgaaccatcaaattgggccacggattcacttgctattgggccggccaaggattgacacagtaccaacagcgccgccacatggagcatccgtccaggagctgaagaaagaaacactttcttcccttagtaggaacggccgaagcacgtcagtatcgtttttttttttgccttttctcctccatgcgcatgatgattggtctgacattgtttgtccttgaacccaatgcacgcgcgaggcaaaaaacgtgggacgcagctaccttgcgtgcaccgacaggattggcaacgaggtacacgacacggaaatttgtgggagccaaggccgattatgcgggatgctaagttaatggggacaagaaagtgtgtctgttggagcgcttaaattgagctttttccccaaaaaacattttacgggttgttttgcgggttctcttggagttgctcttaatggccagaaaatggcacagcaatgtgattacacctatggtgggaaataggcaaagcctgaatgaaccaaggtaccgtttggttcaaatatttgtaacgtaatgggtaagtgataacgttaaatcatgtttgttttagtccaaccgtaatcagataccatactaaaaattgatatcggactattcaaacttgttaccgtccgtaatcgagtgtaaaccgttaccattaccctttacgttacatttcgtgaaccaaacagcacccaagattgagtaggaatttggaatgctctgccactcgaaatatttcgagaaaattgatgaactagcactagcagaatcatggtaacctaataagtaataacagctgtaatgcacaaaaaatggcctctcttaaataagttctcccatggatttcaggctcaaccccatctatcatctataaaaaaaaagagcagactcagtgccagaggctcccacatgagtgggatcaggaaaatggataaaccgatgcaagcctttccctccagaaatgcgaagaagcagcttcaaacccgtgacctagcgactcaatgagacaggtcttaccattgcactaggcctaccattcttaaaatgttcttattgcttgagttctcccatggatttcaggcccaaccccacctaccatctatcccccaaaaaaggaaaggaaaatcccttctctactcctttaaagcgcgagtttctccgttcgtgcgtcctctttgtgcgtcctccttttagtgtgtaccctccctcctccctccacactccttcccacaacaaccgctcatcttctcctgctctctcaatcgtcgcccgacaccctcccacatccagctccctccccgaccttctcgtgaagcagcgacaattctaggctaggggacaggaggcacgccccaagcacggtgccaaggacgccatcggagaagcaagtggtgatggcacaaacagtgcttcccatgcgcgatctcaggattctcggtccattgctctcgtacccgtcggcgatcttgggccacgagcgcgccatcgtcatcaacctggagcgtatcaaggccgtgatcacatctgtcgaggtgctgcttccaaactccaaggatcacgccttcacatgcttcgcccgcaatctctagacccgcgtcctcgcgtgctccttagatcaggtggcgatttctatccctggtttattgttccgttgtctacttgtctagtagtcaaatgctttattttcagtcttacgaattactaggaatcatggtgagtttcaaatatatgtggagggcattgtactggcgagttggtcctgagtttctatcacaataccacattactctgttcccattgtggattatgtaccaccataacagtagtcatgagagaaaatccatgcaataggcagaaagttttggtcacttatgttataaggtactacgattcagggatttatcactaattgttttccccttatttctattaggttgaggatctcactgacatggagagtgaatcgtctcctgttgcttcaccatttcctgttccaaattcatccaaagaacatgaattggagatgactaagaattctactagtgtggtgcctgaaatgactagcagcaacagtatgcctaacttggatgctgcaaaagatggaaataccaaggttttatcttttgaattccgagcacttgaggtctgccttgggcctgcagatctttggaagatggagtatgtgcttgcatctggatctttttatcagtttatctgagttcaatcgaattatgtgctttagcatgctttatccattgaattggctgtcccagaattatatctatgtatttcttgttcatagaatattgggtattctcttcagacatgtttatttttgttgtcttagaatattggatactcttgagaccttactgatagatggagttatgcttcttgtagaagctgatctgtttaaaatagcgtatggccattatctgttaccggagcggatctagacaaaataatcattggtgtcatcttcattaagttatagtatcatcaactcatttatgcactaacaagcatacattttcatgtagattactaaaatctattggtgttacaggacaccacaaaagtgacctagatccgccttacgtgtttcttagttgttgcaaacaaacaaaattgcaacaaaacatgcccttgttgcagattccagtaatgactcgcatcccctttgtttcttcttatttgctttgctagatttaatataggaacggtgcaaactagttaaggttataagcacaagctagagtggtaatgcattcaactaatggcctgagacaaatatcaatgagttatcacagataattgataaagatgatcgtgaaggtacctctccatctgttccgcgcacagtcacgcggtatatgaccgtcacctttccactgtcagtgtaaataacatcacgaacttccccacaccaacctgaacaaagagagcgacccaaggaaaaaatttaaaagcaaacatttagcacatccaccacatttcaagtcaagagtcagcacacaagatctgtggagcaatgttaacgacgctggtattcaggatggcataggtaaagctactcaaggggggcgcaagagaatcaccagcaggaggcgagggcgacgctgttccagcagctcaggcgcggcctgcggaccacaaggcccaacaagaggagctgcacaggccctaagtgggtgaattaggcctatgactatgtatcgtggctccactatatatgggttgttcgtagacagagagaggggcgtttttttgctgtaagaactcgggcggcggcgacgatccaaggtgatcgtcttccgaatcggaccgtactttccacaccaccataatcaagcgtgtgattcgtctcaatcctatgtgagtgttgttgtgttgtatggatgctaacatttggtaatcagagctgagcgggatccaccaccgcacgaccaccttaccaaatttcaagtgaacgctgggccatggcgccgcaatggaacgaagagcaagtggcacatttgttggcgaggattgaagagggaaatcaagagaagtggcggatgatggagacgatgcaggcgatgatcgagaacatggagtcctcggtgaaaagtgtgttgtctgaacaaggcgatctgcagaagtggcgctcggaagaggaggcgaacatctctaaagtcgtggaggtggtgaaggcgatacagagcaaggttgatcgatcaagcgattctaaagaaggcggtgatcctcccaaccaacgagtcactgggagtggatggtatgtcggcctccacccaccaggaagcgattctgtctgagacaaagcacgagcaaatatgctaccgcaccgttgatccttactggaggccgggtgccagaacggattcagtccggacacctcctccggtcggaggtatggtgcccacccacaactcgttttggccacaatttggttccggggtgaccaatagagcgtcgatgggaaattggtctcagacatcaagagttatggtgcctagtatgagttcccctatttttgttggatcaaatccaaagcggtggagtcatagatttgtagatggttttaaggatgagattaagtcagcagttattgttcaacattttccccacttggatactacttgctctctcactttgtcacaggaggatatggtgaatcagtttgaacgccgagattcacgacgtgtggggcctggagggggtacaaggcttcctcagaaactaggaacagcgcccagtcctttgttgctgcctgtatcaggagggatgggtaatatgactgaagaccgtcgaagcatggctagaaatcaggccagagttgaggagaacaagctcacggccttgaaggcctatcgacgtaccaaggggttgtgttttaagtgttgggaatgttggagtcaaacatataaatgctctaactgtgttcctctgcacctgggagaggaggtttgggtcaaggaactgacaggtgaacctagagaatgcatcgaagagtttactgatttaactgacaggcagggagatgagagtctgttggctatcccagtggttgctgtgagtggcagtaaaggaaacaagaccatttggttatgggtttccattcattgccaacatgtattagtcctggttgattcttgaagctcagtcagcttcatgaatagctacgtgatgaagaacatgcctggggtgcggacattggccaaatctgtccaagtccgagttgcatatgggggcgagatgtggaataactatatagtgccaagttgcaggtggatgtgtggaggggtaactttctatacagatttccagatgctgtcacttggaggtacaatttgatctttggaatagattggttagaggatcacaatcccatgtcagtgcattgggcccagaagtggatggaatttgacgatcacagcaagaggatttatataccgagagggttgtcacaaattcagtattgttccagcatcaacaacttacagttggaggccttgctgagaagggacgcagtcgaccaattattggaacttcaggttgtaactgatgacttgatgtctgaagtgcccaatgtgatcattgatttgat

SEQ ID NO: 11858 - DNA, 1342 bp, Zea Mays
gcgaaaaacaacttctctggtaatcttccgtactccatatccaatttggtctcgcttgagtacctgaaattggagaactgtttggaagcctcagttcactcgcagaactgtaaggcatactgaaccgctgttttcgtacgcaagctcgacttgagtattgtgtggttgaaatttttgatcctgtacaaactatttcagtattgaatgttttcttcattaaaaaataagtgtaattttgagcacagatataatattcaaaatataacattgccaccaaataaaaatgcaacatactttatctggccacaaagttaagcccttctacgtctgtcctaagtcaaaaaaaaagttaactctaactaacaatatattatctgagattaaaatttattatattataaaattagtttgtttgcagatacaactttttttaggaaaatgttttttttaaaaatgcattcacaatcacttgatctgtccaagtgaggatgatgatattgtcagtatgatgattaactgctcttaaccctatgaatttcatcgtattataactacaatccttggagagacatatctttcaacaacctcacgggaatcttcctttctcaatgggctctctatcaaaactttctagcctatttttatcacagtttacttcttcaaagcaaccttggatgaaaatttcagtttagctgatattgaggtagctctgatcccaatcttggcagggtcatgtgaatacaaccacattcgaaccttgtatatgacttaaaggtttttaataaaactagactccactccactaggctttctgtgcgctcctggacaagcaattgcagtttggaaggataagcaattgtggtctcatgtgttgtactgtttcttagaattttccagcaacttcgattgggaggaattttgtttgagcttgtgggcccaattcatatcagttcccttacagatatgacagacttgggttacataaatgtgtttcaggtgtacacatctgacttaacatcactatttcttatggacctgtctaaggtgcaaaggccacacaaagggatttgggggtgatacatagagatcatagtacatgtggagaaggttgactatctttggcatttgctggaccctcgatccatttctccttgttttgacaatgctgttatgacaaaatttacactgcattaccaggagctgggccaacatttaccatcctaatcaattgtagattcttagcaattcttgacatcattgtaataattgtattatgctgtaaattttttaatgaaataacatcactgaaatgacatttgcgttgataattgcatgtgggtaa

SEQ ID NO: 11859 - DNA, 2462 bp, Zea Mays
cgctccacccctcccaactgcccctagcctaactcgggccacagagcggccgcccccttcaccggagaggtggcatcccacgtcggacgcagaggtgcacctgcgtcggcgccacgacacttgacccaggtcttgagcatgagtagggtaggagctccaggagcagttcttccccttctcacagaatcgccctccctgagggacttgagcaacaactacttgcacgattcaattctttaccagctgccatcaaaccttacctatctgaacctggcgaaaaacaacttctctggtaatcttccgtactccatatccaatttggtctcgcttgagtacctgaaattggagaactgtttggaagcctcagttcactcgcagaactgtaaggcatactgaaccgctgttttcgtacgcaagctcgacttgagtattgtgtggttgaaatttttgatcctgtacaaactatttcagtattgaatgttttcttcattaaaaaataagtgtaattttgagcacagatataatattcaaaatataacattgccaccaaataaaaatgcaacatactttatctggccacaaagttaagcccttctacgtctgtcctaagtcaaaaaaaaagttaactctaactaacaatatattatctgagattaaaatttattatattataaaattagtttgtttgcagatacaactttttttaggaaaatgttttttttaaaaatgcattcacaatcacttgatctgtccaagtgaggatgatgatattgtcagtatgatgattaactgctcttaaccctatgaatttcatcgtattataactacaatccttggagagacatatctttcaacaacctcacgggaatcttcctttctcaatgggctctctatcaaaactttctagcctgtaagtattattcagatgctccccatatatttgtatttctttctcgtggctctgatagtttccttcttgtgcctgttagccttgcaacactgtaagtagcttcccacacacacacaccttggttcgcgctcgcaccgaaaacaattttgagctaatattattggtgactctgcattccactcaacttccgcacggtgcttctaattaaatgaagttaaccaattgcagaatggaactgattctgcattccaggctgttgacaataaaccatcccaaacatgctacctaatggctctagatcatgctacaaacaattatggaacaagttgtcgcatctttttccctttctttataataacaattagattgaatttgcttaaaatttcccctgtcccattgtaatttctgaaacttagattgaatttgcatcttttccctttctttgttcatttaatcattgtgtactaacattttgtcaaatagttcatgttcatttaaacttttcttctattagactgatagtatttcacatactatactaaatgagtgtgagtccactgttctgttctttaacctctctctaggaagaatccatggtctgtattgttttactgaaaaggggatgtgctaacttgttgagattacacatggcatttacatttgtatatgttttgtccatttccatttcttaaataaaatatcctttgcagatttttatcacagtttacttcttcaaagcaaccttggatgaaaatttcagtttagctgatattgaggtagctctgatcccaatcttggcagggtcatgtgaatacgttagtgccttagtggagattatttgatacgaccttcaaagttcaaacatttcttacaataataattgatatctgttactcagaaccacattcgaaccttgtatatgacttaaaggtttttaataaaactagactccactccactaggtatgacccccctaatccccgtcctcaccttcatgccatcagtattttcatattagtacactaactgcgccctcatgtaggctttctgtgcgctcctggacaagcaattgcagtttggaaggataagcaattgtggtctcatgtgttgtactgtttcttagaattttccagcaacttcgattgggaggaattttgtttgagcttgtgggcccaattcatatcagttcccttacagatatgacaggtgtacacatctgacttaacatcactatttcttatggacctgtctaaggtgcaaaggccacacaaagggatttgggggtgatacatagagatcatagtacatgtggagaaggttgactatctttggcatttgctggaccctcgatccatttctccttgttttgacaatgctgttatgacaaaatttacactgcattaccaggagctgggccaacatttaccatcctaatcaattgtagattcttagcaattcttgacatcattgtaataattgtattatgctgtaaattttttaatgaaataacatcactgaaatgacatttgcgttgataattgcatgtgggtaa

SEQ ID NO: 11860 - DNA, 1631 bp, Zea Mays
ctcctctctcgctccacccctcccaactgcccctagcctaactcgggccacagagcggccgcccccttcaccggagaggtggcatcccacgtcggacgcagaggtgcacctgcgtcggcgccacgacacttgacccaggtgacaatggtctctaagtaaggcgagaatggccacccatgggaatcactggatctgtttgcgctcgtcatctggtccagcactaggtcttgagcatgagtagggtaggagctccaggagcagttcttccccttctcacagaatcgccctccctgagggacttgagcaacaactacttgcacgattcaattctttaccagctgccatcaaaccttacctatctgaacctggcgaaaaacaacttctctggtaatcttccgtactccatatccaatttggtctcgcttgagtacctgaaattggagaactgtttggaagcctcagttcactcgcagaactgtaaggcatactgaaccgctgttttcgtacgcaagctcgacttgagtattgtgtggttgaaatttttgatcctgtacaaactatttcagtattgaatgttttcttcattaaaaaataagtgtaattttgagcacagatataatattcaaaatataacattgccaccaaataaaaatgcaacatactttatctggccacaaagttaagcccttctacgtctgtcctaagtcaaaaaaaaagttaactctaactaacaatatattatctgagattaaaatttattatattataaaattagtttgtttgcagatacaactttttttaggaaaatgttttttttaaaaatgcattcacaatcacttgatctgtccaagtgaggatgatgatattgtcagtatgatgattaactgctcttaaccctatgaatttcatcgtattataactacaatccttggagagacatatctttcaacaacctcacgggaatcttcctttctcaatgggctctctatcaaaactttctagcctatttttatcacagtttacttcttcaaagcaaccttggatgaaaatttcagtttagctgatattgagaaccacattcgaaccttgtatatgacttaaaggtttttaataaaactagactccactccactaggctttctgtgcgctcctggacaagcaattgcagtttggaaggataagcaattgtggtctcatgtgttgtactgtttcttagaattttccagcaacttcgattgggaggaattttgtttgagcttgtgggcccaattcatatcagttcccttacagatatgacaggtgtacacatctgacttaacatcactatttcttatggacctgtctaaggtgcaaaggccacacaaagggatttgggggtgatacatagagatcatagtacatgtggagaaggcatttgctggaccctcgatccatttctccttgttttgacaatgctgttatgacaaaatttacactgcattaccaggagctgggccaacatttaccatcctaatcaattgtagattcttagcaattcttgacatcattgtaataattgtattatgctgtaaattttttaatgaaataacatcactgaaatgacatttgcgttgataattgcatgtgggtaa

SEQ ID NO: 11861 - DNA, 1683 bp, Zea Mays
ctcctctctcgctccacccctcccaactgcccctagcctaactcgggccacagagcggccgcccccttcaccggagaggtggcatcccacgtcggacgcagaggtgcacctgcgtcggcgccacgacacttgacccaggtgacaatggtctctaagtaaggcgagaatggccacccatgggaatcactggatctgtttgcgctcgtcatctggtccagcactaggtcttgagcatgagtagggtaggagctccaggagcagttcttccccttctcacagaatcgccctccctgagggacttgagcaacaactacttgcacgattcaattctttaccagctgccatcaaaccttacctatctgaacctggcgaaaaacaacttctctggtaatcttccgtactccatatccaatttggtctcgcttgagtacctgaaattggagaactgtttggaagcctcagttcactcgcagaactgtaaggcatactgaaccgctgttttcgtacgcaagctcgacttgagtattgtgtggttgaaatttttgatcctgtacaaactatttcagtattgaatgttttcttcattaaaaaataagtgtaattttgagcacagatataatattcaaaatataacattgccaccaaataaaaatgcaacatactttatctggccacaaagttaagcccttctacgtctgtcctaagtcaaaaaaaaagttaactctaactaacaatatattatctgagattaaaatttattatattataaaattagtttgtttgcagatacaactttttttaggaaaatgttttttttaaaaatgcattcacaatcacttgatctgtccaagtgaggatgatgatattgtcagtatgatgattaactgctcttaaccctatgaatttcatcgtattataactacaatccttggagagacatatctttcaacaacctcacgggaatcttcctttctcaatgggctctctatcaaaactttctagcctatttttatcacagtttacttcttcaaagcaaccttggatgaaaatttcagtttagctgatattgagaaccacattcgaaccttgtatatgacttaaaggtttttaataaaactagactccactccactaggctttctgtgcgctcctggacaagcaattgcagtttggaaggataagcaattgtggtctcatgtagggtttctgtcttcttatatttaacaactctttcacctaacatcttgaggtgttgtactgtttcttagaattttccagcaacttcgattgggaggaattttgtttgagcttgtgggcccaattcatatcagttcccttacagatatgacaggtgtacacatctgacttaacatcactatttcttatggacctgtctaaggtgcaaaggccacacaaagggatttgggggtgatacatagagatcatagtacatgtggagaaggcatttgctggaccctcgatccatttctccttgttttgacaatgctgttatgacaaaatttacactgcattaccaggagctgggccaacatttaccatcctaatcaattgtagattcttagcaattcttgacatcattgtaataattgtattatgctgtaaattttttaatgaaataacatcactgaaatgacatttgcgttgataattgcatgtgggtaa

SEQ ID NO: 11862 - DNA, 1887 bp, Zea Mays
ctcccctctccctcctctctcgctccacccctcccaactgcccctagcctaactcgggccacagagcggccgcccccttcaccggagaggtggcatcccacgtcggacgcagaggtgcacctgcgtcggcgccacgacacttgacccaggtcttgagcatgagtagggtaggagctccaggagcagttcttccccttctcacagaatcgccctccctgagggacttgagcaacaactacttgcacgattcaattctttaccagctgccatcaaaccttacctatctgtaatgcgcccccaacctgtacatgttttgttcatgctatttgattcttgagatttgaatccaaagcgaacgcaggaacctggcgaaaaacaacttctctggtaatcttccgtactccatatccaatttggtctcgcttgagtacctgtaagttactattccattggtaaagatgagatttgttcagtgatgatatttttggttagcacaatctaactgcagtgaaccactgcctgcaacaaccttagccacaactcgttgttacaggaaattggagaactgtttggaagcctcagttcactcgcagaactgtaaggcatactgaaccgctgttttcgtacgcaagctcgacttgagtattgtgtggttgaaatttttgatcctgtacaaactatttcagtattgaatgttttcttcattaaaaaataagtgtaattttgagcacagatataatattcaaaatataacattgccaccaaataaaaatgcaacatactttatctggccacaaagttaagcccttctacgtctgtcctaagtcaaaaaaaaagttaactctaactaacaatatattatctgagattaaaatttattatattataaaattagtttgtttgcagatacaactttttttaggaaaatgttttttttaaaaatgcattcacaatcacttgatctgtccaagtgaggatgatgatattgtcagtatgatgattaactgctcttaaccctatgaatttcatcgtattataactacaatccttggagagacatatctttcaacaacctcacgggaatcttcctttctcaatgggctctctatcaaaactttctagcctatttttatcacagtttacttcttcaaagcaaccttggatgaaaatttcagtttagctgatattgaggtagctctgatcccaatcttggcagggtcatgtgaatacgttagtgccttagtggagattatttgatacgaccttcaaagttcaaacatttcttacaataataattgatatctgttactcagaaccacattcgaaccttgtatatgacttaaaggtttttaataaaactagactccactccactaggctttctgtgcgctcctggacaagcaattgcagtttggaaggataagcaattgtggtctcatgtgttgtactgtttcttagaattttccagcaacttcgattgggaggaattttgtttgagcttgtgggcccaattcatatcagttcccttacagatatgacaggtgtacacatctgacttaacatcactatttcttatggacctgtctaaggtgcaaaggccacacaaagggatttgggggtgatacatagagatcatagtacatgtggagaaggttgactatctttggcatttgctggaccctcgatccatttctccttgttttgacaatgctgttatgacaaaatttacactgcattaccaggagctgggccaacatttaccatcctaatcaattgtagattcttagcaattcttgacatcattgtaataattgtattatgctgtaaattttttaatgaaataacatcactgaaatgacatttgcgttgataattgcatgtgggtaa

SEQ ID NO: 11863 - DNA, 1670 bp, Zea Mays
cactgtccggcaggctgtcgtcatccaccggccggcacattgtgcatgcacttgcgcatcggatcgcatcagctgctgcttttgtccaccaagcaactattccctttccttccgccgcccaaatgccctcgtgcccggcaccggcaccggcagtggccaccttcctcctcgtcgcgcttctctcgtgcggcacacgggccatccggacgcacggcggctatgtccccgccgggcgcggcccgcgtcacggacgccgacctctacgcgccggccaaggagctgtacctcggcgaccgctgccaggtggccgacaccccggcgccgtggcagttctggatggtcatgctcaagaacggcaacctcgacaccaccgccgccgcctgcccggagaacggccgccccgcgcgcccgttcccgcagacgtcccgcttcccgtgccccgccggcgccgggtgcatgaaccagccgctgctgttccacaaccgcaccgcgctggacgacgccggccgccggctccgcggcggcctgttcgggacctacgacctcgacgccgccgcgggtctcggcgccggcgacgtctccttctactccgtgacgtgggagaaggatgtggcggcgagcggtcgcggcggcgggtgggcattccaccacaagctgtgcacgtccaccaagtacccgtggctgatgctgtacctacggtccgacgccaccaggggcttctccggcgggtaccactacgacaccagaggcatgaccaagacacagggcggcgggcgcaacagccagttctacctgatggacatgggcagctgctggaagaacgacgggcgcgcctgcgacggcgacacggcgacggacgtgacgcggtacagcgagatgatcatcaacccggccacgccggcgtggtgctcgccgtcgcggatcgaccagtgcccgccatggcacaccttccggaacggcagccgcgtgcaccgccgcgacggagcccgcttcccctacggcgcctaccacgtgtactgctcccccgggaacgcggcgcgcgcggagcagcccaccacctactgcgacgcctacagcaacccgcaggcgcaggagatcctgcagctgctgccgcaccccgtgtggggagagttcggctacccgacggccaggggacaggggtgggtcggcgaccccagggcgtgggacctcgacgtcggcgccatgtcccaggcgctctacttctaccaggaccccggcacgccgccggccaggaggcggtggacgtcgctcgacgtcggcacggagatatacgtcagcgacagggccgaggaggcggagtggacgctcagtggcttcgacatccttgtgccggacaagtgtatcaagtcacagcaacgggccagcaacagctgctggtagacagacactttaatgtcactgtacgttacgctgagtagcatagcaggccaaagtgttcttcgtactagaagaggtggtgtaggatgactatattactcatgttagtactaactaactataaaaaataaaatgatgattaatcaacttatttcattccacaaaccaaacaaaaatagtgagaagatgatgaaatagattattcctcaaaccaaacatcttataagagctggtttaagaaccctatttttccaagagattttcattttttc

SEQ ID NO: 11864 - DNA, 1793 bp, Zea Mays
ctttttttttggatcttgccatatcccttgaggaatcaaatggattgccagcacgatatcgtgattcagtccgggcaattactcctggcctgcctcttttcctctataactacaccactcaccagcttcatggggtatttgaggctgccagttttggtgggtctaatattgatcccactgcatgggaggataagaagtgtaaaggtgaatctagattcccagcgcaggtgaggatccgcgttaggaagctgtgcaagccgttggaagaggattccttcaggccagttttgcaccactatgatggcccaaagtttcgcctcgagctctccatcgcggagaccctgtccctgctagacctatgcgagaaggaaggcatctgagctgttggctgcctcgtgaggttctagtaaatatcaatcatccttgtatgttctgtagatggtggttggcaatgttgtttatttttcaagcgcaagctgctgccggtctcgttttccctgtcctggatggaagcaaagggacctggtactttgaaggccccccctcaaacataagctgtgagcctgtcagtgcacgtgtccgccgttgtcgtcaagaaccaaaccaaatcatgaaatcttgcgccgacggagagttggagcgtgtatgttttgctatctctatctacatgtctcagtagagtggatataccctggggtccccaaaagatgggggcctgtatgtaacactacgtgtaatggttaaggtgaatgtgccgtgaggccccccaaaagttggagtgtgtatttttgttgtcaccttgaaccgactttgcgtatgcttttttttagtgctgctaccttctgcgctgtgtttggcttctggttcatgtttttgtaatataaggtggcttgcgcaacattgtgtctgtctgtccagccgcaggatctggatgggtttcggcaggtgcaccaaccagacagacttggtatggatggtgaatggttgcatctgttcaaccgctgtcggtcagtgacaggccaagtactagcagatttggttcagctgcttgctggtgagagcaaagtactagcagctttgaagtcgactagagggccttctaggtgttcaagcaataatgcattcgtataacccataataatgaaatggtagcagcctgtcaacattcattcttctactcgagaaattggatggttctggtgatgcttggcttggttgtggttgctcattttgcaatcaatcaaatcaactgaagtggtttgctcatttattgtaatgaaccaaatcaagtgaagggaggcattcttcgcaaaatctaatatacaggacggagaaggatgttacatctaagattgatggatgattatatattctccacattatttagctacccttttcttatacatgtaacttcgtttccaccttaattgaaaaggcatctaacttcctttctgtcttaattgaaggatagagcttttataatttgtttagagaaaaacaacaaaaagagaaatacatttatgcaaccttagaccgtcttcggcggatcatgtatatggatgtacaaaacactgtttttatactgtttaccgcatggagtttaagatagtgagcgagacagggagctgctggagttcgagtagttttgttattggcagagtgcttgaatcaagtatcaatgggcagttgagaaccaagatgtccggccagattgattgctcatgcttgagattttaagcgcccttgagcctccggtaactatagagtgcatctggtgactaacgagagaagct

SEQ ID NO: 11865 - DNA, 662 bp, Zea Mays
caggcatgaaaatttcagatgctgcaggcaagaaggtttatcactcttatcgatgagttgtacaaccaccactgccgccttatatgcctagctgcctcatccattgatgatctttttcaaggaactgaggaaggacctctttttgatttagagagttttcagtttgaaaccgagtccgaagggacaaagctgaggagggatgttttggcggaaggcaatgctggctcaggaccatctactaccggccttgtggcgatattgtctggtcaagaagagatgtttgcgttccgcagggcgatatcacggcttatcgagatgcagaccccgctgtatctggagcgtgtgctggctgtacatccctcgttccgtcgtcctggtcttgcaagaaataacaggcctgcagttcctcagcctgctccggcggtttgaggtttgacagcctcgcgctgtaccattgctttatttcgagtttcgtgtgacaaggcaataaaaccaaccagagatggtaacagtgagacattgtaaatgattgtagaaaggttgtgattattaataagttaaaatttactattttaaacttcaacaggttacacatactatctgtcatttcatcttatattttaaactttactctacgaacggtacagtctaccatttaaaac

SEQ ID NO: 11866 - DNA, 2775 bp, Zea Mays
aaataaacttcatgtagcaaagtttaagctaaaattagttatcacttgtttttttatcatagcttattaatgtattgattgtcatttacatgatgaattattttttatgttgatgttagcgggtatgggaaacccattgggtacccaaaacccgcatgggctttggtttgggcaaacttttatactcgtcatgggtatgagttttttagggggcgtatttttttcgcgggtatgggtttgggcaagtaatacccagcgggtttttacccattaccatctctatgtccaacacctattgttgacagttagccatatgaaaaatctgcactgcaatggcacccaattttttctccaaggcgaataattaatatttccctcaaagtaagtttcatatgtcgattcactgctatagatctcatcttgagaaaacttccaacgatgctgatctggtaccccatgctgaaggacaatgccacatacttggtcccgaatgaggatattccgtcaggacctgtactataatgctcccctgatgtcatccacccatctcctatagacaagggcctcagccaccgtcctattttttgtagctctttttaggattgttttcagcgggctaggcttgcctcggtttatcccttcccaaggcctcactcatgtgagagcctccggcactgggtctgtcaccttcagcaggttaggcgtcatttcagcaatggtcttcccattcagccacctgtcagtccgaattccaaaattgagttgattcaccatttcctacagaggtgacaacagcctaatcaaacaatacccgggtgttttgaggtacttcaattgttaaaccggccggcccaaggccttgtaggatcagtttatgtgcccaaagccatctagtttgcagggcccatccgaaaatttccagatcatgaatggccagacactacattttagtgggcgctgcacctttgcccaggacactaggcacttgcccccattggcttgcttccgccccttccaaaggaagcctcggtgcaatttgtccaattccttgttggcccattttggtagattggcaatcctgagatgaattggagaggctgccaagactaggggtggtaatggatcgtgatccaaatgattcttcataaaatggtagagctctaaataattttttagttaaaaaatgaatagaaatatggcccgatcctaatccgatctgatccttaaatcttatagtgcaaaatttagagcccattgtcacccctagtcaagaccacctcaacgagaattagacgcccaactttattcattagagaagctttccagcctgaaagatgatctgccactttatcaatcatgaactcagcaccttctttataggctttcggaatccaagatattatgacacttggtgtacaaatctgttgctttctccccatagagataaaccttgtcgttatcctgctcctttagaaataagactacataagttcagatcctggtataaagttaaagttatcaagctaaacagtgtgatccttatatgatctattttatatttatatatcttgacataaactagttagatatatatgtcagggttgatctcatctgactcggtcaaggggatcgagctagactcttatctcgcgtcctgatcgcaggcgcaacaaccttatggttacgaccctttcacgtcgcatatataaatacagggagagagaatcggcacgataaccaacgtttgtcgtagcctcctcttcccaacataccatgagatccgatcttctcctaagcacagttagtgaagtaaaggccgctgccgctacctcaccgttttgagttgagagtcatcaacctaatgatgtcgtcctccgatcccaaaggttcactatttttggcctgccacttctgatgctcgcagcatgtatgaggctatgtggcatgacataactgaccaatcaggagaaaatattgtttctgtcaccattcctgtaatgtttgggaggtctattgagattcctcaaagctgtaatggtgtcgcaaggtcggagcagcagattatatagcaatagctaggaactaccatacaattttcatatcagaaattccagcgatgagtatgaagatccgtgacaaggcaagaaggtttatcactcttatcgatgagttgtacaaccaccactgccgccttatatgcctagctgcctcatccattgatgatctttttcaaggaactgaggaaggacctctttttgatttagagagttttcagtttgaaaccgagtccgaagggacaaagctgaggagggatgttttggcggaaggcaatgctggctcaggaccatctactaccggccttgtggcgatattgtctggtcaagaagagatgtttgcgttccgcagggcgatatcacggcttatcgagatgcagaccccgctgtatctggagcgtgtgctggctgtacatccctcgttccgtcgtcctggtcttgcaagaaataacaggcctgcagttcctcagcctgctccggcggtttgaggtttgacagcctcgcgctgtaccattgctttatttcgagtttcgtgtgacaaggcaataaaaccaaccagagatggtaacagtgagacattgtaaatgattgtagaaaggttgtgattattaataagttaaaatttactattttaaacttcaacaggttacacatactatctgtcatttcatcttatattttaaactttactctacgaacggtacagtctaccatttaaaac

SEQ ID NO: 11867 - DNA, 1485 bp, Zea Mays
ctcaactctatctgttagctgttgtcgtagcatattcggacacacacacatctgtctgaagtcatttgcacaggccatgcttgaaatacatgatcatatgcatgatgtatggaagagacgtgatgatgacaaatctattcactcaagtgctttcagttggatatcaagccttccttttgacacaaaaattaaggagtggttgattggcgaagagaagtacaaacaacagacacaggaaaagcacatccttttggcagttgctgacaagtttttggttgatagacaggcaaataaaactggagcaagcattctatgctttgatgagatacagaccattgatgtttttgctgtggtagcactttctggcattctaagcaggctgttaagcacggggacagtacttgtagcaaccagtaataaagcaccagaagatctgaatcaggatgggatgcaaagggacatcttccttgagttattatcaaaattggatgaaagctgcaatgagattcttgtgggtactgaaaaggattatcgccgcctaattccgacagaaggctcaactgaggttcactatttttggcctgccacttctgatgctcgcagcatgtatgaggctatgtggcatgacataactgaccaatcaggagaaaatattgtttctgtcaccattcctgtaatgtttgggaggtctattgagattcctcaaagctgtaatggtgtcgcaaggtttgacttcgagtatctatgtggtcgcccagtcggagcagcagattatatagcaatagctaggaactaccatacaattttcatatcagaaattccagcgatgagtatgaagatccgtgacaaggcaagaaggtttatcactcttatcgatgagttgtacaaccaccactgccgccttatatgcctagctgcctcatccattgatgatctttttcaaggaactgaggaaggacctctttttgatttagagagttttcagtttgaaaccgagtccgaagggacaaagctgaggagggatgttttggcggaaggcaatgctggctcaggaccatctactaccggccttgtggcgatattgtctggtcaagaagagatgtttgcgttccgcagggcgatatcacggcttatcgagatgcagaccccgctgtatctggagcgtgtgctggctgtacatccctcgttccgtcgtcctggtcttgcaagaaataacaggcctgcagttcctcagcctgctccggcggtttgaggtttgacagcctcgcgctgtaccattgctttatttcgagtttcgtgtgacaaggcaataaaaccaaccagagatggtaacagtgagacattgtaaatgattgtagaaaggttgtgattattaataagttaaaatttactattttaaacttcaacaggttacacatactatctgtcatttcatcttatattttaaactttactctacgaacggtacagtctaccatttaaaac

SEQ ID NO: 11868 - DNA, 1465 bp, Zea Mays
tgccctacatttatgaaactaacggaagacaatgttgatggacatgttctatggggccactgaaggtgtcatcaaacacaggaggaggtttcactttcatgaggccatgcttgaaatacatgatcatatgcatgatgtatggaagagacgtgatgatgacaaatctattcactcaagtgctttcagttggatatcaagccttccttttgacacaaaaattaaggagtggttgattggcgaagagaagtacaaacaacagacacaggaaaagcacatccttttggcagttgctgacaagtttttggttgatagacaggcaaataaaactggagcaagcattctatgctttgatgagatacagaccattgatgtttttgctgtggtagcactttctggcattctaagcaggctgttaagcacggggacagtacttgtagcaaccagtaataaagcaccagaagatctgaatcaggatgggatgcaaagggacatcttccttgagttattatcaaaattggatgaaagctgcaatgagattcttgtgggttcactatttttggcctgccacttctgatgctcgcagcatgtatgaggctatgtggcatgacataactgaccaatcaggagaaaatattgtttctgtcaccattcctgtaatgtttgggaggtctattgagattcctcaaagctgtaatggtgtcgcaaggtttgacttcgagtatctatgtggtcgcccagtcggagcagcagattatatagcaatagctaggaactaccatacaattttcatatcagaaattccagcgatgagtatgaagatccgtgacaaggcaagaaggtttatcactcttatcgatgagttgtacaaccaccactgccgccttatatgcctagctgcctcatccattgatgatctttttcaaggaactgaggaaggacctctttttgatttagagagttttcagtttgaaaccgagtccgaagggacaaagctgaggagggatgttttggcggaaggcaatgctggctcaggaccatctactaccggccttgtggcgatattgtctggtcaagaagagatgtttgcgttccgcagggcgatatcacggcttatcgagatgcagaccccgctgtatctggagcgtgtgctggctgtacatccctcgttccgtcgtcctggtcttgcaagaaataacaggcctgcagttcctcagcctgctccggcggtttgaggtttgacagcctcgcgctgtaccattgctttatttcgagtttcgtgtgacaaggcaataaaaccaaccagagatggtaacagtgagacattgtaaatgattgtagaaaggttgtgattattaataagttaaaatttactattttaaacttcaacaggttacacatactatctgtcatttcatcttatattttaaactttactctacgaacggtacagtctaccatttaaaac

SEQ ID NO: 11869 - DNA, 1734 bp, Zea Mays
ttgccctacatttatgaaactaacggaagacaatgttgatggacatgttctatggggccactgaaggtgtcatcaaacacaggaggaggtttcactttcatgaggccatgcttgaaatacatgatcatatgcatgatgtatggaagagacgtgatgatgacaaatctattcactcaagtgctttcagttggatatcaagccttccttttgacacaaaaattaaggagtggttgattggcgaagagaagtacaaacaacagacacaggaaaagcacatccttttggcagttgctgacaagtttttggttgatagacaggcaaataaaactggagcaagcattctatgctttgatgagatacagaccattgatgtttttgctgtggtagcactttctggcattctaagcaggctgttaagcacggggacagtacttgtagcaaccagtaataaagcaccagaagatctgaatcaggatgggatgcaaagggacatcttccttgagttattatcaaaattggatgaaagctgcaatgagattcttgtgggtactgaaaaggattatcgccgcctaattccgacagaaggctcaactgaggttcactatttttggcctgccacttctgatgctcgcagcatgtatgaggctatgtggcatgacataactgaccaatcaggagaaaatattgtttctgtcaccattcctgtaatgtttgggaggtctattgagattcctcaaagctgtaatggtgtcgcaaggtttgacttcgagtatctatgtggtcgcccagtaatatctcaacctcatttcgtatctgtctgcagttcaagttagatggaaagaaaaatttattactgcagaatagcttatattattacttgcactatagctgatagtagtcaaatacataaacttaaatttcccaacagtagttccttttttattatatctgagagcatagtagctctttcgctaatacatcgatcacccctatactaatttctcaggtcggagcagcagattatatagcaatagctaggaactaccatacaattttcatatcagaaattccagcgatgagtatgaagatccgtgacaaggcaagaaggtttatcactcttatcgatgagttgtacaaccaccactgccgccttatatgcctagctgcctcatccattgatgatctttttcaaggaactgaggaaggacctctttttgatttagagagttttcagtttgaaaccgagtccgaagggacaaagctgaggagggatgttttggcggaaggcaatgctggctcaggaccatctactaccggccttgtggcgatattgtctggtcaagaagagatgtttgcgttccgcagggcgatatcacggcttatcgagatgcagaccccgctgtatctggagcgtgtgctggctgtacatccctcgttccgtcgtcctggtcttgcaagaaataacaggcctgcagttcctcagcctgctccggcggtttgaggtttgacagcctcgcgctgtaccattgctttatttcgagtttcgtgtgacaaggcaataaaaccaaccagagatggtaacagtgagacattgtaaatgattgtagaaaggttgtgattattaataagttaaaatttactattttaaacttcaacaggttacacatactatctgtcatttcatcttatattttaaactttactctacgaacggtacagtctaccatttaaaac

SEQ ID NO: 11870 - DNA, 1789 bp, Zea Mays
tttctctagctggcctacaaatgaggggtaaaatgcttctgttgggccattttgccctacatttatgaaactaacggaagacaatgttgatggacatgttctatggggccactgaaggtgtcatcaaacacaggaggaggtttcactttcatgaggccatgcttgaaatacatgatcatatgcatgatgtatggaagagacgtgatgatgacaaatctattcactcaagtgctttcagttggatatcaagccttccttttgacacaaaaattaaggagtggttgattggcgaagagaagtacaaacaacagacacaggaaaagcacatccttttggcagttgctgacaagtttttggttgatagacaggcaaataaaactggagcaagcattctatgctttgatgagatacagaccattgatgtttttgctgtggtagcactttctggcattctaagcaggctgttaagcacggggacagtacttgtagcaaccagtaataaagcaccagaagatctgaatcaggatgggatgcaaagggacatcttccttgagttattatcaaaattggatgaaagctgcaatgagattcttgtgggtactgaaaaggattatcgccgcctaattccgacagaaggctcaactgaggcgcaacaaccttatggttacgaccctttcacgtcgcatatataaatacagggagagagaatcggcacgataaccaacgtttgtcgtagcctcctcttcccaacataccatgagatccgatcttctcctaagcacagttagtgaagtaaaggccgctgccgctacctcaccgttttgagttgagagtcatcaacctaatgatgtcgtcctccgatcccaaaggttcactatttttggcctgccacttctgatgctcgcagcatgtatgaggctatgtggcatgacataactgaccaatcaggagaaaatattgtttctgtcaccattcctgtaatgtttgggaggtctattgagattcctcaaagctgtaatggtgtcgcaaggtttgacttcgagtatctatgtggtcgcccagtcggagcagcagattatatagcaatagctaggaactaccatacaattttcatatcagaaattccagcgatgagtatgaagatccgtgacaaggcaagaaggtttatcactcttatcgatgagttgtacaaccaccactgccgccttatatgcctagctgcctcatccattgatgatctttttcaaggaactgaggaaggacctctttttgatttagagagttttcagtttgaaaccgagtccgaagggacaaagctgaggagggatgttttggcggaaggcaatgctggctcaggaccatctactaccggccttgtggcgatattgtctggtcaagaagagatgtttgcgttccgcagggcgatatcacggcttatcgagatgcagaccccgctgtatctggagcgtgtgctggctgtacatccctcgttccgtcgtcctggtcttgcaagaaataacaggcctgcagttcctcagcctgctccggcggtttgaggtttgacagcctcgcgctgtaccattgctttatttcgagtttcgtgtgacaaggcaataaaaccaaccagagatggtaacagtgagacattgtaaatgattgtagaaaggttgtgattattaataagttaaaatttactattttaaacttcaacaggttacacatactatctgtcatttcatcttatattttaaactttactctacgaacggtacagtctaccatttaaaac

SEQ ID NO: 11871 - DNA, 1693 bp, Zea Mays
taacagctcaatatgcattacaatacatctgagcatgccaggagaagaagaggaagcatagaacctggagttggtaagtgggtctcgtacctgaaccgagagaagaaactagatacattggtaggccatagaccagtcgctcctgttgctcctaaaggattgtatctctatggaaatgttggaagtgggaagacaatgttgatggacatgttctatggggccactgaaggtgtcatcaaacacaggaggaggtttcactttcatgaggccatgcttgaaatacatgatcatatgcatgatgtatggaagagacgtgatgatgacaaatctattcactcaagtgctttcagttggatatcaagccttccttttgacacaaaaattaaggagtggttgattggcgaagagaagtacaaacaacagacacaggaaaagcacatccttttggcagttgctgacaagtttttggttgatagacaggcaaataaaactggagcaagcattctatgctttgatgagatacagaccattgatgtttttgctgtggtagcactttctggcattctaagcaggctgttaagcacggggacagtacttgtagcaaccagtaataaagcaccagaagatctgaatcaggatgggatgcaaagggacatcttccttgagttattatcaaaattggatgaaagctgcaatgagattcttgtgggtactgaaaaggattatcgccgcctaattccgacagaaggctcaactgaggttcactatttttggcctgccacttctgatgctcgcagcatgtatgaggctatgtggcatgacataactgaccaatcaggagaaaatattgtttctgtcaccattcctgtaatgtttgggagttgcatgttgacaggtctattgagattcctcaaagctgtaatggtgtcgcaaggtttgacttcgagtatctatgtggtcgcccagtcggagcagcagattatatagcaatagctaggaactaccatacaattttcatatcagaaattccagcgatgagtatgaagatccgtgacaaggcaagaaggtttatcactcttatcgatgagttgtacaaccaccactgccgccttatatgcctagctgcctcatccattgatgatctttttcaaggaactgaggaaggacctctttttgatttagagagttttcagtttgaaaccgagtccgaagggacaaagctgaggagggatgttttggcggaaggcaatgctggctcaggaccatctactaccggccttgtggcgatattgtctggtcaagaagagatgtttgcgttccgcagggcgatatcacggcttatcgagatgcagaccccgctgtatctggagcgtgtgctggctgtacatccctcgttccgtcgtcctggtcttgcaagaaataacaggcctgcagttcctcagcctgctccggcggtttgaggtttgacagcctcgcgctgtaccattgctttatttcgagtttcgtgtgacaaggcaataaaaccaaccagagatggtaacagtgagacattgtaaatgattgtagaaaggttgtgattattaataagttaaaatttactattttaaacttcaacaggttacacatactatctgtcatttcatcttatattttaaactttactctacgaacggtacagtctaccatttaaaac

SEQ ID NO: 11872 - DNA, 1760 bp, Zea Mays
gagcgctgctgttactcctcagctcctgcaagaatattaacagctcaatatgcattacaatacatctgagcatgccaggagaagaagaggaagcatagaacctggagttggtaagtgggtctcgtacctgaaccgagagaagaaactagatacattggtaggccatagaccagtcgctcctgttgctcctaaaggattgtatctctatggaaatgttggaagtgtttctctagctggcctacaaatgaggggtaaaatgcttctgttgggccattttgccctacatttatgaaactaacggaagacaatgttgatggacatgttctatggggccactgaaggtgtcatcaaacacaggaggaggtttcactttcatgaggccatgcttgaaatacatgatcatatgcatgatgtatggaagagacgtgatgatgacaaatctattcactcaagtgctttcagttggatatcaagccttccttttgacacaaaaattaaggagtggttgattggcgaagagaagtacaaacaacagacacaggaaaagcacatccttttggcagttgctgacaagtttttggttgatagacaggcaaataaaactggagcaagcattctatgctttgatgagatacagaccattgatgtttttgctgtggtagcactttctggcattctaagcaggctgttaagcacggggacagtacttgtagcaaccagtaataaagcaccagaagatctgaatcaggatgggatgcaaagggacatcttccttgagttattatcaaaattggatgaaagctgcaatgagattcttgtgggtactgaaaaggattatcgccgcctaattccgacagaaggctcaactgaggttcactatttttggcctgccacttctgatgctcgcagcatgtatgaggctatgtggcatgacataactgaccaatcaggagaaaatattgtttctgtcaccattcctgtaatgtttgggaggtctattgagattcctcaaagctgtaatggtgtcgcaaggtcggagcagcagattatatagcaatagctaggaactaccatacaattttcatatcagaaattccagcgatgagtatgaagatccgtgacaaggcaagaaggtttatcactcttatcgatgagttgtacaaccaccactgccgccttatatgcctagctgcctcatccattgatgatctttttcaaggaactgaggaaggacctctttttgatttagagagttttcagtttgaaaccgagtccgaagggacaaagctgaggagggatgttttggcggaaggcaatgctggctcaggaccatctactaccggccttgtggcgatattgtctggtcaagaagagatgtttgcgttccgcagggcgatatcacggcttatcgagatgcagaccccgctgtatctggagcgtgtgctggctgtacatccctcgttccgtcgtcctggtcttgcaagaaataacaggcctgcagttcctcagcctgctccggcggtttgaggtttgacagcctcgcgctgtaccattgctttatttcgagtttcgtgtgacaaggcaataaaaccaaccagagatggtaacagtgagacattgtaaatgattgtagaaaggttgtgattattaataagttaaaatttactattttaaacttcaacaggttacacatactatctgtcatttcatcttatattttaaactttactctacgaacggtacagtctaccatttaaaac

SEQ ID NO: 11873 - DNA, 1732 bp, Zea Mays
aaaccatccatggatggagcgctgctgttactcctcagctcctgcaagaatattaacagctcaatatgcattacaatacatctgagcatgccaggagaagaagaggaagcatagaacctggagttggtaagtgggtctcgtacctgaaccgagagaagaaactagatacattggtaggccatagaccagtcgctcctgttgctcctaaaggattgtatctctatggaaatgttggaagtgggaagacaatgttgatggacatgttctatggggccactgaaggtgtcatcaaacacaggaggaggtttcactttcatgaggccatgcttgaaatacatgatcatatgcatgatgtatggaagagacgtgatgatgacaaatctattcactcaagtgctttcagttggatatcaagccttccttttgacacaaaaattaaggagtggttgattggcgaagagaagtacaaacaacagacacaggaaaagcacatccttttggcagttgctgacaagtttttggttgatagacaggcaaataaaactggagcaagcattctatgctttgatgagatacagaccattgatgtttttgctgtggtagcactttctggcattctaagcaggctgttaagcacggggacagtacttgtagcaaccagtaataaagcaccagaagatctgaatcaggatgggatgcaaagggacatcttccttgagttattatcaaaattggatgaaagctgcaatgagattcttgtgggtactgaaaaggattatcgccgcctaattccgacagaaggctcaactgaggttcactatttttggcctgccacttctgatgctcgcagcatgtatgaggctatgtggcatgacataactgaccaatcaggagaaaatattgtttctgtcaccattcctgtaatgtttgggaggtctattgagattcctcaaagctgtaatggtgtcgcaaggtttgacttcgagtatctatgtggtcgcccagtcggagcagcagattatatagcaatagctaggaactaccatacaattttcatatcagaaattccagcgatgagtatgaagatccgtgacaaggcaagaaggtttatcactcttatcgatgagttgtacaaccaccactgccgccttatatgcctagctgcctcatccattgatgatctttttcaaggaactgaggaaggacctctttttgatttagagagttttcagtttgaaaccgagtccgaagggacaaagctgaggagggatgttttggcggaaggcaatgctggctcaggaccatctactaccggccttgtggcgatattgtctggtcaagaagagatgtttgcgttccgcagggcgatatcacggcttatcgagatgcagaccccgctgtatctggagcgtgtgctggctgtacatccctcgttccgtcgtcctggtcttgcaagaaataacaggcctgcagttcctcagcctgctccggcggtttgaggtttgacagcctcgcgctgtaccattgctttatttcgagtttcgtgtgacaaggcaataaaaccaaccagagatggtaacagtgagacattgtaaatgattgtagaaaggttgtgattattaataagttaaaatttactattttaaacttcaacaggttacacatactatctgtcatttcatcttatattttaaactttactctacgaacggtacagtctaccatttaaaac

SEQ ID NO: 11874 - DNA, 3348 bp, Zea Mays
cgttttctctggtacctaataagcatatatcctttggggacatacctgaaacttgtatccagaaggagtgaatggggtagctttcttgccacctttagaaagtccatttgattattttctcttggacaggacaggcagtgagatgagctgcgtcaagcaagcactgccagtgccagcagcagatataagcagaaggcaggtgatgcgaatggccgtccgtccatggcgttgcccattgagcattcctcaaggccgaccctggggtttcccttggggacggccctcttgctcctcgtgatctttgccctgagtggcatgttctcgtgctgctaccactgggacaagctccgctccctcctccggtctcggcatccaggcatgttccaggagggcacctccgtcgcgtcctcgccgagcaagacgacctgtgatcacaagctggacagagcgtgtggtttgcccgttatcatgcctggggacaaggtccccaggttcttcgcgaggccctgccctcacgagacgtctttgtgtttgccccaagctgcagagaagacggctggagttccgtcggagaccagatcatgcatgagccgtccgtcagtatctgtataaacacctgcatgacgcagttagctgttacggtgaccgactgtgtgtgtatatcatatgcttttggtaatacaatacaaagtgtgcaaacattccacttgtgatatatactatatacaagatttagacagtgttaggacttattcgttttgttctcaatctatgtgtaatagatgagattgagtgagtttaaattctaaacaagtcaaaatctttcataatttttttaataccatcaactccatatgccaaacaaacctggtgcactgcatgctcgtgtggaaataatcgtgcttgttgatgggcaaccaaatgagcccacgggcccagctacttcctctcggcccacgcgttcgcggtcagcaaggacgccgcgtcaccttccctccctgacccgacaaaccaacgccgcgtactcctctctactctctgccccgccaccaagctcgaccgaccgatgatcctcagccgcctgcatgtccgtgtcacccgccgatcccccgcgtccgccgccctccgcgatgcggcaacgcgcgccttggcctccgcgggcctcttccgtggcctccacggcggcgcctcctccgagcacggccgcgaacccgcaggtcctcttacgctctacaggaagctagtgagccaagggaagctcacgcatgatagttaccaggaaaatgtagcttccgaattagacaacctacttagtaggcttcaacggtacgagatggaaatggaggattatcatgacaagctgtacttctgggagaatagcagggagaaagagcggcgcaggcttcttgtcgaagaagctgaagataagcagcgtggtggtgtatggattgatgagagaaggggatttcttgacaagttggttgcacggagaagaagaggaagcatagaacctggagttggtaagtgggtctcgtacctgaaccgagagaagaaactagatacattggtaggccatagaccagtcgctcctgttgctcctaaaggattgtatctctatggaaatgttggaagtgggaagacaatgttgatggacatgttctatggggccactgaaggtgtcatcaaacacaggaggaggtttcactttcatgaggccatgcttgaaatacatgatcatatgcatgatgtatggaagagacgtgatgatgacaaatctattcactcaagtgctttcagttggatatcaagccttccttttgacacaaaaattaaggagtggttgattggcgaagagaagtacaaacaacagacacaggaaaagcacatccttttggcagttgctgacaagtttttggttgatagacaggcaaataaaactggagcaagcattctatgctttgatgagatacagaccattgatgtttttgctgtggtagcactttctggcattctaagcaggctgttaagcacggggacagtacttgtagcaaccagtaataaagcaccagaagatctgaatcaggatgggatgcaaagggacatcttccttgagttattatcaaaattggatgaaagctgcaatgagattcttgtgggtactgaaaaggattatcgccgcctaattccgacagaaggctcaactgaggcgcaacaaccttatggttacgaccctttcacgtcgcatatataaatacagggagagagaatcggcacgataaccaacgtttgtcgtagcctcctcttcccaacataccatgagatccgatcttctcctaagcacagttagtgaagtaaaggccgctgccgctacctcaccgttttgagttgagagtcatcaacctaatgatgtcgtcctccgatcccaaaggttcactatttttggcctgccacttctgatgctcgcagcatgtatgaggctatgtggcatgacataactgaccaatcaggagaaaatattgtttctgtcaccattcctgtaatgtttgggaggtctattgagattcctcaaagctgtaatggtgtcgcaaggtttgacttcgagtatctatgtggtcgcccagtcggagcagcagattatatagcaatagctaggaactaccatacaattttcatatcagaaattccagcgatgagtatgaagatccgtgacaaggcaagaaggtttatcactcttatcgatgagttgtacaaccaccactgccgccttatatgcctagctgcctcatccattgatgatctttttcaaggaactgaggaaggacctctttttgatttagagagttttcagtttgaaaccgagtccgaagggacaaagctgaggagggatgttttggcggaaggcaatgctggctcaggaccatctactaccggccttgtggcgatattgtctggtcaagaagagatgtttgcgttccgcagggcgatatcacggcttatcgagatgcagaccccgctgtatctggagcgtgtgctggctgtacatccctcgttccgtcgtcctggtcttgcaagaaataacaggcctgcagttcctcagcctgctccggcggtttgaggtttgacagcctcgcgctgtaccattgctttatttcgagtttcgtgtgacaaggcaataaaaccaaccagagatggtaacagtgagacattgtaaatgattgtagaaaggttgtgattattaataagttaaaatttactattttaaacttcaacaggttacacatactatctgtcatttcatcttatattttaaactttactctacgaacggtacagtctaccatttaaaac

SEQ ID NO: 11875 - DNA, 3107 bp, Zea Mays
cgttttctctggtacctaataagcatatatcctttggggacatacctgaaacttgtatccagaaggagtgaatggggtagctttcttgccacctttagaaagtccatttgattattttctcttggacaggacaggcagtgagatgagctgcgtcaagcaagcactgccagtgccagcagcagatataagcagaaggcaggtgatgcgaatggccgtccgtccatggcgttgcccattgagcattcctcaaggccgaccctggggtttcccttggggacggccctcttgctcctcgtgatctttgccctgagtggcatgttctcgtgctgctaccactgggacaagctccgctccctcctccggtctcggcatccaggcatgttccaggagggcacctccgtcgcgtcctcgccgagcaagacgacctgtgatcacaagctggacagagcgtgtggtttgcccgttatcatgcctggggacaaggtccccaggttcttcgcgaggccctgccctcacgagacgtctttgtgtttgccccaagctgcagagaagacggctggagttccgtcggagaccagatcatgcatgagccgtccgtcagtatctgtataaacacctgcatgacgcagttagctgttacggtgaccgactgtgtgtgtatatcatatgcttttggtaatacaatacaaagtgtgcaaacattccacttgtgatatatactatatacaagatttagacagtgttaggacttattcgttttgttctcaatctatgtgtaatagatgagattgagtgagtttaaattctaaacaagtcaaaatctttcataatttttttaataccatcaactccatatgccaaacaaacctggtgcactgcatgctcgtgtggaaataatcgtgcttgttgatgggcaaccaaatgagcccacgggcccagctacttcctctcggcccacgcgttcgcggtcagcaaggacgccgcgtcaccttccctccctgacccgacaaaccaacgccgcgtactcctctctactctctgccccgccaccaagctcgaccgaccgatgatcctcagccgcctgcatgtccgtgtcacccgccgatcccccgcgtccgccgccctccgcgatgcggcaacgcgcgccttggcctccgcgggcctcttccgtggcctccacggcggcgcctcctccgagcacggccgcgaacccgcaggaagctagtgagccaagggaagctcacgcatgatagttaccaggaaaatgtagcttccgaattagacaacctacttagtaggcttcaacggtacgagatggaaatggaggattatcatgacaagctgtacttctgggagaatagcagggagaaagagcggcgcaggcttcttgtcgaagaagctgaagataagcagcgtggtggtgtatggattgatgagagaaggggatttcttgacaagttggttgcacggagaagaagaggaagcatagaacctggagttggtaagtgggtctcgtacctgaaccgagagaagaaactagatacattggtaggccatagaccagtcgctcctgttgctcctaaaggattgtatctctatggaaatgttggaagtgggaagacaatgttgatggacatgttctatggggccactgaaggtgtcatcaaacacaggaggaggtttcactttcatgaggccatgcttgaaatacatgatcatatgcatgatgtatggaagagacgtgatgatgacaaatctattcactcaagtgctttcagttggatatcaagccttccttttgacacaaaaattaaggagtggttgattggcgaagagaagtacaaacaacagacacaggaaaagcacatccttttggcagttgctgacaagtttttggttgatagacaggcaaataaaactggagcaagcattctatgctttgatgagatacagaccattgatgtttttgctgtggtagcactttctggcattctaagcaggctgttaagcacggggacagtacttgtagcaaccagtaataaagcaccagaagatctgaatcaggatgggatgcaaagggacatcttccttgagttattatcaaaattggatgaaagctgcaatgagattcttgtgggtactgaaaaggattatcgccgcctaattccgacagaaggctcaactgaggttcactatttttggcctgccacttctgatgctcgcagcatgtatgaggctatgtggcatgacataactgaccaatcaggagaaaatattgtttctgtcaccattcctgtaatgtttgggaggtctattgagattcctcaaagctgtaatggtgtcgcaaggtttgacttcgagtatctatgtggtcgcccagtcggagcagcagattatatagcaatagctaggaactaccatacaattttcatatcagaaattccagcgatgagtatgaagatccgtgacaaggcaagaaggtttatcactcttatcgatgagttgtacaaccaccactgccgccttatatgcctagctgcctcatccattgatgatctttttcaaggaactgaggaaggacctctttttgatttagagagttttcagtttgaaaccgagtccgaagggacaaagctgaggagggatgttttggcggaaggcaatgctggctcaggaccatctactaccggccttgtggcgatattgtctggtcaagaagagatgtttgcgttccgcagggcgatatcacggcttatcgagatgcagaccccgctgtatctggagcgtgtgctggctgtacatccctcgttccgtcgtcctggtcttgcaagaaataacaggcctgcagttcctcagcctgctccggcggtttgaggtttgacagcctcgcgctgtaccattgctttatttcgagtttcgtgtgacaaggcaataaaaccaaccagagatggtaacagtgagacattgtaaatgattgtagaaaggttgtgattattaataagttaaaatttactattttaaacttcaacaggttacacatactatctgtcatttcatcttatattttaaactttactctacgaacggtacagtctaccatttaaaac

SEQ ID NO: 11876 - DNA, 3274 bp, Zea Mays
cgttttctctggtacctaataagcatatatcctttggggacatacctgaaacttgtatccagaaggagtgaatggggtagctttcttgccacctttagaaagtccatttgattattttctcttggacaggacaggcagtgagatgagctgcgtcaagcaagcactgccagtgccagcagcagatataagcagaaggcaggtgatgcgaatggccgtccgtccatggcgttgcccattgagcattcctcaaggccgaccctggggtttcccttggggacggccctcttgctcctcgtgatctttgccctgagtggcatgttctcgtgctgctaccactgggacaagctccgctccctcctccggtctcggcatccaggcatgttccaggagggcacctccgtcgcgtcctcgccgagcaagacgacctgtgatcacaagctggacagagcgtgtggtttgcccgttatcatgcctggggacaaggtccccaggttcttcgcgaggccctgccctcacgagacgtctttgtgtttgccccaagctgcagagaagacggctggagttccgtcggagaccagatcatgcatgagccgtccgtcagtatctgtataaacacctgcatgacgcagttagctgttacggtgaccgactgtgtgtgtatatcatatgcttttggtaatacaatacaaagtgtgcaaacattccacttgtgatatatactatatacaagatttagacagtgttaggacttattcgttttgttctcaatctatgtgtaatagatgagattgagtgagtttaaattctaaacaagtcaaaatctttcataatttttttaataccatcaactccatatgccaaacaaacctggtgcactgcatgctcgtgtggaaataatcgtgcttgttgatgggcaaccaaatgagcccacgggcccagctacttcctctcggcccacgcgttcgcggtcagcaaggacgccgcgtcaccttccctccctgacccgacaaaccaacgccgcgtactcctctctactctctgccccgccaccaagctcgaccgaccgatgatcctcagccgcctgcatgtccgtgtcacccgccgatcccccgcgtccgccgccctccgcgatgcggcaacgcgcgccttggcctccgcgggcctcttccgtggcctccacggcggcgcctcctccgagcacggccgcgaacccgcaggtcctcttacgctctacaggaagctagtgagccaagggaagctcacgcatgatagttaccaggaaaatgtagcttccgaattagacaacctacttagtaggcttcaacggtacgagatggaaatggaggattatcatgacaagctgtacttctgggagaatagcagggagaaagagcggcgcaggcttcttgtcgaagaagctgaagataagcagcgtggtggtgtatggattgatgagagaaggggatttcttgacaagttggttgcacggagaagaagaggaagcatagaacctggagttggtaagtgggtctcgtacctgaaccgagagaagaaactagatacattggtaggccatagaccagtcgctcctgttgctcctaaaggattgtatctctatggaaatgttggaagtggtaagctacctgattgttgctcatgttcgaaagaagcactttctaatcttgttggttccattttgtctattagtttctctagctggcctacaaatgaggggtaaaatgcttctgttgggccattttgccctacatttatgaaactaacggaagacaatgttgatggacatgttctatggggccactgaaggtgtcatcaaacacaggaggaggtttcactttcatgaggccatgcttgaaatacatgatcatatgcatgatgtatggaagagacgtgatgatgacaaatctattcactcaagtgctttcagttggatatcaagccttccttttgacacaaaaattaaggagtggttgattggcgaagagaagtacaaacaacagacacaggaaaagcacatccttttggcagttgctgacaagtttttggttgatagacaggcaaataaaactggagcaagcattctatgctttgatgagatacagaccattgatgtttttgctgtggtagcactttctggcattctaagcaggctgttaagcacggggacagtacttgtagcaaccagtaataaagcaccagaagatctgaatcaggatgggatgcaaagggacatcttccttgagttattatcaaaattggatgaaagctgcaatgagattcttgtgggtactgaaaaggattatcgccgcctaattccgacagaaggctcaactgaggttcactatttttggcctgccacttctgatgctcgcagcatgtatgaggctatgtggcatgacataactgaccaatcaggagaaaatattgtttctgtcaccattcctgtaatgtttgggaggtctattgagattcctcaaagctgtaatggtgtcgcaaggtttgacttcgagtatctatgtggtcgcccagtcggagcagcagattatatagcaatagctaggaactaccatacaattttcatatcagaaattccagcgatgagtatgaagatccgtgacaaggcaagaaggtttatcactcttatcgatgagttgtacaaccaccactgccgccttatatgcctagctgcctcatccattgatgatctttttcaaggaactgaggaaggacctctttttgatttagagagttttcagtttgaaaccgagtccgaagggacaaagctgaggagggatgttttggcggaaggcaatgctggctcaggaccatctactaccggccttgtggcgatattgtctggtcaagaagagatgtttgcgttccgcagggcgatatcacggcttatcgagatgcagaccccgctgtatctggagcgtgtgctggctgtacatccctcgttccgtcgtcctggtcttgcaagaaataacaggcctgcagttcctcagcctgctccggcggtttgaggtttgacagcctcgcgctgtaccattgctttatttcgagtttcgtgtgacaaggcaataaaaccaaccagagatggtaacagtgagacattgtaaatgattgtagaaaggttgtgattattaataagttaaaatttactattttaaacttcaacaggttacacatactatctgtcatttcatcttatattttaaactttactctacgaacggtacagtctaccatttaaaac

SEQ ID NO: 11877 - DNA, 3330 bp, Zea Mays
cgttttctctggtacctaataagcatatatcctttggggacatacctgaaacttgtatccagaaggagtgaatggggtagctttcttgccacctttagaaagtccatttgattattttctcttggacaggacaggcagtgagatgagctgcgtcaagcaagcactgccagtgccagcagcagatataagcagaaggcaggtgatgcgaatggccgtccgtccatggcgttgcccattgagcattcctcaaggccgaccctggggtttcccttggggacggccctcttgctcctcgtgatctttgccctgagtggcatgttctcgtgctgctaccactgggacaagctccgctccctcctccggtctcggcatccaggcatgttccaggagggcacctccgtcgcgtcctcgccgagcaagacgacctgtgatcacaagctggacagagcgtgtggtttgcccgttatcatgcctggggacaaggtccccaggttcttcgcgaggccctgccctcacgagacgtctttgtgtttgccccaagctgcagagaagacggctggagttccgtcggagaccagatcatgcatgagccgtccgtcagtatctgtataaacacctgcatgacgcagttagctgttacggtgaccgactgtgtgtgtatatcatatgcttttggtaatacaatacaaagtgtgcaaacattccacttgtgatatatactatatacaagatttagacagtgttaggacttattcgttttgttctcaatctatgtgtaatagatgagattgagtgagtttaaattctaaacaagtcaaaatctttcataatttttttaataccatcaactccatatgccaaacaaacctggtgcactgcatgctcgtgtggaaataatcgtgcttgttgatgggcaaccaaatgagcccacgggcccagctacttcctctcggcccacgcgttcgcggtcagcaaggacgccgcgtcaccttccctccctgacccgacaaaccaacgccgcgtactcctctctactctctgccccgccaccaagctcgaccgaccgatgatcctcagccgcctgcatgtccgtgtcacccgccgatcccccgcgtccgccgccctccgcgatgcggcaacgcgcgccttggcctccgcgggcctcttccgtggcctccacggcggcgcctcctccgagcacggccgcgaacccgcaggtcctcttacgctctacaggaagctagtgagccaagggaagctcacgcatgatagttaccaggaaaatgtagcttccgaattagacaacctacttagtaggcttcaacggtacgagatggaaatggaggattatcatgacaagctgtacttctgggagaatagcagggagaaagagcggcgcaggcttcttgtcgaagaagctgaagataagcagcgtggtggtgtatggattgatgagagaaggggatttcttgacaagttggttgcacggagaagaagaggaagcatagaacctggagttggtaagtgggtctcgtacctgaaccgagagaagaaactagatacattggtaggccatagaccagtcgctcctgttgctcctaaaggattgtatctctatggaaatgttggaagtggtaagctacctgattgttgctcatgttcgaaagaagcactttctaatcttgttggttccattttgtctattagtttctctagctggcctacaaatgaggggtaaaatgcttctgttgggccattttgccctacatttatgaaactaacgtgagcaagtaaccgtgttgatattttacgtcttctgaaatattattctgtcacctgtactaatctcaaggcacaacttgtacacagggaagacaatgttgatggacatgttctatggggccactgaaggtgtcatcaaacacaggaggaggtttcactttcatgaggccatgcttgaaatacatgatcatatgcatgatgtatggaagagacgtgatgatgacaaatctattcactcaagtgctttcagttggatatcaagccttccttttgacacaaaaattaaggagtggttgattggcgaagagaagtacaaacaacagacacaggaaaagcacatccttttggcagttgctgacaagtttttggttgatagacaggcaaataaaactggagcaagcattctatgctttgatgagatacagaccattgatgtttttgctgtggtagcactttctggcattctaagcaggctgttaagcacggggacagtacttgtagcaaccagtaataaagcaccagaagatctgaatcaggatgggatgcaaagggacatcttccttgagttattatcaaaattggatgaaagctgcaatgagattcttgtgggtactgaaaaggattatcgccgcctaattccgacagaaggctcaactgaggttcactatttttggcctgccacttctgatgctcgcagcatgtatgaggctatgtggcatgacataactgaccaatcaggagaaaatattgtttctgtcaccattcctgtaatgtttgggaggtctattgagattcctcaaagctgtaatggtgtcgcaaggtcggagcagcagattatatagcaatagctaggaactaccatacaattttcatatcagaaattccagcgatgagtatgaagatccgtgacaaggcaagaaggtttatcactcttatcgatgagttgtacaaccaccactgccgccttatatgcctagctgcctcatccattgatgatctttttcaaggaactgaggaaggacctctttttgatttagagagttttcagtttgaaaccgagtccgaagggacaaagctgaggagggatgttttggcggaaggcaatgctggctcaggaccatctactaccggccttgtggcgatattgtctggtcaagaagagatgtttgcgttccgcagggcgatatcacggcttatcgagatgcagaccccgctgtatctggagcgtgtgctggctgtacatccctcgttccgtcgtcctggtcttgcaagaaataacaggcctgcagttcctcagcctgctccggcggtttgaggtttgacagcctcgcgctgtaccattgctttatttcgagtttcgtgtgacaaggcaataaaaccaaccagagatggtaacagtgagacattgtaaatgattgtagaaaggttgtgattattaataagttaaaatttactattttaaacttcaacaggttacacatactatctgtcatttcatcttatattttaaactttactctacgaacggtacagtctaccatttaaaac

SEQ ID NO: 11878 - DNA, 3502 bp, Zea Mays
cgttttctctggtacctaataagcatatatcctttggggacatacctgaaacttgtatccagaaggagtgaatggggtagctttcttgccacctttagaaagtccatttgattattttctcttggacaggacaggcagtgagatgagctgcgtcaagcaagcactgccagtgccagcagcagatataagcagaaggcaggtgatgcgaatggccgtccgtccatggcgttgcccattgagcattcctcaaggccgaccctggggtttcccttggggacggccctcttgctcctcgtgatctttgccctgagtggcatgttctcgtgctgctaccactgggacaagctccgctccctcctccggtctcggcatccaggcatgttccaggagggcacctccgtcgcgtcctcgccgagcaagacgacctgtgatcacaagctggacagagcgtgtggtttgcccgttatcatgcctggggacaaggtccccaggttcttcgcgaggccctgccctcacgagacgtctttgtgtttgccccaagctgcagagaagacggctggagttccgtcggagaccagatcatgcatgagccgtccgtcagtatctgtataaacacctgcatgacgcagttagctgttacggtgaccgactgtgtgtgtatatcatatgcttttggtaatacaatacaaagtgtgcaaacattccacttgtgatatatactatatacaagatttagacagtgttaggacttattcgttttgttctcaatctatgtgtaatagatgagattgagtgagtttaaattctaaacaagtcaaaatctttcataatttttttaataccatcaactccatatgccaaacaaacctggtgcactgcatgctcgtgtggaaataatcgtgcttgttgatgggcaaccaaatgagcccacgggcccagctacttcctctcggcccacgcgttcgcggtcagcaaggacgccgcgtcaccttccctccctgacccgacaaaccaacgccgcgtactcctctctactctctgccccgccaccaagctcgaccgaccgatgatcctcagccgcctgcatgtccgtgtcacccgccgatcccccgcgtccgccgccctccgcgatgcggcaacgcgcgccttggcctccgcgggcctcttccgtggcctccacggcggcgcctcctccgagcacggccgcgaacccgcaggtcctcttacgctctacaggaagctagtgagccaagggaagctcacgcatgatagttaccaggaaaatgtagcttccgaattagacaacctacttagtaggcttcaacggtacgagatggaaatggaggattatcatgacaagctgtacttctgggagaatagcagggagaaagagcggcgcaggcttcttgtcgaagaagctgaagataagcagcgtggtggtgtatggattgatgagagaaggggatttcttgacaagttggttgcacggagaagaagaggaagcatagaacctggagttggtaagtgggtctcgtacctgaaccgagagaagaaactagatacattggtaggccatagaccagtcgctcctgttgctcctaaaggattgtatctctatggaaatgttggaagtgggaagacaatgttgatggacatgttctatggggccactgaaggtgtcatcaaacacaggaggaggtttcactttcatgaggccatgcttgaaatacatgatcatatgcatgatgtatggaagagacgtgatgatgacaaatctattcactcaagtgctttcagttggatatcaagccttccttttgacacaaaaattaaggagtggttgattggcgaagagaagtacaaacaacagacacaggaaaagcacatccttttggcagttgctgacaagtttttggttgatagacaggcaaataaaactggagcaagcattctatgctttgatgagatacagaccattgatgtttttgctgtggtagcactttctggcattctaagcaggctgttaagcacggggacagtacttgtagcaaccagtaataaagcaccagaagatctgaatcaggatgggatgcaaagggacatcttccttgagttattatcaaaattggatgaaagctgcaatgagattcttgtgggtactgaaaaggattatcgccgcctaattccgacagaaggctcaactgaggcgcaacaaccttatggttacgaccctttcacgtcgcatatataaatacagggagagagaatcggcacgataaccaacgtttgtcgtagcctcctcttcccaacataccatgagatccgatcttctcctaagcacagttagtgaagtaaaggccgctgccgctacctcaccgttttgagttgagagtcatcaacctaatgatgtcgtcctccgatcccaaaggtataatctattagtttctatgcatctagtggctagggttgtgggtacaaggtcctagtttctctaacaatatcctcttctaagcacctgcagatttactcactatccgttgtatttattattccctgtattatctgtcatattatgttttttttgaaacgaaccagacaggagagctgccgattatattaataaaggagaaggatccggatcggacagagcaacaaaacaacatgcggttggattgggacaccaacacgccaaactcaccggttggattgggacatcaacccggcacaacactcaccgcttacagaatgcacaaacatccccgataacgggagcccctcacacacaacccatccagagttatcgttgccgagctcgacccaagggacaagcagctccgactccgcaaaacgggccgcacatggccaaagaaaacacgacaacacctacaaccaaacacaccagcatagaaggagaaagatcacagtgcgtcgtcgttgccaagcctcaacacaccccacgtgagacaactccgattcttcaccaatgagcttgaacctccgtcctacccccagtagatgcacgacccttcgaaacaatccagtccacgaagaagggggcttgtcagctgtcatcgttgtcgagccacaacccctgatgcagcagcttcgacttcaccttgcaaagccccatcttcacccgcataccagacgccgagaatcaaaagcaaccatcgaaggcgaagctgaggccgacaaacttcaatgcgacgccttcaggaagggagtgacatcggggacgtcaccatcgcgagtacgagatggaccaggctttcgcccaaggaagaaaatgttggggaatacgacgcccccaacaggggaagcggcgtgtcgccgtcgccgaggctctcgcccaagaagcccctagcaccaacgtcaggccaagagctaccgtcgtcgccgtcctccataccatatgcgtcacacaggcacgtgctagagccgcacccagcagccgatggcactagcacacacggccaccgaatctagatgtcgccgagcaccc

SEQ ID NO: 11879 - DNA, 710 bp, Zea Mays
ggccattttgccctacatttatgaaactaacggaagacaatgttgatggacatgttctatggggccactgaaggtgtcatcaaacacaggaggaggtttcactttcatgaggccatgcttgaaatacatgatcatatgcatgatgtatggaagagacgtgatgatgacaaatctattcactcaagtgctttcagttggatatcaagccttccttttgacacaaaaattaaggagtggttgattggcgaagagaagtacaaacaacagacacaggaaaagcacatccttttggcagttgctgacaagtttttggttgatagacaggcaaataaaactggagcaagcattctatgctttgatgagatacagaccattgatgtttttgctgtggtagcactttctggcattctaagcaggctgttaagcacggggacagtacttgtagcaaccagtaataaagcaccagaagatctgaatcaggatgggatgcaaagggacatcttccttgagttattatcaaaattggatgaaagctgcaatgagattcttgtgggtactgaaaaggattatcgccgcctaattccgacagaaggctcaactgaggaagcgagaggaagtcgtagactcgtaggagcagcagcggtaatgttcagttgctggaaaattagaacctacacttgccaggtgaaaacacaagtggtcagaaggtg

SEQ ID NO: 11880 - DNA, 1365 bp, Zea Mays
gtcagtgacacgcgcgcggccatggagaaaggattgagaccacgtcgccttcgacccttctccgtcctcccggaacgcccgtcccgtccgtcctccccccatccacatccatcccgtgtgcttctactgctcctcgatttgatcaccgattaggggaggcggtttaccagtgagcacgcgcgagagataggataggaggaaagggaagctagcggcttcgctctcgcggggagatggcgcaggcggtggaggagtggtaccggcagatgcccatcatcacgcgctcctacctcaccgccgctgtcgtcaccaccgtcggctgcaccctcgaaatcatttcgccgtatcacctgtaccttaacccgaagctcgtggtgcagcactacgagatttggcgcctcgtcactaacttcctctacttccgcaagatggatttggattttctattccacatgttctttcttgcacggtactgcaagcttctggaggaaaactcatttagaggaagaactgctgactttttttacatgctcttgtttggtgctactgtcctaactggcattgttctgatcggagggatgataccttacatttctgagacatttgccagaattctgttcttgagcaattcattgacatttatgatggtttatgtctggagcaagcacaacccttttatccatatgagctttctgggcctgtttacctttacggctgcgtacttaccatgggttcttttgggcttctctatcctcgttggaagcagcacatgggtggacctcttgggtatgattgctggacatgtgtactacttcctggaagatgtatacccacgtatgactgggcgtcgccccctaaagacaccgtccttcattaaggcgctatttgctgatgacaatgttgtggtggcacagccacccaatgctgggattggtgctggtgcaaggttcggtgctattggtgtagatccccaggctcaatgatgaattactttcagtgacctgagggccgaggctgtgactgatctgggatgcggcagtttgtattctctgcgcaaattgcggaactgtacaagccattgttcttgtgtatttatacaggctagatgagagttattgtgcataacaaaaagattagtagtatcggaggcggctaagtttgtcacctgttggcagggcccggaggaaaatggatcgtgatgggcaaacaggccaacccctgttgcagaaacttgttcatgtgacgtctttgtccatttttccttcatcagctgctctttaaccgtaaaatcggcgttcgtcatttcaagtgttgtgaccgtatcccttttctgttatataaataaaatgtttcagttaaaaaata

SEQ ID NO: 11881 - DNA, 1499 bp, Zea Mays
gtcagtgacacgcgcgcggccatggagaaaggattgagaccacgtcgccttcgacccttctccgtcctcccggaacgcccgtcccgtccgtcctccccccatccacatccatcccgtgtgcttctactgctcctcgatttgatcaccgattaggggaggcggtttaccagtgagcacgcgcgagagataggataggaggaaagggaagctagcggcttcgctctcgcggggagatggcgcaggcggtggaggagtggtaccggcagatgcccatcatcacgcgctcctacctcaccgccgctgtcgtcaccaccgtcggctgcaccctcgaaatcatttcgccgtatcacctgtaccttaacccgaagctcgtggtgcagcactacgagatttggcgcctcgtcactaacttcctctacttccgcaagatggatttggattttctattccacatgttctttcttgcacggtactgcaagcttctggaggaaaactcatttagaggaagaactgctgactttttttacatgctcttgtttggtgctactgtcctaactggcattgttctgatcggagggatgataccttacatttctgagacatttgccagaattctgttcttgagcaattcattgacatttatgatggtttatgtctggagcaagcacaacccttttatccatatgagctttctgggcctgtttacctttacggctgcgtacttaccatgggttcttttgggcttctctatcctcgttggaagcagcacatgggtggacctcttgggtatgattgctggacatgtgtactacttcctggaagatgtatacccacgtatgactgggcgtcgccccctaaagacaccgtccttcattaaggcgctatttgctgatgacaatgttgtggtggcacagccacccaatgctgggattggtgctggtgcaaggttcggtgctattggtgtagatccccaggctcaatgatgaattactttcagtgacctgagggccgaggctgtgactgatctgggatgcggcagtttgtattctctgcgcaaattgcggaactgtacaagccattgttcttgtgtatttatacaggctagatgagagttattgtgcataacaaaaagattagtagtatcggaggcggctaagtttgtcacctgttggcagggcccggaggaaaatggatcgtgatgggcaaacaggccaacccctgttgcagaaacttgttcatcgagaatttggatggagcgctgtaattgcagaatggtgcaaggaatgactcctaacattgtggacgcctggatggtgttcgttttccttcctgattctgctgtgttcaccgatccggatgatctggtctcctggaagcagtctttgtccatttttccttcatcagctgctctttaaccgtaaaatcggcgttcgtcatttcaagtgttgtgaccgtatcccttttctgttatataaataaaatgtttcagttaaaaaata

SEQ ID NO: 11882 - DNA, 1547 bp, Zea Mays
actaggcaaggcattctcgacggccttcacagaccgtctcaaactcaaaaaaacgatgcccttcccctcccgccaccagcgcctggcgtcgctgacgaagctgctgaccacccacgtgaacgccggccgccaccgcgacgcgctcggcctcttctcccgcatgctctcggcccccgacctcccgccgctcaccgacccctccttcgcccacgccttcccgctcgcgctcaagtccgccaccgcgctccgcgtgcccggcgccgccgcctccttccacgcgctcgccgccaagtgtggcctgctctccagcccctttctcgcctccgcgctcgtcgcgtcctacggagcgcgcgtcgtcggcggtgcctgcggtgcctcctacgaactcactcgccgcctgttcgacgaattgcccgcccgcaacgccgtcgtctggagcgccatgatctccgtccacgtccgggcgggagacctcgccgccgcggcgtgggcgcttgaccacatggacgtccccccgactgcctcctgcttcaacaccgtgatagccgcggtcgccgagtccagggaacacccagcccgagccatcgaggtgtaccgacacatgcgaagagtgggcgtcccgccgagtttcatcacgctgctggcgctcgtccctgcatgcaccgtgataggcgcattgacttcgatcaaggaggtgcacggctttgcagtgcggcatggcatgtgcgcgagatcccacattggcagctccctcatcgaagcatatgggcgctgcggttctcttgctgccgcgcagagggtttttgaccaggttcatgatcgggacgtggttgtttggagctctctggtttcagcctacgctttccatggtcgtgcggaggtcgcaatgtcgcttttccaacacatggaggaccaggatgatgttcggcctgacagcatcatgttccttagcttgatggcggcctgtgcccattctggtcatgcagatgacgcattgcagtatttcgatgtgttgaccaggagatatggagtggaagcttgtggagaccattattcgtgcttggtggacgtcttgggccgggcaggacggctgcaccaagcttatgaacttctacgaacaatgccagtaaaggttacagcaaaagcctggggagctcttcttgctgcatgcaggaaacatggggatgtgcggttggcagaggttgccgggagagcattgtttgagatcgaaccagagaatgcagggaattttgtttcgctcgcaaacatctattcaggtcgtggcatgcatgaggatgcagagcgggtgagaagggagatggagcagcgaggtgtgcagagactgcctggtagcagttggatgctacatcacaagccaagttgttaatgcaatgcccaatatattttttttcgggcccagtgtgaccttttatgaaaagtcaggcatacaattcagaagtgtcatcgttggtgcacagaaaattttgttcagatgcagcgaccatttatccatggaaagctgcaacagtcaaaacaaccagctttaa

SEQ ID NO: 11883 - DNA, 1330 bp, Zea Mays
gagaccacgtcgccttcgacccttctccgtcctcccggaacgcccgtcccgtccgtcctccccccatccacatccatcccgtgtgcttctactgctcctcgatttgatcaccgattaggggaggcggtttaccagtgagcacgcgcgagagataggataggaggaaagggaagctagcggcttcgctctcgcggggagatggcgcaggcggtggaggagtggtaccggcagatgcccatcatcacgcgctcctacctcaccgccgctgtcgtcaccaccgtcggctgcaccctcgaaatcatttcgccgtatcacctgtaccttaacccgaagctcgtggtgcagcactacgagatttggcgcctcgtcactaacttcctctacttccgcaagatggatttggattttctattccacatgttctttcttgcacggtactgcaagcttctggaggaaaactcatttagaggaagaactgctgactttttttacatgctcttgtttggtgctactgtcctaactggcattgttctgatcggagggatgataccttacatttctgagacatttgccagaattctgttcttgagcaattcattgacatttatgatggtttatgtctggagcaagcacaacccttttatccatatgagctttctgggcctgtttacctttacggctgcgtacttaccatgggttcttttgggcttctctatcctcgttggaagcagcacatgggtggacctcttgggtatgattgctggacatgtgtactacttcctggaagatgtatacccacgtatgactgggcgtcgccccctaaagacaccgtccttcattaaggcgctatttgctgatgacaatgttgtggtggcacagccacccaatgctgggattggtgctggtgcaagggcccggaggaaaatggatcgtgatgggcaaacaggccaacccctgttgcagaaacttgttcatgtgacggtttaacatctgacctgctaccctttcatgcatcggtgaatttagtctaggaaactgtttgaagtggggaaatttggtgctttggcagcgagaatttggatggagcgctgtaattgcagaatggtgcaaggaatgactcctaacattgtggacgcctggatggtgttcgttttccttcctgattctgctgtgttcaccgatccggatgatctggtctcctggaagcagtctttgtccatttttccttcatcagctgctctttaaccgtaaaatcggcgttcgtcatttcaagtgttgtgaccgtatcccttttctgttatataaataaaatgtttcagttagctgtttt

SEQ ID NO: 11884 - DNA, 1467 bp, Zea Mays
aaaggattgagaccacgtcgccttcgacccttctccgtcctcccggaacgcccgtcccgtccgtcctccccccatccacatccatcccgtgtgcttctactgctcctcgatttgatcaccgattaggggaggcggtttaccagtgagcacgcgcgagagataggataggaggaaagggaagctagcggcttcgctctcgcggggagatggcgcaggcggtggaggagtggtaccggcagatgcccatcatcacgcgctcctacctcaccgccgctgtcgtcaccaccgtcggctgcaccctcgaaatttggattttctattccacatgttctttcttgcacggtactgcaagcttctggaggaaaactcatttagaggaagaactgctgactttttttacatgctcttgtttggtgctactgtcctaactggcattgttctgatcggagggatgataccttacatttctgagacatttgccagaattctgttcttgagcaattcattgacatttatgatggtttatgtctggagcaagcacaacccttttatccatatgagctttctgggcctgtttacctttacggctgcgtacttaccatgggttcttttgggcttctctatcctcgttggaagcagcacatgggtggacctcttgggtatgattgctggacatgtgtactacttcctggaagatgtatacccacgtatgactgggcgtcgccccctaaagacaccgtccttcattaaggcgctatttgctgatgacaatgttgtggtggcacagccacccaatgctgggattggtgctggtgcaaggttcggtgctattggtgtagatccccaggctcaatgatgaattactttcagtgacctgagggccgaggctgtgactgatctgggatgcggcagtttgtattctctgcgcaaattgcggaactgtacaagccattgttcttgtgtatttatacaggctagatgagagttattgtgcataacaaaaagattagtagtatcggaggcggctaagtttgtcacctgttggcagggcccggaggaaaatggatcgtgatgggcaaacaggccaacccctgttgcagaaacttgttcatgtgacggtttaacatctgacctgctaccctttcatgcatcggtgaatttagtctaggaaactgtttgaagtggggaaatttggtgctttggcagcgagaatttggatggagcgctgtaattgcagaatggtgcaaggaatgactcctaacattgtggacgcctggatggtgttcgttttccttcctgattctgctgtgttcaccgatccggatgatctggtctcctggaagcagtctttgtccatttttccttcatcagctgctctttaaccgtaaaatcggcgttcgtcatttcaagtgttgtgaccgtatcccttttctgttatataaataaaatgtttcagttagctgtttt

SEQ ID NO: 11885 - DNA, 3178 bp, Zea Mays
gcccgccggccgccgcaccaagaacgaaaccctaaccccgctcgctgattcaggaagggcgggaaaaccatggcgtcctccgccgcggcgccgagcggcgcgccaccggctgcgaagcgccctgcctccagcggacgggagggagatcagatggtcgtcacgccgctgggcgccggcagcgaggtgggccgttcctgcgtccacatgacattcaagggccgcaccgtcctcttcgactgcggcatccaccccgcgtactccggcatggcggcgctgccctacttcgacgagatcgacccgtccgccatagacgtcctcctcatcacccactttcacttggaccatgccgcctcgcttccgtacttcttggagaagaccacgttcaagggccgggtgtttatgacccacgccacaaaggctatttacaagctgctgctctcggattatgtcaaagtcagcaaagtgtccgtggaggatatgttgtatgatgagagtgacattgctcgctccatggataaaatcgagacattggaagttaatgggatacgcttctggtgctacactgctggccatgtgcttggtgccgccatgttcatggttgatattgctggcgtgcgcattctttacactggtgattactcccgtgaagaagaccgccacctacgagctgctgagctcccacagttctccccagacatttgcattattgagtcgacttatggtgtacagcaacatcagccccggattatacgtgagaagcgctttactgaggtcatccacaatactgtttcacaggggggtcgtgttcttatcccggcatttgcacttggcagagcacaagaactgttacttatcctcgatgagtattggtcaaaacatccagagctccataagattccgatctattacgcttcccctcttgccaagaggtgcatggctgtataccagacatacataaactccatgaatgaaaggatacggaaccagtttgcacaatccaatcccttccatttcaagcatatcgagtccttgaatagcattgataactttcatgatgtgggtccttcagtggtgatggctagtccaggtggtctccagagtggtctctctaggcagctttttgataagtggtgcacagataagaagaatgcttgtgttattccaggttatgttgtggaggggacccttgcaaagaccattatcaacgagccaagagaagtgacactggctaatgggctcactgctcctcttcatatgtcggtccactacatctctttttcagctcatgccgatttcccgcagacaagcaactttttggatgaacttcggccaccaaatattattctcgtgcatggagaagcaaatgaaatgtccaggcttaaacaaaaacttattactcagtttgatggtacaaatacaaaaattgtgtctcccaagaactgccaatcagtggagatgtacttcacttgtgagaagatggccaagactattggcaggttggcagaacaagtaccagaaggtggagagtcttccagtggcctacttgtcaagaagggattcacatatcagattatggctcctgaagatctccgtgtgttcacgcagttatctacagctaacatcattcagcgtatcgcggtcccttactctggatcttttgaagtcataaggtacagactgaaacaaatatacgagagcgtggagtcagcaacagaggaatctgatgttccgacgttaatcgtgcatgaaagagtgacggttcgcctggattcagaaagttatgttacactgcagtggtcgtccgatcccatcagcgacatggtgtctgattctgtggtggctatggtcttgaacatcggtcgggaaggccccaaagttgttccggtcgaagaagcggtgaagaccaaagaggagacggagaaggctgccctaaaggtggtgtatgctcttatgacatcgcttttcggtgacgttaaagtcgcagaggaagggaaatttgtcatatctgtagatgggaatgtggcgcacttggatgggaggagtggcgatgtcgaatgtgaaaatgctacgctgaaggaacggatcaagaccgccttccgtcgcatacagggcgccgtgagaccaatcccactttcagcctcttgataacttgtttgacatttcccatttgaacaaagtagcattctctgtttacaccagagtaccgggttttttttccctctctatcgaaaggaaccccagatgccttgtacggcatgctactcaagaggatttgattgttgatctgggattgcctctgtaaaatcacctgtaacattgtcatcctaacttgaaccacctccatcgttttcagtaaatttctacttaattttctgttttcttgtcgtactgacccgaattcacaatgtttgctgttccaagttctgttttgccatgttccatgcattctcgtgaagcaaaattgttgctggaagactggggcattctaccacgttcacgtgccataagtggagtcggtcacctatgtttggccgttatttgtgctaaagtgtctattaaacaggataaatggtcactaaacaatccattaaacttccattaaacaagacaagcgaacggaccgattctctgtatctactccacctttctattatgcgttagaatatttaatcaatataatgcggaatgcaaatgcatatgactaggaatgaatcaatctacacaagtgaggtatcacactgtaaaattcactacccgaccgattctgaatgggaacttgtgatgcctggagtcgtgggcgcatcgcgtgtagaaggagagggaggtcacgaggaagagggacggacacagcagggaaggcaggacagcgacttggaagcgaagctgctcttgctcttgtccttctccttccccgtcgtcgtcggcttcaccgtggggatgtgggagccgtcctcgccgccgcggtccttgcatttctcgcactcgtccaagaaggccttgaaggcgtcgacgcagtacctggccgcctccgccaccgtcatgccctcgacgagcccttgcgggtacgactccttggtgtggtcgccgttgagcaccgcggcgagctgcaccagctcctcctggaactcggacagcggggcatgctccgccgccgccgtccgccgcagcttcactggct

SEQ ID NO: 11886 - DNA, 2260 bp, Zea Mays
aagatccaccaccccaccaaccaactactctcacagtctcacctcccgctcctgccccctccctctcgttctcttcctaaatggcggccgagtccgccaggccgccctcgccgccgcgcgactccggctgccccgcgggcgcgggagactccaccagctcccagctgaccgcgacctacctcggcgtcagcttcgcgctcttcctcgccacgctcccgtcgggcaccgcggcgcgccacgtggcctcgctccagtcgcggggccgcctcctcgcctcgcgcctgctggccgccgaggaccagctgcggcagctgcgcgcgcgccgccgcgaggacgcccgcgccaacgcccgcgccgccgagatcttcgcgggccaccgcgccgcctggatggaggccgagcgccgcctgcaggcccgcgccgccgccgccgcggacgaggccgcctccctccgcgcgcacctcgccgacgccgaggccgacgccgctgcgctgcgcgcccgcgccgagcgactcgagcgcgaggccgccgagcgggatgagctgctcaccgcgctcctcgcggccacctcgcgcgccgggtactccggcggcgggcccctgccccgcgtccacgacggggaggagcaggaggaggaggagcgggcgcgccacgacgcgcgtggggagcgggagccggagcacgagcaggacccgctgcccgcgccgccgttggaccacgccgctgacaccaccgacgccgaggccctcgctgccgccgccgcgctctacgctcagcagcgccagaagcacgacgacgacttctacacggcggccatggccgcgtcgggaatgccgccgtggatggagatggaccgatcaaaagcctggcaggacctaaagtatgatacaattgagtcaacgtacaacacaaagcatgctgtaccgaggagagaatcaccctggaaagtggatgtagaatcttcaggagttccagcaaaacttaggttgctggagcaggaattacttaacctggaaaaggtagtgaatggagatttgtccaagattccattggtgatgagaaaacaagtgaaaagataccaaactctagctgggaaaattgatgatctttgcaaacgaatggtagcaaacaagtgacccttgtgattcaacacttaactcggagtttagaacacagcggcaaacagaattcttgctggaagcgtttcaccttcagcatcgtgcaactgaaaccaggcagaagctcggcacactgcaagcagagaccgcaaaaggcagctttggagatgagctaacagcagaagccaaaatgtgcacaagaagagcacttagttcaataaggaataacttcaaggaaatccagcgaagcttggagatttggctggcaagaattcttggagacctcgagggcatgctagccagggatggggcctcacgcattagggagtactttctgtctccatacacgtctgctgttcggtgagtggctggtgtcatggcatgcaggaatggtcatgttctcctcactactatatagtgactgcatgcgcatgaacaccctggagaatccctggatacacggtcagcaggtaaaatgccagaatcaagttcatgcgcacctgtggaacccccttgttggtcttttttatgggcagccttgcaagctttagcaaaattgaagagaagtgatctgggatcctaccagatttcacaggcggatcgaatgtagaatttagaagcatatatcccccattattagggacatcaaattttgacaccaaatctgatcaagttctagatcacccctcttcatatctgtcaaatttatgcgaaggattgcggttaagcaaggttgcatcgaagtgaggctgccagtgtgtactgctgatcgtgctgttagcaggttgatgtccttaccatcgaccacctcagttcagcctcaaatcagtttgaacataggtatagttctgtccgtaggtgttaacgcattatctgtctctctccagctcttcatcttgttgggattgtacagttttatgcttatggttgtgctgttctcctaactgtatctagaacagagtccttggatgcgctaaactgtattattgtcagtttatggttagtgatttgtatttatgttcatttcagctgttgagaacatttgccgtggcaatgcctggttgtgggtttttcttcgactgattgctgctacgaccacattatctatctgttgtgcactgcatgtgagtgcagaaacataa

SEQ ID NO: 11887 - DNA, 2067 bp, Zea Mays
aagatccaccaccccaccaaccaactactctcacagtctcacctcccgctcctgccccctccctctcgttctcttcctaaatggcggccgagtccgccaggccgccctcgccgccgcgcgactccggctgccccgcgggcgcgggagactccaccagctcccagctgaccgcgacctacctcggcgtcagcttcgcgctcttcctcgccacgctcccgtcgggcaccgcggcgcgccacgtggcctcgctccagtcgcggggccgcctcctcgcctcgcgcctgctggccgccgaggaccagctgcggcagctgcgcgcgcgccgccgcgaggacgcccgcgccaacgcccgcgccgccgagatcttcgcgggccaccgcgccgcctggatggaggccgagcgccgcctgcaggcccgcgccgccgccgccgcggacgaggccgcctccctccgcgcgcacctcgccgacgccgaggccgacgccgctgcgctgcgcgcccgcgccgagcgactcgagcgcgaggccgccgagcgggatgagctgctcaccgcgctcctcgcggccacctcgcgcgccgggtactccggcggcgggcccctgccccgcgtccacgacggggaggagcaggaggaggaggagcgggcgcgccacgacgcgcgtggggagcgggagccggagcacgagcaggacccgctgcccgcgccgccgttggaccacgccgctgacaccaccgacgccgaggccctcgctgccgccgccgcgctctacgctcagcagcgccagaagcacgacgacgacttctacacggcggccatggccgcgtcgggaatgccgccgtggatggagatggaccgatcaaaagcctggcaggacctaaagtatgatacaattgagtcaacgtacaacacaaagcatgctgtaccgaggagagaatcaccctggaaagtggatgtagaatcttcaggagttccagcaaaacttaggttgctggagcaggaattacttaacctggaaaaggtagtgaatggagatttgtccaagattccattggtgatgagaaaacaagtgaaaagataccaaactctagctgggaaaattgatgatctttgcaaacgaatgcaaacaagtgacccttgtgattcaacacttaactcggagtttagaacacagcggcaaacagaattcttgctggaagcgtttcaccttcagcatcgtgcaactgaaaccaggcagaagctcggcacactgcaagcagagaccgcaaaaggcagctttggagatgagctaacagcagaagccaaaatgtgcacaagaagagcacttagttcaataaggaataacttcaaggaaatccagcgaagcttggagatttggctggcaagaattcttggagacctcgagggcatgctagccagggatggggcctcacgcattagggagtactttctgtctccatacacgtctgctgttcggtgagtggctggtgtcatggcatgcaggaatggtcatgttctcctcactactatatagtgactgcatgcgcatgaacaccctggagaatccctggatacacggtcagcaggtaaaatgccagaatcaagttcatgcgcacctgtggaacccccttgttggtcttttttatgggcagccttgcaagctttagcaaaattgaagagaagtgatctgggatcctaccagatttcacaggcggatcgaatgtagaatttagaagcatatatcccccattattagggacatcaaattttgacaccaaatctgatcaagttctagatcacccctcttcatatctgtcaaatttatgcgaaggattgcggttaagcaaggttgcatcgaagtgaggctgccagtgtgtactgctgatcgtgctgttagcaggttgatgtccttaccatcgaccacctcagttcagcctcaaatcagtttgaacatagctgttgagaacatttgccgtggcaatgcctggttgtgggtttttcttcgactgattgctgctacgaccacattatctatctgttgtgcactgcatgtgagtgcagaaacataa

SEQ ID NO: 11888 - DNA, 5403 bp, Zea Mays
attcaaaatgcagactcaactgtttaccagacctcatagtgtttcctaaactaaaactgctcgacacaagcagctagcaattctccacatagagaatgttacgcaacagtacaaatatatagtaacacatcttcaggaaagtattagcaggaagagttgtcacagaaatgttctcaaaacggcctaaaagggtgcaggcatgggcaagcggaacaactttcaatcacaagttcttgaacgcagactcatgaggaagcttctgcggcgttagcctagccaacaatgccttgttcgagaagtggtcagcatcaacaaagtagaagttcccctcagccttaaaggtgacaaagggcctgtttgtttcaggaggcctgacatcggcaaacttgacagtccttttgaggggagtagctagccatgtcatcacctcggcctcaaagctatccgaaccaggacgccaccggagcttgtgaatgtacgggctcacgaaccaatgcaacgctgcagtcgtagtggcgctgaggaaaatgacggtggatgcaaccgctcccttgaggatcacattcatgtcaggcgaagtcatgaatgttaccactggccccagcgacacggagaggcagcaggtggacagggagagaagcttcactttctttatggtcgatgatattggcccttggtataccaggttagcatcctcgtcatcctccttgatctgttttggtttgggcccgatgcttatcttgctgctactggattcggtttctttcacagcagcagcctgcgaagcgcatcgtatctgagcgtgcaaacaggccatcagaccaaagttgtcgcgtcttgcaagagaattaggcctggacgttgcgaaatgcctccacataatagactgaggaacctggaaatctggaggagaacgaaaaaaaaaacaatgagcataattcggcatggtatagtgctttacagtgatgcacacaagctaagctacaacaaatatgcagaacattaacattcacttcagttatccaataattgaataccgagacgtactagtagatcagacagtttcagtgaaggtatatattatcattcggtggaaagatatggaaatgttgcactagatttgacagagtagacaagaaactgcaccctatgcaccactataaataagctggcaaaatgcaactatatagtgccagaagatctcatagaccaaccaaaaggcattaggccattagcagattatacctagttttgaatccaagagcggagatttaccgatgctgaagataacatcactgaaccttgcaaattacaattgtatcaaaaaaggatagctagtagtgtgacattccagcatctagaacacatcaattttcgtctgaaaagcaattcgcagtaacaaaagacataaccgccccatatcccagagaagaagagctcacgcctgtccccaccgtcccaggtatataataatcgaacaagaaaacatacagatcactgttcctcaaacatttcaggcatgcactcgtaccttagacgccaccatttttgggatcgaagctaacacagaggcgggagtacaaacacggcggagaccggagagaagggagcgatcaagaggcggagagatacctgggacccgggagacggcgcgcggagtcgaggcgggacccacggagaagtggcggaggagagccccgcggagggaggccgaggatcggagcctcgccgtcgtcatggcctccgacccgatggatccaggtgtggggggactagactagggttttgggacggagaaatggggatgctgcgggtgtgggggttgtgcggtaccggtgcagaccacccatgaagacgacaacgatgcgtaaaagtgctcaatactaattgggcctactcaattggctttatgggcctaaagtcgatatcgatggcgggtcggcccaagcgattccctgttggattattacgaatcgaaaccattcttctcttctcccagctctcgctcgcacacgcacacccaaatcccaaccggctccgcaccgccacatctccttcgccggaaccctaaacgcctagccgccgcagccgcagccgcagccgccgccgccgaagcagctgcaggtgggatcaaggtgtcctacttctcacccttctatgcgaatcgaaggtttctgtattcgcccgccttaatccaagcccgaaacctctcagatttcctcctgcggtgacgtcccggcaagccggtatgagtagccaccgcaaaaacttccgccgccgcggggacgacgctgaggacgccaacggcgacggcggcagccaccccaagccctccaccacgaccgccacgaagacgaaaaccctaacggtgcccaaacccaagtcgccgccgaggcgtcagggtgcgagccgcctcagctttgcggacgacgaggacgaggacgacgccgaggcgggcccgttcgcgcagcgccgccttcccccgacggcctcggtgcgcccggcccgcacggcgtccccggccgcgggagcgctccaccgcctcacgcccgccagggagcggatcaagagctctccggcacctgccggcgctgctgtgtcggcgccgaagccttccaacttccaatcccatgctggggagtacacaccagagcgcctccgggagctccagaagaatgcgcgcccgctccctgggagcctcttgcgtgcccaaccgcgggctcctgcgactgagccccggtcgcagaagttgtctggtacccctgcaagttccactccagctaccaccaccgcagctgcaacagaaacggtggttgttcttaaaggtctggtgaaacctatgtctgaggccagcattggaccaaggatacccaagcacgacaaggaggaagataaatctgaagaagaggggaaaggagatgaagaggatgaaggacccgtgatacctgaccgtgcaaccattgaagccatcagggcgaagcgacagcagcggcaacagccaaggcatgcggcgccagattatatctctcttgatgctggtggtgtgctgagcagccggaatgctgctggtgagtcgagtgatgaggatgacaatgagataacagatcggattgcaatgtacactgacaagccaggtgatggcccgaggagcacaaaaggtgtattcagtgggataagtaacaggggtcctgccaccagtttgggggctttcagtgatggcagcaggaacgttgaggatgatagagatgatgatgatgacgaagaagaagagaggaaatgggaggaagagcagttcaggaaggggcttggtaggaggatggacgatgctttctactcagaggtcagcaaatggggtaccagctgctatgcaggtccagccacagccatttggatacccagtgagtacccattaccagccctcccttagcggtgttgtgcctgcggcatcagtttttgcatctggaactgcagagttcttgtccatcgctcagcaagcggatgttgcaaataaagccttgcaagacaacatccgaaaacttagggagactcacaagacaacagtcagtgctttagttaagaccgacacacatcttaatgaagctctttcagagatatcaagcctcgagagtggtttgcaggatgctgaaaagaggtttgtttatatgcaggagctccgtgattatatttctgtgatgtgtgacttcttgaacgacaaggcatttttaatagaggagctggaggaaaacatacagcaattgcatgaaaaacgagctttggctatttctgagaggcgtgcggctgacctagctgatgaatcaggtgtaatcgaagctgctgtaagtgctgcagtatctatccttagcaaaggatcaagctcaacttgcctatctgctgcatcaaatgctgcccaagcagcagctgctgctgctaggggaagttccaacctccaacctgagttggatgagtttggcagagatatcaacatgcagaagcgtatggatcttaagcgcagggaagaggacagaagacgaaggaaaactcagtcagagaccaagagattggcatctgcagcgaagaataaggacatcgagaagatcgaaggagagctaagcactgatgaaagcgacagtgagagcactgcttatgtttccagccgggatgagtttcttaaggctgctgaccatgtgttcattgatgctaaagaggaatactcgagccttaggattgtcaaggacaagtttgaaggctggaaagctcagtacccttctgcataccgagatgcccatgtagccctgagtgcaccatctgtgttcagcccttatgtgagactggagctcttgaagtgggatcccctccacgaaacgaccgatttctttgacatggattggcacaaggttctctttgactatggcgtgcaagatgacgagagcccctcaggttcgaatgattcagatgtggttccagtcttggtagaaaaggttgctcttcctatattgcaccaccgcatcgagcgctgctgggatgtattgagtacccaagggactagaaaggctgtggaagctagcaggatggtgatcggttatttaccaacatcaagcaaggatttgcatcgactactggctgccgtgagcagccgtctaacccaggctgtcgccgatctttcagtcccagcctggggttcaatggtgacgaggaccgttccaggtgcctctcagtacgctgcatatagatttggagttgctgtacggctcctcaagaacgtgtgcctgtggaaagacatccttgcagatcatgtcgtcgagaagcttgctttagacgaactactgagagggaagattcttcctcatatgaagagcatcatcctggatgtccacgacgcgatcacccgggccgagcgagtagccgccgcgctctcagaagtctggcctaaacaaaaccaaaagctgcggcctttcgcagatctagtggctgagctgggcaacaagctggagaggaggcacgcgtcaggcatcagcgaggacgagacgcgtggcctagctcgccggttgaaaaacatactggctgttctgaacgagtacgataaagctagagccatttcgaaggcgtttcatctcagagaagccctttaggtcgtcctggatggagtcagagtgagaaatccagttttggcacagctgccccactgaccgctgcagcaaaatacgggcgctacggcccaggggacagcgggcgtagctcacgggaagcaaccgcatgaggcatgcatgacggagcttgtttcaggtctggactcgcctgccatcggcatcaaccatagtatctcctgcaaggcggagactgaatgaaccaataataaattttaaaattgatagatttactacggacatactgatcagatctaac

SEQ ID NO: 11889 - DNA, 5348 bp, Zea Mays
attcaaaatgcagactcaactgtttaccagacctcatagtgtttcctaaactaaaactgctcgacacaagcagctagcaattctccacatagagaatgttacgcaacagtacaaatatatagtaacacatcttcaggaaagtattagcaggaagagttgtcacagaaatgttctcaaaacggcctaaaagggtgcaggcatgggcaagcggaacaactttcaatcacaagttcttgaacgcagactcatgaggaagcttctgcggcgttagcctagccaacaatgccttgttcgagaagtggtcagcatcaacaaagtagaagttcccctcagccttaaaggtgacaaagggcctgtttgtttcaggaggcctgacatcggcaaacttgacagtccttttgaggggagtagctagccatgtcatcacctcggcctcaaagctatccgaaccaggacgccaccggagcttgtgaatgtacgggctcacgaaccaatgcaacgctgcagtcgtagtggcgctgaggaaaatgacggtggatgcaaccgctcccttgaggatcacattcatgtcaggcgaagtcatgaatgttaccactggccccagcgacacggagaggcagcaggtggacagggagagaagcttcactttctttatggtcgatgatattggcccttggtataccaggttagcatcctcgtcatcctccttgatctgttttggtttgggcccgatgcttatcttgctgctactggattcggtttctttcacagcagcagcctgcgaagcgcatcgtatctgagcgtgcaaacaggccatcagaccaaagttgtcgcgtcttgcaagagaattaggcctggacgttgcgaaatgcctccacataatagactgaggaacctggaaatctggaggagaacgaaaaaaaaaacaatgagcataattcggcatggtatagtgctttacagtgatgcacacaagctaagctacaacaaatatgcagaacattaacattcacttcagttatccaataattgaataccgagacgtactagtagatcagacagtttcagtgaaggtatatattatcattcggtggaaagatatggaaatgttgcactagatttgacagagtagacaagaaactgcaccctatgcaccactataaataagctggcaaaatgcaactatatagtgccagaagatctcatagaccaaccaaaaggcattaggccattagcagattatacctagttttgaatccaagagcggagatttaccgatgctgaagataacatcactgaaccttgcaaattacaattgtatcaaaaaaggatagctagtagtgtgacattccagcatctagaacacatcaattttcgtctgaaaagcaattcgcagtaacaaaagacataaccgccccatatcccagagaagaagagctcacgcctgtccccaccgtcccaggtatataataatcgaacaagaaaacatacagatcactgttcctcaaacatttcaggcatgcactcgtaccttagacgccaccatttttgggatcgaagctaacacagaggcgggagtacaaacacggcggagaccggagagaagggagcgatcaagaggcggagagatacctgggacccgggagacggcgcgcggagtcgaggcgggacccacggagaagtggcggaggagagccccgcggagggaggccgaggatcggagcctcgccgtcgtcatggcctccgacccgatggatccaggtgtggggggactagactagggttttgggacggagaaatggggatgctgcgggtgtgggggttgtgcggtaccggtgcagaccacccatgaagacgacaacgatgcgtaaaagtgctcaatactaattgggcctactcaattggctttatgggcctaaagtcgatatcgatggcgggtcggcccaagcgattccctgttggattattacgaatcgaaaccattcttctcttctcccagctctcgctcgcacacgcacacccaaatcccaaccggctccgcaccgccacatctccttcgccggaaccctaaacgcctagccgccgcagccgcagccgcagccgccgccgccgaagcagctgcagatttcctcctgcggtgacgtcccggcaagccggtatgagtagccaccgcaaaaacttccgccgccgcggggacgacgctgaggacgccaacggcgacggcggcagccaccccaagccctccaccacgaccgccacgaagacgaaaaccctaacggtgcccaaacccaagtcgccgccgaggcgtcagggtgcgagccgcctcagctttgcggacgacgaggacgaggacgacgccgaggcgggcccgttcgcgcagcgccgccttcccccgacggcctcggtgcgcccggcccgcacggcgtccccggccgcgggagcgctccaccgcctcacgcccgccagggagcggatcaagagctctccggcacctgccggcgctgctgtgtcggcgccgaagccttccaacttccaatcccatgctggggagtacacaccagagcgcctccgggagctccagaagaatgcgcgcccgctccctgggagcctcttgcgtgcccaaccgcgggctcctgcgactgagccccggtcgcagaagttgtctggtacccctgcaagttccactccagctaccaccaccgcagctgcaacagaaacggtggttgttcttaaaggtctggtgaaacctatgtctgaggccagcattggaccaaggatacccaagcacgacaaggaggaagataaatctgaagaagaggggaaaggagatgaagaggatgaaggacccgtgatacctgaccgtgcaaccattgaagccatcagggcgaagcgacagcagcggcaacagccaaggcatgcggcgccagattatatctctcttgatgctggtggtgtgctgagcagccggaatgctgctggtgagtcgagtgatgaggatgacaatgagataacagatcggattgcaatgtacactgacaagccaggtgatggcccgaggagcacaaaaggtgtattcagtgggataagtaacaggggtcctgccaccagtttgggggctttcagtgatggcagcaggaacgttgaggatgatagagatgatgatgatgacgaagaagaagagaggaaatgggaggaagagcagttcaggaaggggcttggtaggaggatggacgatgctttctactcagaggtcagcaaatggggtaccagctgctatgcaggtccagccacagccatttggatacccaagttcttgtccatcgctcagcaagcggatgttgcaaataaagccttgcaagacaacatccgaaaacttagggagactcacaagacaacagtcagtgctttagagctccgtgattatatttctgtgatgtgtgacttcttgaacgacaaggcatttttaatagaggagctggaggaaaacatacagcaattgcatgaaaaacgagctttggctatttctgagaggcgtgcggctgacctagctgatgaatcaggtgtaatcgaagctgctgtaagtgctgcagtatctatccttagcaaaggatcaagctcaacttgcctatctgctgcatcaaatgctgcccaagcagcagctgctgctgctaggggaagttccaacctccaacctgagttggatgagtttggcagagatatcaacatgcagaagcgtatggatcttaagcgcagggaagaggacagaagacgaaggaaaactcagtcagagaccaagagattggcatctgcagcgaagaataaggacatcgagaagatcgaaggagagctaagcactgatgaaagcgacagtgagagcactgcttatgtttccagccgggatgagtttcttaaggctgctgaccatgtgttcattgatgctaaagaggaatactcgagccttaggattgtcaaggacaagtttgaaggctggaaagctcagtacccttctgcataccgagatgcccatgtagccctgagtgcaccatctgtgttcagcccttatgtgagactggagctcttgaagtgggatcccctccacgaaacgaccgatttctttgacatggattggcacaaggttctctttgactatggcgtgcaagatgacgagagcccctcaggttcgaatgattcagatgtggttccagtcttggtagaaaaggttgctcttcctatattgcaccaccgcatcgagcgctgctgggatgtattgagtacccaagggactagaaaggctgtggaagctagcaggatggtgatcggttatttaccaacatcaagcaaggatttgcatcgactactggctgccgtgagcagccgtctaacccaggctgtcgccgatctttcagtcccagcctggggttcaatggtgacgaggaccgttccaggtgcctctcagtacgctgcatatagatttggagttgctgtacggctcctcaagaacgtgtgcctgtggaaagacatccttgcagatcatgtcgtcgagaagcttgctttagacgaactactgagagggaagattcttcctcatatgaagagcatcatcctggatgtccacgacgcgatcacccgggccgagcgagtagccgccgcgctctcagaagtctggcctaaacaaaaccaaaagctgcggcctttcgcagatctagtggctgagctgggcaacaagctggagaggaggcacgcgtcaggcatcagcgaggacgagacgcgtggcctagctcgccggttgaaaaacatactggctgttctgaacgagtacgataaagctagagccatttcgaaggcgtttcatctcagagaagccctttaggtcgtcctggatggagtcagagtgagaaatccagttttggcacaggtttctacatccttccagtttgcagagatgttgtaccacatatacatcttgaccatgatcgagtttttagtccatcgcttgatgctatcaaagaaagctgtgttgcttctaggttgttttctggttacgaacacacaaactggttaacaagatatgtattagatttattttttgcgagttcaagttatggtcccaatgtgtttatcaatggagctgggagcaaccctttggaatatgaacatagtactattatgctatttaacatatggggttactggtgatctgaaacttgtcagtatggcagccataagcgcgacccgattctgaggcgaatgctctgaactctttttcattgtattttggcaagtggtaggcatgaactagaactgtagattatgctctgagatgaatgtaatgattttagtctgagtta

SEQ ID NO: 11890 - DNA, 2853 bp, Zea Mays
cggcaaggccgtgcctccgcctgaagacagccgccgtcctccccaccgccatgcttcgccttcccctatgccccatcccgccacccgcctccccctctccttccgccgtctcacctacttaccctcccttgccgcctctaacgcgcgcggctgccgctcgtcctcttcatccgacgacgaattacccctcgccgccgagctctttccggccgcagggcctacgctcctatccatcgcgcgatccctcgccgtcgcctccccgcccccgtccgccgcgtctgtcctcggcttcctctgccgccttccccacgacgcctccccgcacatcttcccccacctcgtcgccgccctcgcccgctcgccccgcccggtccttgcgctccgcctcttcctctccccgcccacgtccgcggccaccacccaccactccttcaactccgcgctactccggtttcccctcccccttcacctccttccggccttcttcactcactccatcctacgcttccctggcctcactcccaccctgctctccttcaacctcctcctcaagtgcatctgctcctccatggtcccaaggaaccccggcctctatcttgcagtcgcgttgggaatcctccacgatgtcattccagcgtggaatcttgtgccggacaagttcacctactctaccgtcgtgtctgcactggccgatgcggggtgcgtggaagaggcggtggcgctggttcatgagatggtggtcgatggagtggtgtctgctgaggcttttaaccctgtgctgaaggcgatgctgcgtgcaggggatgtcaatggggcagtcaagctatttcggtttatgcagctgaagggctgcacactgaccgcagtgacatacaatgttctgctgcatggtctactgttgtgtggggaggcgagggcagcgatgaacatcatgagaagaatggagaatgaagggattgtgccagggttgatgacctacggagcagtggtggatgggctggtgaagtgtgggagagtggaggatgcatggaaggtggctcaggaaatgggggggcagggactagcacccagtgagtttgtgttctccgctgtgatcaccgggttttgcaagtcaggagaggttgacagggcattgatggtgtgggagacaatggtggcagctagggtaaagccgaatgttgttttgtattcagcaatgattgatggttttgcacggtctgggaggatgacagaagctgaaaagttatttgaagaaatggttgatgcgaaatgtatcccaaatatcgtgacatacagctcaatggttcggggatatttccacattgctaattcatcgcgggcactctctacgtgggaggagatgataaaggttggctgtgtgccaactgccattagttacagcatattgatcagtgggttgtgtgatgtagggagattaaaagatgctatgatggtctggaaaaacatgattggtcgtggctgtgcacctgataccattgcttatacttcaatgatgaaaggtttatgcatgtctgggatggtagatggtggtctccgtctatttaatgacatgctggcaaagggtgatgccaaaccagatgtcattagttataatgttctattggatgcgttgatccgcacaaatgacttacctcgggcaatggacttgcttaaccagatgcttgatcaaatgtgtgatccagacacaataacatgcaatatttttttgcgggagtttggagttttagaggggaaagggagggaattcttagagggactggtcatgagactatgctatagagatagatatagggcagcaggagatgttgttatggtcatgctggctaaatatattgtgccggaggctggcatttggtataccatagtgagaggagtttgtcagactaagagagttcaaaaggtggttgacaattgttgggatgagatttggaggccttagagatcatacatattttttaatacgctgatgggcttcttgcagtactttatatattgaatttgcatcccatttgaaaagatgtttcctttaatacagtgactttgccaacttatataagctgtaattgtcatttttttgtcctaacagcatgtcttccatgaattgacggggttacttgtgaactataattttattatcttaattcagtgttttcactcagtacttattgtcttattatgttctttaaaaattcaatagtaacttcatcttctgttcatcaaatcgacagtagcctgcaataagttggttctatgtgttatgatttgaactaatactagctgtgtcattgtaggatcagtaatctccttgacagtcctttgctaaatgcctataaaaaagcaaggaaatatgacagtctacagttaattttgacctatctacaggatgaaatgtgcaaattatcttccaattttctaattggacattcaacattcaggcagccttccaattttatatgtatgttccaattcatttaacattttgttgcttcgtattttcatttgcagggctgcattcagtttttttctcatttggttgtgacttgtgagttaacaatttggggcatttctaatatctgaatctgatgttcatagattttttagtatgccatgccaagaaatatgacaatcgatacaggaatctgagttaacacaatgctgctctcgctatcaattgtatgaactgataaaaagaactgatgactttggttcaccagctttgataggtgaaggttcttatgaagtgtacaatgtggtgttcttgatagtggaacaaaaatggcagcaaagaaacttgattctactgaaaatgaacgcactaaggtctagtttggg

SEQ ID NO: 11891 - DNA, 2431 bp, Zea Mays
actgcggctagtgcagtagtgtttgagtctttgaccgaggaaggataggcgaccggcgaccgcaagcaggagtagccatcatcaagcagtcaggaaagcaagcgagaagtcgtcgcgctactcttcgttgcctatatactccgcctccgcctccggtggttggttggtccctctaccatcgccagatcgcctgccttccctgctctccccgtcggctcaccgcgcgccccagatctccccgtccaaaggggacccaagcatcgcatcggatccgtcctgcgctttgccgccggcaactgcagaagcgaccagccatggcggcagccttcgatgcttacaccgacaagaacgccgtcttccgccgtctcaaggccaagcccgagaacaagatgtgcttcgactgcaacgccaagaaccccacctgggcctccgtcacctacggcatcttcctctgcctcgactgctccgccgcccaccgcagcctcggggtccacatcaccttcgtcaggtcaacgaacctcgactcatggactccagaccagctgaagatgatggcattcggaggcaacaaccgggcacatgctttcttcaagcagcatggatggaccgatggcgggaaggtcgaggcaaaatacacatcaagagccgctgaactttacaggcagatgcttaccaaggaggtcgctaagagcgccacgaccgataatgccctgccatcgtcacctgtcgcatctgaggcttccaagccgccatccgatgacttccctgaattcaaactcccagatgtgccagcaccaccggcagaggatctgaatgggaagcatgagcccaagtcccccaaagctgctcctcgttcaccaaaggccgctactcatcccacctttgccacttctgtgaagaagcccattggcgcaaagaaggttggaggcaagactggagggcttggtgttcgaaagcttactacaaagccaaatgaaagcctgtatgagcagaaaccagaagagccaaaacctgctgtacctgccttggctgcttcaactaaaaaaggtggtcaggccttgcattcacgttttgaatacgtggagaacgagccatcagctgattcgagaactgggggatctgtatctcgtgtgagtggccatgtagcaccaccaaaatcatcagacttctttcaagagtatgggatgggtaatgggttccagaagaaatctagcaatgcctcaaaaactcaggttgaggaaactgatgaagcaaggaagaaattctctaatgccaaggcgatctcgtcatctcagttttttggtactcaaaacagagaagagaaagaagctcaactatcccttcagaaatttgcgcgcggatctttttggccgcaatgatgcggacaactctaacctggacctaagcgctgctgatctcatcaacagaatatctttccaggcttcacaggatctgtcttcgctcaaggacatagcaggggagactggaaagaagctgacatctctggcctccaatttcatcagcgacctggacaggatcctttgagcagggcaggcgaggccagcagcagttttgctatcctcctacctgcaccacagagtatatcccttgtggtgcatcaccgacagttcttgcacagttacagctctgtagagggatagtagatgattcttatcatgcgttttgtattctgacctttgcttgttgtgagacccagtccacatgaagatgtttttttatttgttattgatactttcaagacgttgaagcatacaattatatgcatcaaggttgtcaaagaaaggttcagcatgagaaagctgaccaaatgttgcgccagccaccagtctttggagttgtttgtggccaagttgcaagaagcatggcgtagggaaaactccgggcgttgccacgccagactcgtcactagtattaaacaactactagtgccatttggcgtctcgtttgtcggccatgagagggtcgatagcatgcagcagattcctttccaacaacaaggatcttgcaggcttgcacaaaggcaaattctcctcttgttttagacacagcatatttggtcgacggcttgtatgatccaaaatgaaaaccgtacggtgccccccctccccttctgttaggaatttagttagcaccgtttttagttgaaaacatgtaatcgctaaaattatatataccaatagtattggacgggattgtggaaactagaatccattactattctattttaatttttatatactttactgccgcaccttgtcttctcgcttgtgttgccggcgctcgtctagtcgtctttgtgtcgctacccttcgagttgtggctccgatctaagacatcctctgatttaaaaaaaaatctaaatctatgggctagaatctcaatggacttaaccgaaaatgaaaaaaaaaag

SEQ ID NO: 11892 - DNA, 1119 bp, Zea Mays
gttatcattatgcttgtgaccattttggttttatttagaaatcaacccatctctgatgggaattagctccaggaaaaaaaactgtggtactgttattaactggttacttccaattggtggaagccagtccatgaagattctccctcttcttacgtgaaattccccctcttttttaacttgttactgggcgaggtgaggcaatgaaattcagcaagcaaaccaaacagaccctaaattgactaaaacaagcatgaaagatgttcacaagtcaagtcccagcttatcaactgtggtctgtgtctattgtttataccacggtcggggatgtctgcctctacattgttggcaaggatgaatatgatgagcttgctttcaaggatgtttgtgcaaaacctcctaccgagcgcctcttccttgacaaatacgggaggatctgcttgtgccttgatgagattgtttggaaggggttgcttgaaaacacggagaaagacagagtgaggaggttgattagactaaagccccctgtggagccataatttgcatgtaaagcatatgttggcgttgctgtaatccagatccaatcccatttgcatttgtaggcaaattttcagagttttcatctgcacattgtatctacagaattatcatcacttattggaggattgcgtgtgtgacatcaaaaacaatgtatcatctgtgtatttgctatgttgataagtgtgttactgcgttgtattttatgctactgtggcaagctcccatgtatgcataccacttttatagctgatatgggccttttaaaaaaaaatagatgattttattttgagaaatactatataggtacccagcaaagcatgaagataccatcctaattcctgactgaccctggaatttgcatcttgtttgcaatttttaatgtggaactatgcccccgagcattgcatttcaaggcaaatgtggctcccctgaagtgtaagtaagcattttctgtgcatcacctgtgctattattatcggtttaatgaccatcttgtatttttttttgggtacaaaactgttgcagttgtaacattacagccctgccgctctatatgtaaacttgttgtgtagagaacagacc

SEQ ID NO: 11893 - DNA, 1116 bp, Zea Mays
gagagagtgggctgggccgttgcggcgattagttgatagcccagcaaggaagcccaaactcgtcaccgtcgcctccttctattcatttcgccgagaggcgaaagaactgcttcgcacctacgttactgctgaaagatccagccggcacacacagacaccatcggcgaagaagaggccggagagaggatgatactggccgtgctcttcgccaactccgatggaaacatccttgtcgagcgattccatggggttcccgcggaggagaggagctccacgttgcctcccacaagtctgtgtctattgtttataccacggtcggggatgtctgcctctacattgttggcaaggatgaatatgatgagcttgctttcaaggatgtttgtgcaaaacctcctaccgagcgcctcttccttgacaaatacgggaggatctgcttgtgccttgatgagattgtttggaaggggttgcttgaaaacacggagaaagacagagtgaggaggttgattagactaaagccccctgtggagccataatttgcatgtaaagcatatgttggcgttgctgtaatccagatccaatcccatttgcatttgtaggcaaattttcagagttttcatctgcacattgtatctacagaattatcatcacttattggaggattgcgtgtgtgacatcaaaaacaatgtatcatctgtgtatttgctatgttgataagtgtgttactgcgttgtattttatgctactgtggcaagctcccatgtatgcataccacttttatagctgatatgggccttttaaaaaaaaatagatgattttattttgagaaatactatataggtacccagcaaagcatgaagataccatcctaattcctgactgaccctggaatttgcatcttgtttgcaatttttaatgtggaactatgcccccgagcattgcatttcaaggcaaatgtggctcccctgaagtgtaagtaagcattttctgtgcatcacctgtgctattattatcggtttaatgaccatcttgtatttttttttgggtacaaaactgttgcagttgtaacattacagccctgccgctctatatgtaaacttgttgtgtagagaacagacc

SEQ ID NO: 11894 - DNA, 1474 bp, Zea Mays
gagagagtgggctgggccgttgcggcgattagttgatagcccagcaaggaagcccaaactcgtcaccgtcgcctccttctattcatttcgccgagaggcgaaagaactgcttcgcacctacgttactgctgaaagatccagccggcacacacagacaccatcggcgaagaagaggccggagagaggatgatactggccgtgctcttcgccaactccgatggaaacatccttgtcgagcgattccatggggttcccgcggaggagaggagctccacgttgcctcccacaagtacgtttcatgatcatctctccctacagaccaaatttacctttttcattcttattgttatcattatgcttgtgaccattttggttttatttagaaatcaacccatctctgatgggaattagctccaggaaaaaaaactgtggtactgttattaactggttacttccaattggtggaagccagtccgtgaaattccccctcttttttaacttgttactgggcgaggtgaggcaatgaaattcagcaagcaaaccaaacagaccctaaattgactaaaacaagcatgaaagatgttcacaagtcaagtcccagcttatcaactgtggtctgtgtctattgtttataccacggtcggggatgtctgcctctacattgttggcaaggatgaatatgatgagcttgctttggctgaggtgatctttgcaattacatcagcagtcaaggatgtttgtgcaaaacctcctaccgagcgcctcttccttgacaaatacgggaggatctgcttgtgccttgatgagattgtttggaaggggttgcttgaaaacacggagaaagacagagtgaggaggttgattagactaaagccccctgtggagccataatttgcatgtaaagcatatgttggcgttgctgtaatccagatccaatcccatttgcatttgtaggcaaattttcagagttttcatctgcacattgtatctacagaattatcatcacttattggaggattgcgtgtgtgacatcaaaaacaatgtatcatctgtgtatttgctatgttgataagtgtgttactgcgttgtattttatgctactgtggcaagctcccatgtatgcataccacttttatagctgatatgggccttttaaaaaaaaatagatgattttattttgagaaatactatataggtacccagcaaagcatgaagataccatcctaattcctgactgaccctggaatttgcatcttgtttgcaatttttaatgtggaactatgcccccgagcattgcatttcaaggcaaatgtggctcccctgaagtgtaagtaagcattttctgtgcatcacctgtgctattattatcggtttaatgaccatcttgtatttttttttgggtacaaaactgttgcagttgtaacattacagccctgccgctctatatgtaaacttgttgtgtagagaacagacc

SEQ ID NO: 11895 - DNA, 1157 bp, Zea Mays
gagagagtgggctgggccgttgcggcgattagttgatagcccagcaaggaagcccaaactcgtcaccgtcgcctccttctattcatttcgccgagaggcgaaagaactgcttcgcacctacgttactgctgaaagatccagccggcacacacagacaccatcggcgaagaagaggccggagagaggatgatactggccgtgctcttcgccaactccgatggaaacatccttgtcgagcgattccatggggttcccgcggaggagagagaacgaggagctccacgttgcctcccacaagtctgtgtctattgtttataccacggtcggggatgtctgcctctacattgttggcaaggatgaatatgatgagcttgctttggctgaggtgatctttgcaattacatcagcagtcaaggatgtttgtgcaaaacctcctaccgagcgcctcttccttgacaaatacgggaggatctgcttgtgccttgatgagattgtttggaaggggttgcttgaaaacacggagaaagacagagtgaggaggttgattagactaaagccccctgtggagccataatttgcatgtaaagcatatgttggcgttgctgtaatccagatccaatcccatttgcatttgtaggcaaattttcagagttttcatctgcacattgtatctacagaattatcatcacttattggaggattgcgtgtgtgacatcaaaaacaatgtatcatctgtgtatttgctatgttgataagtgtgttactgcgttgtattttatgctactgtggcaagctcccatgtatgcataccacttttatagctgatatgggccttttaaaaaaaaatagatgattttattttgagaaatactatataggtacccagcaaagcatgaagataccatcctaattcctgactgaccctggaatttgcatcttgtttgcaatttttaatgtggaactatgcccccgagcattgcatttcaaggcaaatgtggctcccctgaagtgtaagtaagcattttctgtgcatcacctgtgctattattatcggtttaatgaccatcttgtatttttttttgggtacaaaactgttgcagttgtaacattacagccctgccgctctatatgtaaacttgttgtgtagagaacagacc

SEQ ID NO: 11896 - DNA, 1733 bp, Zea Mays
gtttgtccggtcgactggaagcacgacaaggccgtgctgctgaagcagccctgtggcgttcggcggcctactaagagcccaccacgcggcccttggcagcttccgtcccctcctgatgaaggagaaggagatgaaagggaaaggagctggattggattggattggatagatatcgtgtttatttgtttgagacggtagttttcatctaaagtttattcttcgtcacatgggatggccgtttgcttgtttgttgcttccgggaggcggtggtgaattgaagcagatcgacaagcatggctgcccactggtctcgatcgatcggcctgccatgccatgccatgccactagagtccgtcctgactggccgcccgttcccccgtataaaaaggcaggcaggcaggcagagcggggacgagcaagcaagcagttgcagttgcagcggcctcctcctctgcttcctccctcctcctcctcaccatggtgctggctgcgcacgatccccctccccttgtgttcgacgctgcccgcctgagcggcctctccgacatcccgcagcagttcatctggccggcggacgagagccccaccccggactccgccgaggagctggccgtgccgctcatcgacctctccggggacgccgccgaggtggtccggcaggtccggcgcgcctgcgacctgcacggcttcttccaggtggtggggcacggcatcgacgcggcgctgacggcggaggcccaccgctgcatggacgccttcttcacgctgccgctcccggacaagcagcgcgcgcagcgccgccagggggacagctgcggctacgccagcagcttcacgggccggttcgcgtccaagctgccctggaaggagacgctgtcgttccgctacaccgacgacgacgacggcgacaagtccaaggacgtcgtggcgtcctacttcgtggacaagctgggcgaggggtaccggcaccacggggaggtgtacgggcgctactgctctgagatgagccgtctgtcgctggagctcatggaggtgctaggcgagagcctgggcgtgggccggcgccacttccggcgcttcttccaggggaacgactccatcatgccccgcccgggcgccttcgtcgtcaacatcggcgacaccttcatggcgctctccaacgggcgctacaggagctgcctccaccgcgccgtcgtcaacagccgggtggcacgccgctcgctcgccttcttcctgtgcccggagatggacaaggtggtcaggccgcccaaggagctggtggacgacgccaacccgagggcgtacccggacttcacgtggaggacgctgctggacttcaccatgaggcactacaggtcggacatgaggacgctcgaggccttctccaactggctcagcaccagtagcaatggcggacagcacctgctggagaagaagtaggcatgctatttgggtatggaagatggtggatgtaagcaaacaaagccaaattaagcagagtaggttaattaaggttggctgatgatccatttagggaaggagctgatctccctgactccctcctccaattttctcaaccaaatttatatagtataataataataataaaatagcaagtaatagttgtatcgtattattattaattaatttattagctggtaggcaagtagtattaaataccatttgtagtacgatgggcgtatttctattttggcgttttgctctgtgttttt

SEQ ID NO: 11897 - DNA, 2306 bp, Zea Mays
cggggacgctctccattcttcttcccctcctcctccacacgtccaaaagcctcgtccttcccacttcctacccatcatatctccatccgcggttccgcccagctgctccacatctcaattctcaccacacacacgcacacacactatcgtccagcaagctcgctgttgcttgccacccaccgcctcagctcgatcgcaacgcgcttggcatggcgtccgaggtgtggctatcgccggcgtctcgcctcccatccctctccaacgcaccacctcgcttacgctccaagcctgccaccacaaccgcctctttgctctctccctgtccccgccctgcccgcgccctgcctgtgctgcgtgtccgtcgccgccgccgacttcgcgccaccgagcagcaaggccaggttcaggagcaagatgacgaggtggtggacaggaacatcctcccctactgcagcatcgacaggaagcagaagaagacgctgggagagatggagcaggagttcctgcaagccctccaggccttctactatgaccagaaggccatcatgtccaacgaggagttcgacaacctcaaggaggagctcatgtgggaggggagcagcgtcgtcatgctaaacgaagatgagcaaaagcttttggaagcttccttggcctatacctccggcaacccaatcatgtctgatgctgagttcgacgaactgaaacttagattaaagacggcagtgtcattgtgaaggagggtcccaggtgcagcctaaggactcataaggtgtacagtgacttgaatgttgactacctaaagatgttcctcctaaatgttccagccaccaccgtagctctgggactgttctttttcattgatgaattgactggttttgagatcaatgtgttccagctgccagagcctttcggattcattttcacatggtttgctgctttgcccctaatattgttcttagcgcagtcattgactaaggctatagtccaggattttttaatccttaaggggccatgtcctaattgtggtactgaaaacctttccttctttgggactatactgtcagtctccagtggcggtacaacaaacaaagtgaaatgtgcaaattgcagtaccgagctggaatatgactcaaaatctcgggtgatcacacttccagaagcatcaaatgcataaacataggtgactctacatttacgccagtaactataaatggatgctctttggtctatattccaaatgtgggagacatcacaccagctttgaagtattgcccgtctccattgtgaacactctgcagcatatgtagcagataaatgagtgaaactatttgtactgcctgctctgcaaattagtatgaacacccctcaaaaagatttggcccacactctggtctctctgtttgcagctgggaacagggagctccagagcttgtgaattctatagaataaaggtggttgtccgcacagtatagcaaactgcgaagcctgcaactactagagtttggtctgtagcaggctcagttgggaatgtgtagcagagcatgatccatggtgtggatgaattgcagagtactgtgctgtgtgtgtaggaaggaaaagctgccgcctgccgattgtgcagtcagtctagtacgttggtatgcgaccatctcaagtctgggctttgattttaagcaatgatttttggcaatgaatgaacaagctatctactgtacactgtttttgtacagttatgtttgcaaggcccaagtctactgaacggccacggccaggctgactgatgacctgaagcccggcccacggcccacggcccacagcccaactggttgcacatactgcgagagaatttctctcaaccaagcgtctgcatcttccttctctagcttgtgtcatggagtatatgcatatgcatccctgacctctttcatgcatgcatgtttaaatgactttgttcctcaagcaacctgcaagcagaattaataccattccaaatcgatcgatgagcagaatcagaattagcgagcattttgcattgctccaccaaacaaaaaaattcggccacctcaatgcactagtaggaaacggagttagtcctgattgagaacccgaactacggattcaggactaaagagcactttagaggctttttttattttttgcacaagtttctctccacccttgtgattcctgggactcaaactcatgagcattgtcttgtatatgggattagatgatgctctggaccgatctattagatctactggactttcaatttattttggtctaaagttaagtaatataattat

SEQ ID NO: 11898 - DNA, 2558 bp, Zea Mays
cggggacgctctccattcttcttcccctcctcctccacacgtccaaaagcctcgtccttcccacttcctacccatcatatctccatccgcggttccgcccagctgctccacatctcaattctcaccacacacacgcacacacactatcgtccagcaagctcgctgttgcttgccacccaccgcctcagctcgatcgcaacgcgcttggcatggcgtccgaggtgtggctatcgccggcgtctcgcctcccatccctctccaacgcaccacctcgcttacgctccaagcctgccaccacaaccgcctctttgctctctccctgtccccgccctgcccgcgccctgcctgtgctgcgtgtccgtcgccgccgccgacttcgcgccaccgagcagcaaggccaggttcaggagcaagatgacgaggtggtggacaggaacatcctcccctactgcagcatcgacaggaagcagaagaagacgctgggagagatggagcaggagttcctgcaagccctccaggccttctactatgaccagaaggccatcatgtccaacgaggagttcgacaacctcaaggaggagctcatgtgggaggggagcagcgtcgtcatgctaaacgaagatgagcaaaagcttttggaagcttccttggcctatacctccggcaacccaatcatgtctgatgctgagttcgacgaactgaaacttagattaaagacagacggcagtgtcattgtgaaggagggtcccaggtgcagcctaaggactcataaggtgtacagtgacttgaatgttgactacctaaagatgttcctcctaaatgttccagccaccaccgtagctctgggactgttctttttcattgatgaattgactggttttgagatcaatgtgttccagctgccagagcctttcggattcattttcacatggtttgctgctttgcccctaatattgttcttagcgcagtcattgactaaggctatagtccaggattttttaatccttaaggggccatgtcctaattgtggtactgaaaacctttccttctttgggactatactgtcagtctccagtggcggtacaacaaacaaagtgaaatgtgcaaattgcagtaccgagctggaatatgactcaaaatctcgggtgatcacacttccagaagcatcaaatgcataaacataggtgactctacatttacgccagtaactataaatggatgctctttggtctatattccaaatgtgggagacatcacaccagctttgaagtattgcccgtctccattgtgaacactctgcagcatatgtagcagataaatgagtgaaactatttgtactgcctgctctgcaaattagtatgaacacccctcaaaaagatttggcccacactctggtctctctgtttgcagctgggtatgaaaaaaatgcacaatcttataccattgatgtttagctgttgctttgtagtcaatccagtaaataggctgtgggcatgtacaaatagagttacctgttaatttgttgttcctaaaatgtatgatacatagactgcatttcagttgggacatataacaccaaagcaatcacaatgaagtgtctgttatatactatggtgctaaagagcccacctatgttaaagcgaacttctgatctaataatataaaattaaaatgtggtcaagcgcatgcaagatgtactttgtgcagtctgacgatataaaaatctgtcattttattttgatttcttcttttcaggaacagggagctccagagcttgtgaattctatagaataaaggtggttgtccgcacagtatagcaaactgcgaagcctgcaactactagagtttggtctgtagcaggctcagttgggaatgtgtagcagagcatgatccatggtgtggatgaattgcagagtactgtgctgtgtgtgtaggaaggaaaagctgccgcctgccgattgtgcagtcagtctagtacgttgttatgtttgcaaggcccaagtctactgaacggccacggccaggctgactgatgacctgaagcccggcccacggcccacggcccacagcccaactggttgcacatactgcgagagaatttctctcaaccaagcgtctgcatcttccttctctagcttgtgtcatggagtatatgcatatgcatccctgacctctttcatgcatgcatgtttaaatgactttgttcctcaagcaacctgcaagcagaattaataccattccaaatcgatcgatgagcagaatcagaattagcgagcattttgcattgctccaccaaacaaaaaaattcggccacctcaatgcactagtaggaaacggagttagtcctgattgagaacccgaactacggattcaggactaaagagcactttagaggctttttttattttttgcacaagtttctctccacccttgtgattcctgggactcaaactcatgagcattgtcttgtatatgggattagatgatgctctggaccgatctattagatctactggactttcaatttattttggtctaaagttaagtaatataattat

SEQ ID NO: 11899 - DNA, 2304 bp, Zea Mays
cggggacgctctccattcttcttcccctcctcctccacacgtccaaaagcctcgtccttcccacttcctacccatcatatctccatccgcggttccgcccagctgctccacatctcaattctcaccacacacacgcacacacactatcgtccagcaagctcgctgttgcttgccacccaccgcctcagctcgatcgcaacgcgcttggcatggcgtccgaggtgtggctatcgccggcgtctcgcctcccatccctctccaacgcaccacctcgcttacgctccaagcctgccaccacaaccgcctctttgctctctccctgtccccgccctgcccgcgccctgcctgtgctgcgtgtccgtcgccgccgccgacttcgcgccaccgagcagcaaggccaggttcaggagcaagatgacgaggtggtggacaggaacatcctcccctactgcagcatcgacaggaagcagaagaagacgctgggagagatggagcaggagttcctgcaagccctccaggccttctactatgaccagaaggccatcatgtccaacgaggagttcgacaacctcaaggaggagctcatgtgggaggggagcagcgtcgtcatgctaaacgaagatgagcaaaagcttttggaagcttccttggcctatacctccggcaacccaatcatgtctgatgctgagttcgacgaactgaaacttagattaaagacagacggcagtgtcattgtgaaggagggtcccaggtgcagcctaaggactcataaggtgtacagtgacttgaatgttgactacctaaagatgttcctcctaaatgttccagccaccaccgtagctctgggactgttctttttcattgatgaattgactggttttgagatcaatgtgttccagctgccagagcctttcggattcattttcacatggtttgctgctttgcccctaatattgttcttagcgcagtcattgactaaggctatagtccaggattttttaatccttaaggggccatgtcctaattgtggtactgaaaacctttccttctttgggactatactgtcagtctccagtggcggtacaacaaacaaagtgaaatgtgcaaattgcagtaccgagctggaatatgactcaaaatctcgggtgatcacacttccagaagcatcaaatgcataaacataggtgactctacatttacgccagtaactataaatggatgctctttggtctatattccaaatgtgggagacatcacaccagctttgaagtattgcccgtctccattgtgaacactctgcagcatatgtagcagataaatgagtgaaactatttgtactgcctgctctgcaaattagtatgaacacccctcaaaaagatttggcccacactctggtctctctgtttgcagctggggagctccagagcttgtgaattctatagaataaaggtggttgtccgcacagtatagcaaactgcgaagcctgcaactactagagtttggtctgtagcaggctcagttgggaatgtgtagcagagcatgatccatggtgtggatgaattgcagagtactgtgctgtgtgtgtaggaaggaaaagctgccgcctgccgattgtgcagtcagtctagtacgttggtatgcgaccatctcaagtctgggctttgattttaagcaatgatttttggcaatgaatgaacaagctatctactgtacactgtttttgtacagttatgtttgcaaggcccaagtctactgaacggccacggccaggctgactgatgacctgaagcccggcccacggcccacggcccacagcccaactggttgcacatactgcgagagaatttctctcaaccaagcgtctgcatcttccttctctagcttgtgtcatggagtatatgcatatgcatccctgacctctttcatgcatgcatgtttaaatgactttgttcctcaagcaacctgcaagcagaattaataccattccaaatcgatcgatgagcagaatcagaattagcgagcattttgcattgctccaccaaacaaaaaaattcggccacctcaatgcactagtaggaaacggagttagtcctgattgagaacccgaactacggattcaggactaaagagcactttagaggctttttttattttttgcacaagtttctctccacccttgtgattcctgggactcaaactcatgagcattgtcttgtatatgggattagatgatgctctggaccgatctattagatctactggactttcaatttattttggtctaaagttaagtaatataattat

SEQ ID NO: 11900 - DNA, 1993 bp, Zea Mays
ggacaacggggacgctctccattcttcttcccctcctcctccacacgtccaaaagcctcgtccttcccacttcctacccatcatatctccatccgcggttccgcccagctgctccacatctcaattctcaccacacacacgcacacacactatcgtccagcaagctcgctgttgcttgccacccaccgcctcagctcgatcgcaacgcgcttggcatggcgtccgaggtgtggctatcgccggcgtctcgcctcccatccctctccaacgcaccacctcgcttacgctccaagcctgccaccacaaccgcctctttgctctctccctgtccccgccctgcccgcgccctgcctgtgctgcgtgtccgtcgccgccgccgacttcgcgccaccgagcagcaaggccaggttcaggagcaagatgacgaggtggtggacaggaacatcctcccctactgcagcatcgacaggaagcagaagaagacgctgggagagatggagcaggagttcctgcaagccctccaggccttctactatgaccagaaggccatcatgtccaacgaggagttcgacaacctcaaggaggagctcatgtgggaggggagcagcgtcgtcatgctaaacgaagatgagcaaaagcttttggaagcttccttggcctatacctccggcaacccaatcatgtctgatgctgagttcgacgaactgaaacttagattaaagacagacggcagtgtcattgtgaaggagggtcccaggtgcagcctaaggactcataaggtgtacagtgacttgaatgttgactacctaaagatgttcctcctaaatgttccagccaccaccgtagctctgggactgttctttttcattgatgaattgactggttttgagatcaatgtgttccagctgccagagcctttcggattcattttcacatggtttgctgctttgcccctaatattgttcttagcgcagtcattgactaaggctatagtccaggattttttaatccttaaggggccatgtcctaattgtggtactgaaaacctttccttctttgggactatactgtcagtctccagtggcggtacaacaaacaaagtgaaatgtgcaaattgcagtaccgagctggaatatgactcaaaatctcgggtgatcacacttccagaagcatcaaatgcataaacataggaacagggagctccagagcttgtgaattctatagaataaaggtggttgtccgcacagtatagcaaactgcgaagcctgcaactactagagtttggtctgtagcaggctcagttgggaatgtgtagcagagcatgatccatggtgtggatgaattgcagagtactgtgctgtgtgtgtaggaaggaaaagctgccgcctgccgattgtgcagtcagtctagtacgttgttatgtttgcaaggcccaagtctactgaacggccacggccaggctgactgatgacctgaagcccggcccacggcccacggcccacagcccaactggttgcacatactgcgagagaatttctctcaaccaagcgtctgcatcttccttctctagcttgtgtcatggagtatatgcatatgcatccctgacctctttcatgcatgcatgtttaaatgactttgttcctcaagcaacctgcaagcagaattaataccattccaaatcgatcgatgagcagaatcagaattagcgagcattttgcattgctccaccaaacaaaaaaattcggccacctcaatgcactagtaggaaacggagttagtcctgattgagaacccgaactacggattcaggactaaagagcactttagaggctttttttattttttgcacaagtttctctccacccttgtgattcctgggactcaaactcatgagcattgtcttgtatatgggattagatgatgctctggaccgatctattagatctactggactttcaatttattttggtctaaagttaagtaatataattat

SEQ ID NO: 11901 - DNA, 2223 bp, Zea Mays
ggacaacggggacgctctccattcttcttcccctcctcctccacacgtccaaaagcctcgtccttcccacttcctacccatcatatctccatccgcggttccgcccagctgctccacatctcaattctcaccacacacacgcacacacactatcgtccagcaagctcgctgttgcttgccacccaccgcctcagctcgatcgcaacgcgcttggcatggcgtccgaggtgtggctatcgccggcgtctcgcctcccatccctctccaacgcaccacctcgcttacgctccaagcctgccaccacaaccgcctctttgctctctccctgtccccgccctgcccgcgccctgcctgtgctgcgtgtccgtcgccgccgccgacttcgcgccaccgagcagcaaggccaggttcaggagcaagatgacgaggtggtggacaggaacatcctcccctactgcagcatcgacaggaagcagaagaagacgctgggagagatggagcaggagttcctgcaagccctccaggccttctactatgaccagaaggccatcatgtccaacgaggagttcgacaacctcaaggaggagctcatgtgggaggggagcagcgtcgtcatgctaaacgaagatgagcaaaagcttttggaagcttccttggcctatacctccggcaacccaatcatgtctgatgctgagttcgacgaactgaaacttagattaaagacagacggcagtgtcattgtgaaggagggtcccaggtgcagcctaaggactcataaggtgtacagtgacttgaatgttgactacctaaagatgttcctcctaaatgttccagccaccaccgtagctctgggactgttctttttcattgatgaattgactggttttgagatcaatgtgttccagctgccagagcctttcggattcattttcacatggtttgctgctttgcccctaatattgttcttagcgcagtcattgactaaggctatagtccaggattttttaatccttaaggggccatgtcctaattgtggtactgaaaacctttccttctttgggactatactgtcagtctccagtggcggtacaacaaacaaagtgaaatgtgcaaattgcagtaccgagctggaatatgactcaaaatctcgggtgatcacacttccagaagcatcaaatgcataaacataggtgactctacatttacgccagtaactataaatggatgctctttggtctatattccaaatgtgggagacatcacaccagctttgaagtattgcccgtctccattgtgaacactctgcagcatatgtagcagataaatgagtgaaactatttgtactgcctgctctgcaaattagtatgaacacccctcaaaaagatttggcccacactctggtctctctgtttgcagctgggaacagggagctccagagcttgtgaattctatagaataaaggtggttgtccgcacagtatagcaaactgcgaagcctgcaactactagagtttggtctgtagcaggctcagttgggaatgtgtagcagagcatgatccatggtgtggatgaattgcagagtactgtgctgtgtgtgtaggaaggaaaagctgccgcctgccgattgtgcagtcagtctagtacgttgttatgtttgcaaggcccaagtctactgaacggccacggccaggctgactgatgacctgaagcccggcccacggcccacggcccacagcccaactggttgcacatactgcgagagaatttctctcaaccaagcgtctgcatcttccttctctagcttgtgtcatggagtatatgcatatgcatccctgacctctttcatgcatgcatgtttaaatgactttgttcctcaagcaacctgcaagcagaattaataccattccaaatcgatcgatgagcagaatcagaattagcgagcattttgcattgctccaccaaacaaaaaaattcggccacctcaatgcactagtaggaaacggagttagtcctgattgagaacccgaactacggattcaggactaaagagcactttagaggctttttttattttttgcacaagtttctctccacccttgtgattcctgggactcaaactcatgagcattgtcttgtatatgggattagatgatgctctggaccgatctattagatctactggactttcaatttattttggtctaaagttaagtaatataattat

SEQ ID NO: 11902 - DNA, 2172 bp, Zea Mays
caggaatggacaacggggacgctctccattcttcttcccctcctcctccacacgtccaaaagcctcgtccttcccacttcctacccatcatatctccatccgcggttccgcccagctgctccacatctcaattctcaccacacacacgcacacacactatcgtccagcaagctcgctgttgcttgccacccaccgcctcagctcgatcgcaacgcgcttggcatggcgtccgaggtgtggctatcgccggcgtctcgcctcccatccctctccaacgcaccacctcgcttacgctccaagcctgccaccacaaccgcctctttgctctctccctgtccccgccctgcccgcgccctgcctgtgctgcgtgtccgtcgccgccgccgacttcgcgccaccgagcagcaaggccaggttcaggagcaagatgacgaggtggtggacaggaacatcctcccctactgcagcatcgacaggaagcagaagaagacgctgggagagatggagcaggagttcctgcaagccctccaggccttctactatgaccagaaggccatcatgtccaacgaggagttcgacaacctcaaggaggagctcatgtgggaggggagcagcgtcgtcatgctaaacgaagatgagcaaaagcttttggaagcttccttggcctatacctccggcaacccaatcatgtctgatgctgagttcgacgaactgaaacttagattaaagacagacggcagtgtcattgtgaaggagggtcccaggtgcagcctaaggactcataaggtgtacagtgacttgaatgttgactacctaaagatgttcctcctaaatgttccagccaccaccgtagctctgggactgttctttttcattgatgaattgactggttttgagatcaatgtgttccagctgccagagcctttcggattcattttcacatggtttgctgctttgcccctaatattgttcttagcgcagtcattgactaaggctatagtccaggattttttaatccttaaggggccatgtcctaattgtggtactgaaaacctttccttctttgggactatactgtcagtctccagtggcggtacaacaaacaaagtgaaatgtgcaaattgcagtaccgagctggaatatgactcaaaatctcgggtgatcacacttccagaagcatcaaatgcataaacataggtgactctacatttacgccagtaactataaatggatgctctttggtctatattccaaatgtgggagacatcacaccagctttgaaggagctccagagcttgtgaattctatagaataaaggtggttgtccgcacagtatagcaaactgcgaagcctgcaactactagagtttggtctgtagcaggctcagttgggaatgtgtagcagagcatgatccatggtgtggatgaattgcagagtactgtgctgtgtgtgtaggaaggaaaagctgccgcctgccgattgtgcagtcagtctagtacgttggtatgcgaccatctcaagtctgggctttgattttaagcaatgatttttggcaatgaatgaacaagctatctactgtacactgtttttgtacagttatgtttgcaaggcccaagtctactgaacggccacggccaggctgactgatgacctgaagcccggcccacggcccacggcccacagcccaactggttgcacatactgcgagagaatttctctcaaccaagcgtctgcatcttccttctctagcttgtgtcatggagtatatgcatatgcatccctgacctctttcatgcatgcatgtttaaatgactttgttcctcaagcaacctgcaagcagaattaataccattccaaatcgatcgatgagcagaatcagaattagcgagcattttgcattgctccaccaaacaaaaaaattcggccacctcaatgcactagtaggaaacggagttagtcctgattgagaacccgaactacggattcaggactaaagagcactttagaggctttttttattttttgcacaagtttctctccacccttgtgattcctgggactcaaactcatgagcattgtcttgtatatgggattagatgatgctctggaccgatctattagatctactggactttcaatttattttggtctaaagttaagtaatataattat

SEQ ID NO: 11903 - DNA, 1728 bp, Zea Mays
atggccgcctcttccattcctccttgccaggttcaggagcaagatgacgaggtggtggacaggaacatcctcccctactgcagcatcgacaggaagcagaagaagacgctgggagagaggaagcagaagaagacgctgggagagatggagcaggagttcctgcaagccctccaggccttctactatgaccagaaggccatcatgtccaacgaggagttcgacaacctcaaggaggagctcatgtgggaggggagcagcgtcgtcatgctaaacgaagatgagcaaaagcttttggaagcttccttggcctatacctccggcaacccaatcatgtctgatgctgagttcgacgaactgaaacttagattaaagacagacggcagtgtcattgtgaaggagggtcccaggtgcagcctaaggactcataaggtgtacagtgacttgaatgttgactacctaaagatgttcctcctaaatgttccagccaccaccgtagctctgggactgttctttttcattgatgaattgactggttttgagatcaatgtgttccagctgccagagcctttcggattcattttcacatggtttgctgctttgcccctaatattgttcttagcgcagtcattgactaaggctatagtccaggattttttaatccttaaggggccatgtcctaattgtggtactgaaaacctttccttctttgggactatactgtcagtctccagtggcggtacaacaaacaaagtgaaatgtgcaaattgcagtaccgagctggaatatgactcaaaatctcgggtgatcacacttccagaagcatcaaatgcataaacataggtgactctacatttacgccagtaactataaatggatgctctttggtctatattccaaatgtgggagacatcacaccagctttgaagaacagggagctccagagcttgtgaattctatagaataaaggtggttgtccgcacagtatagcaaactgcgaagcctgcaactactagagtttggtctgtagcaggctcagttgggaatgtgtagcagagcatgatccatggtgtggatgaattgcagagtactgtgctgtgtgtgtaggaaggaaaagctgccgcctgccgattgtgcagtcagtctagtacgttgttatgtttgcaaggcccaagtctactgaacggccacggccaggctgactgatgacctgaagcccggcccacggcccacggcccacagcccaactggttgcacatactgcgagagaatttctctcaaccaagcgtctgcatcttccttctctagcttgtgtcatggagtatatgcatatgcatccctgacctctttcatgcatgcatgtttaaatgactttgttcctcaagcaacctgcaagcagaattaataccattccaaatcgatcgatgagcagaatcagaattagcgagcattttgcattgctccaccaaacaaaaaaattcggccacctcaatgcactagtaggaaacggagttagtcctgattgagaacccgaactacggattcaggactaaagagcactttagaggctttttttattttttgcacaagtttctctccacccttgtgattcctgggactcaaactcatgagcattgtcttgtatatgggattagatgatgctctggaccgatctattagatctactggactttcaatttattttggtctaaagttaagtaatataattat

SEQ ID NO: 11904 - DNA, 478 bp, Zea Mays
cgatacgagaaagaacaattggatctagaatttgatgagtagccactccattatcacatatccatggatgctttgagcatttagaacgaaaagatcattctgccgcatgaactagagactgcacggattaatgagttgcttgggaatattcaggccgtggttactcctgaaatgaatcagacaacaataattgaggaatttgacaagggacaccagcttgaagaagttaaaacggtcaatgagcaagtggttgttcctcctgtaaagaatctaagcaaacaaaaatcccaacaaatccaagaagactaaaagaggagaattactatctgtgttgttttttctaccaaattgggagaactatgttagcagtttcatgatgaagttgcttgaggaaggttttgatctttgtgcacatctactagctctatgacgctaccatttcatggaaatatcgtgtttatcttaaagtaatgacgca

SEQ ID NO: 11905 - DNA, 1294 bp, Zea Mays
gttactttgaccctgacaaggacatctcttaattaataatgatgtacatggatagcagtaccaccaaacatttgagatagtttgagaaagcaaaatggcactatcttactttactggcacatggtattctggatccattgtagcaggtattttctggctcaaattttacagattgaaggtgggctgtcgcttgggatcgaaaaggatagggcatctactgccaccatggggtttgtcgacgactccaaagacatataacaaacttgctactcaaatcaccctccctccatcttacatagctcctgaggacactggtaaaattagtggaacaatttggaccgaggaagtggtcttacatagcacaactgctgccagcaggagtggggaagcaatgcagagaaagatggcacaaccatttgaggccaaacatcaagggaaccagcttccagtgcctcttgtaccgatcatcggcaagggagtgctagaggaggaggttatggtgagtcacacgtgggggatcgctgccgctgggtcaaacacctcgtgcttcaccagaactgaagccgacccagtctccttcatcaacatggtgactcctcccactattgaggtacacaggcactcatgcatcatccactctgtcccatccttgccgagcgcaacccatggaagtggtggcacggactaaggtggtgagcacgacggagagccaacctatagaagatatggaaatatcacggttcacttggacaattgagacattcaccaggttcagtgggaaagaagcaccattcagaggtttttgttggtggtggattcaaatgtatgcgaagaatgacattcttttccttgatttcccctgttttgcgactccagctgaggcactttgagtatatgagagataccatggtaaagctgccgcatgaactagagactgcacggattaatgagttgcttgggaatattcaggccgtggttactcctgaaatgaatcagacaacaataattgaggaatttgacaagggacaccagcttgaagaagttaaaacggtcaatgagcaagtggttgttcctcctgtaaagaatctaagcaaacaaaaatcccaacaaatccaagaagactaaaagaggagaattactatctgtgttgttttttctaccaaattgggagaactatgttagcagtttcatgatgaagttgcttgaggaaggttttgatctttgtgcacatctactagctctatgacgctaccatttcatggaaatatcgtgtttatcttaaagtaatgacgca

SEQ ID NO: 11906 - DNA, 1566 bp, Zea Mays
atccaagcttatcaatcatatttgtgtatttgtgcatataaatttctttgctgcatggtgcattggatcaaggcataaagttactttgaccctgacaaggacatctcttaattaataatgatgtacatggatagcagtaccaccaaacatttgagatagtttgagaaagcaaaatggcactatcttactttactggcacatggtattctggatccattgtagcaggtattttctggctcaaattttacagattgaagccaattcttttgggatcatgtgcaatttgctgttaaaatgagttatccccacacgctgaggttgcgcctgtgccagggcagaagacacgcctacatcgtggacggatatgcgctgccatggactgacctcagcgcagatcgtgattgatttgtgggtgaccccggtttgatgtctggttgttgggctgcgcaggtgggctgtcgcttgggatcgaaaaggatagggcatctactgccaccatggggtttgtcgacgactccaaagacatataacaaacttgctactcaaatcaccctccctccatcttacatagctcctgaggacactggtaaaattagtggaacaatttggaccgaggaagtggtcttacatagcacaactgctgccagcaggagtggggaagcaatgcagagaaagatggcacaaccatttgaggccaaacatcaagggaaccagcttccagtgcctcttgtaccgatcatcggcaagggagtgctagaggaggaggttatggtgagtcacacgtgggggatcgctgccgctgggtcaaacacctcgtgcttcaccagaactgaagccgacccagtctccttcatcaacatggtgactcctcccactattgaggtacacaggcactcatgcatcatccactctgtcccatccttgccgagcgcaacccatggaagtggtggcacggactaaggtggtgagcacgacggagagccaacctatagaagatatggaaatatcacggttcacttggacaattgagacattcaccaggttcagtgggaaagaagcaccattcagaggtttttgttggtggtggattcaaatgtatgcgaagaatgacattcttttccttgatttcccctgttttgcgactccagctgaggcactttgagtatatgagagataccatggtaaagctgccgcatgaactagagactgcacggattaatgagttgcttgggaatattcaggccgtggttactcctgaaatgaatcagacaacaataattgaggaatttgacaagggacaccagcttgaagaagttaaaacggtcaatgagcaagtggttgttcctcctgtaaagaatctaagcaaacaaaaatcccaacaaatccaagaagactaaaagaggagaattactatctgtgttgttttttctaccaaattgggagaactatgttagcagtttcatgatgaagttgcttgaggaaggttttgatctttgtgcacatctactagctctatgacgctaccatttcatggaaatatcgtgtttatcttaaagtaatgacgca

SEQ ID NO: 11907 - DNA, 725 bp, Zea Mays
atggcactatcttactttactggcacatggtattctggatccattgtagcaggtattttctggctcaaattttacagattgaaggtgggctgtcgcttgggatcgaaaaggatagggcatctactgccaccatggggtttgtcgacgactccaaagacatataacaaacttgctactcaaatcaccctccctccatcttacatagctcctgaggacactggtaaaattagtggaacaatttggaccgaggaagtggtcttacatagcacaactgctgccagcaggagtggggaagcaatgcagagaaagatggcacaaccatttgaggccaaacatcaagggaaccagcttccagtgcctcttgtaccgatcatcggcaagggagtgctagaggaggaggttatggtgagtcacacgtgggggatcgctgccgctgggtcaaacacctcgtgcttcaccagaactgaagccgacccagtctccttcatcaacatggtgactcctcccactattgaggtacacaggcactcatgcatcatccactctgtcccatccttgccgagcgcaacccatggaagtatgcgaagaatgacattcttttccttgatttcccctgttttgcgactccagctgaggcactttgagtatatgagagataccatggtaaaggtaaatgatcgctgagttccctctgtaacttgatctgaatagagatgctagcaaat

SEQ ID NO: 11908 - DNA, 935 bp, Zea Mays
atggccgcctcttccattcctccttgccaggttcaggagcaagatgacgaggtggtggacaggaacatcctcccctactgcagcatcgacaggaagcagaagaagacgctgggagagatggagcaggagttcctgcaagccctccaggccttctactatgaccagaaggccatcatgtccaacgaggagtttgacaacctcaaggaggagctcatgtgggaggggagcagcgtcgtcattgctaaacgaagatgagcaaaagcttttggaagcttccatggcctatgcctccggcaacccgatcatgtctgatgctgagttcgacgagttgaaactcaaattaaagacagacgaacagtgtcattgtgaaggagggtcccaggtgcagtctaaggagtcataaggtgtacagtgacttgaatgttgactacataaagatgtttctgctaaatgttccagccaccaccgtagctctgggactgttctttttcattgatgaattgactggttttgagatcaatgtgttccaggtcagtgtccacctgattcaactgccagagcctttcggattcattttcacatggtttgctgctttgcccctaatattgttcttagcacagtcattgactaaggctatagtccaggactttttaatcctcaagattcgtgtctaccctcttgatgtgcttatttctaagaagcacccttccaatgttctatttccagttgcagtgccgagctggagtatgactcaaaatctcgggtgatcacacttccagaagcatcaaatgcataaacatagttgcttaggatccattgtagcaggtattttctggctcaaattttacagattgaagggcagaagacacgcctacatcgtggacggatatgcgctgccatggactgacctcagcgcagatcgtgattgatttgtg

SEQ ID NO: 11909 - DNA, 2986 bp, Zea Mays
tccttatttgcttgcgatttgttttgcgccctctcttgcggactcatttattattactaacgctaaccccggcttgtagttgtgattatttttgtaaatttcagtttcgccctattcaccccccctctaggcgactatcagaaggcggcgtcgaggtggatggcacaattctctcggttgccaaggaactgggcctcaagagcgagccaagcctggcgagccgcacccctgtgctcgcggacgatgtcttacagctcgatggtgagagtctcgaggatccaggagaggacgacactgtccatccggaaccaggagaggcgaggcgtggggcggttagtgagaacatggttgtcgagtgcgtagcgctacagggtgagggggaccaaatcccaccagcgagcgtaggcagatgaggtggtgtcggggacgacaggcaccagggaccggatgttctggacaccggcggcctgggcgtggagcttggcgaccaccgaagccacatagtcagggaccctcatcggtggcgggctcgagcggaggaccaccaagaaggagctcgacctcggctagctggcgagcgagagccttcgtagaaacacgctcctactcccaagcgagagccgcaacccgctcacgtgcctgagcgatggccatggacgaatgggcagcagcgacaacaacgacgagggtggaatgcgccacggacatagtcgccggagggggagggtctgaagctgtggatccagtctcgtgaggcccgagtggtggagggaacccgagggagatcggcaccccatcaggagttgcttcaagagtgtcagtcaacgtgacggacggcgacggcagggacgacgcaggtgcccctagagcacccttagtcaaagccaaggaaacagggcccacggccaggggcacccctgacacctggccagaggcctccccacacgcccggcagccccgcaggagacccccccgcgcctggagccgcgcgcctggagccgcgcgcctgcagccgcgatggcagcggggcccgcacctacggctgtgatgggagggggccgatgggcaagggcggggccctagtcgccgtgcgtcctggcaggcgtggtggctggaaggggaaaggaggagcgcgagagaggtgggaaggaggaggggatctcgtcggccatggcaggcggcgccggccacggcagcccactgggggcggcggcgcaggggaggggagaggggagagagaaaaccctagatctataccatattggaggagaataatacaatacaaaaaaacttgacctgcggggggtaagacagcccccgggcattgtattaagaagaagaccttctcacacaggtcaagaaaacccccgaacccctgccccacccatacacagcggcatcgaagcacatgtgagaactaccacgaccagggctgagccttagacctgtgctttggcgtgggacagacgaggggatttttttaaccacagcctgaaattcgctcccacggggagtcgaacccaggacctgaggagtgctactcaggccacctaaccaactcagctagaggccctttcgcgaataatacaatacacaaacagcccatagggcatagtacataaagcccaaggggcaaaatacataaatgctaacactgtctgccttgcaaattagtatgaacacctctcaaaaagatttggcccacactctttttttgcgacaactctagtctctaccattgatgtttagttgttgctttgtaaaaaactcgtccggggagggtaagaccaccctcggggtatttcattaatagaaggccgcggcaacggtcccgaccgagaaacccccgaatcctatcctcccatcactaacgagccgattcaagctgccaactctgtaaaggaccacccagacacgagggtggcgcacagccgagtcgtagcctgaaagcggatgaggaacaacgaggtgattttttttgtgcagggccagggtttgaacccgtgacctggtgaaagggactctgctgccttcaccatgggatattaccccatctgcagctgttgctttgtagtcaatccagtaaataggctgtggccaagtacaaatagagttacatgtttatttgttgttcctaaaatgtatgatacataaactgcatttcagttgggacatataacatcaaagcaattacaatgaagtgtctgttatatagatggtgctaaagagcccacctatgttgaaaagaatttctgatccaatgatataaaatcaaaatgtggtcaagcgcatgcaagatgtaccgtgtgcagcctgacgatataaaatctggcattttattttgatttcttttttttttctaggaacagggagctccagcgcttgtggattatatagaataataaaggtggctgtccgcacagtatagcaaactgcgaagcctgcaactactgaagtttggtctgtagcaggctcagttgggaatgtgtagcagagtatggatggtcatgatccatggtgtggatgagttgcagagtactgtgctgtgctgtgtgtgtagtaggaaggaaaagcttaggtaaagctgccgcctgccgattgtgcagtcagtccagtacgttggtatgcgaccatctcaagtctgggctttgatttgaagcaatgatttttggcaatgaatgaacaagctatctactgtatatacagttatacacacaaacgatttgcactgtttttgtacagttatgtttgcaaggcccaagtctattggccggccacggcctggctgactgatgagcccaagcctggcacacggtccacggcccaaggcccgaactcctaactgtttttttttttttgaataactgactgtagggacagtattctcattaatgtggaaaaaataaaaaggggttatgtacaggttacaggcacgagagtttctttacacaagagcggaggaggttacaggttttgcacatactgc

SEQ ID NO: 11910 - DNA, 1536 bp, Zea Mays
ctcaattctcaccacacacacgcacacactatcgccacccaccgcctcagctcgatcgcaacgcgcttggcatggcgtccgaggtgtggctatcgccggcgtctcgcctcccatccctctccaacgcaccacctcgcttccgctccaagcctgccactacaaccgcctccttgctctctccctgcccccgcccccgccctgcctgtgttgcgcgtccgccgccgccgccgacttcgtgccaccgagcagcaaggccaggttcaggagcaagatgacgaggtggtggacaggaacatcctcccctactgcagcatcgacaggaagcagaagaagacgctgggagagatggagcaggagttcctgcaagccctccaggccttctactatgaccagaaggccatcatgtccaacgaggagtttgacaacctcaaggaggagctcatgtgggaggggagcagcgtcgtcattgctaaacgaagatgagcaaaagcttttggaagcttccatggcctatgcctccggcaacccgatcatgtctgatgctgagttcgacgagttgaaactcaaattaaagacagacgaacagtgtcattgtgaaggagggtcccaggtgcagtctaaggagtcataaggtgtacagtgacttgaatgttgactacataaagatgtttctgctaaatgttccagccaccaccgtagctctgggactgttctttttcattgatgaattgactggttttgagatcaatgtgttccaggtcagtgtccacctgattcaactgccagagcctttcggattcattttcacatggtttgctgctttgcccctaatattgttcttagcacagtcattgactaaggctatagtccaggactttttaatcctcaagattcgtgtctaccctcttgatgtgcttatttctaagaagcacccttccaatgttctatttccagttgcagtgccgagctggagtatgactcaaaatctcgggtgatcacacttccagaagcatcaaatgcataaacataggaacagggagctccagcgcttgtggattatatagaataataaaggtggctgtccgcacagtatagcaaactgcgaagcctgcaactactgaagtttggtctgtagcaggctcagttgggaatgtgtagcagagtatggatggtcatgatccatggtgtggatgagttgcagagtactgtgctgtgctgtgtgtgtagtaggaaggaaaagcttaggtaaagctgccgcctgccgattgtgcagtcagtccagtacgttggtatgcgaccatctcaagtctgggctttgatttgaagcaatgatttttggcaatgaatgaacaagctatctactgtatatacagttatacacacaaacgatttgcactgtttttgtacagttatgtttgcaaggcccaagtctattggccggccacggcctggctgactgatgagcccaagcctggcacacggtccacggcccaaggcccgaactcctaactgtttttttttttttgaataactgac

SEQ ID NO: 11911 - DNA, 1532 bp, Zea Mays
cttcactcctccacacatccaaaagcctcgtccttcccacttcccacttcccacccatcatatctccatcccgcggttccgcccagctgctccacatctcaattctcaccacacacacgcacacactatcgccacccaccgcctcagctcgatcgcaacgcgcttggcatggcgtccgaggtgtggctatcgccggcgtctcgcctcccatccctctccaacgcaccacctcgcttccgctccaagcctgccactacaaccgcctccttgctctctccctgcccccgcccccgccctgcctgtgttgcgcgtccgccgccgccgccgacttcgtgccaccgagcagcaaggccaggttcaggagcaagatgacgaggtggtggacaggaacatcctcccctactgcagcatcgacaggaagcagaagaagacgctgggagagatggagcaggagttcctgcaagccctccaggccttctactatgaccagaaggccatcatgtccaacgaggagtttgacaacctcaaggaggagctcatgtgggaggggagcagcgtcgtcattgctaaacagacgaacagtgtcattgtgaaggagggtcccaggtgcagtctaaggagtcataaggtgtacagtgacttgaatgttgactacataaagatgtttctgctaaatgttccagccaccaccgtagctctgggactgttctttttcattgatgaattgactggttttgagatcaatgtgttccaggtcagtgtccacctgattcaactgccagagcctttcggattcattttcacatggtttgctgctttgcccctaatattgttcttagcacagtcattgactaaggctatagtccaggactttttaatcctcaagattcgtgtctaccctcttgatgtgcttatttctaagaagcacccttccaatgttctatttccagttgcagtgccgagctggagtatgactcaaaatctcgggtgatcacacttccagaagcatcaaatgcataaacataggaacagggagctccagcgcttgtggattatatagaataataaaggtggctgtccgcacagtatagcaaactgcgaagcctgcaactactgaagtttggtctgtagcaggctcagttgggaatgtgtagcagagtatggatggtcatgatccatggtgtggatgagttgcagagtactgtgctgtgctgtgtgtgtagtaggaaggaaaagcttaggtaaagctgccgcctgccgattgtgcagtcagtccagtacgttggtatgcgaccatctcaagtctgggctttgatttgaagcaatgatttttggcaatgaatgaacaagctatctactgtatatacagttatacacacaaacgatttgcactgtttttgtacagttatgtttgcaaggcccaagtctattggccggccacggcctggctgactgatgagcccaagcctggcacacggtccacggcccaaggcccgaactcctaactgtttttttttttttgaataactgac

SEQ ID NO: 11912 - DNA, 1763 bp, Zea Mays
ctcatctccaaatattgctcgcaattggaaccaattttgtcaaagaaaaattcatagcagtgatctcccaccacatgacaagcgtcgagatagcagcaggagcaggaattgtcaacgggggcgctctcctttcttcttcactcctccacacatccaaaagcctcgtccttcccacttcccacttcccacccatcatatctccatcccgcggttccgcccagctgctccacatctcaattctcaccacacacacgcacacactatcgccacccaccgcctcagctcgatcgcaacgcgcttggcatggcgtccgaggtgtggctatcgccggcgtctcgcctcccatccctctccaacgcaccacctcgcttccgctccaagcctgccactacaaccgcctccttgctctctccctgcccccgcccccgccctgcctgtgttgcgcgtccgccgccgccgccgacttcgtgccaccgagcagcaaggttcaggagcaagatgacgaggtggtggacaggaacatcctcccctactgcagcatcgacaggaagcagaagaagacgctgggagagatggagcaggagttcctgcaagccctccaggccttctactatgaccagaaggccatcatgtccaacgaggagtttgacaacctcaaggaggagctcatgtgggaggggagcagcgtcgtcattgctaaacgaagatgagcaaaagcttttggaagcttccatggcctatgcctccggcaacccgatcatgtctgatgctgagttcgacgagttgaaactcaaattaaagacagacgaacagtgtcattgtgaaggagggtcccaggtgcagtctaaggagtcataaggtgtacagtgacttgaatgttgactacataaagatgtttctgctaaatgttccagccaccaccgtagctctgggactgttctttttcattgatgaattgactggttttgagatcaatgtgttccaggtcagtgtccacctgattcaactgccagagcctttcggattcattttcacatggtttgctgctttgcccctaatattgttcttagcacagtcattgactaaggctatagtccaggactttttaatcctcaagattcgtgtctaccctcttgatgtgcttatttctaagaagcacccttccaatgttctatttccagttgcagtgccgagctggagtatgactcaaaatctcgggtgatcacacttccagaagcatcaaatgcataaacataggaacagggagctccagcgcttgtggattatatagaataataaaggtggctgtccgcacagtatagcaaactgcgaagcctgcaactactgaagtttggtctgtagcaggctcagttgggaatgtgtagcagagtatggatggtcatgatccatggtgtggatgagttgcagagtactgtgctgtgctgtgtgtgtagtaggaaggaaaagcttaggtaaagctgccgcctgccgattgtgcagtcagtccagtacgttggtatgcgaccatctcaagtctgggctttgatttgaagcaatgatttttggcaatgaatgaacaagctatctactgtatatacagttatacacacaaacgatttgcactgtttttgtacagttatgtttgcaaggcccaagtctattggccggccacggcctggctgactgatgagcccaagcctggcacacggtccacggcccaaggcccgaactcctaactgtttttttttttttgaataactgac

SEQ ID NO: 11913 - DNA, 1207 bp, Zea Mays
atggccgcctcttccattcctccttgccaggttcaggagcaagatgacgaggtggtggacaggaacatcctcccctactgcagcatcgacaggaagcagaagaagacgctgggagagatggagcaggagttcctgcaagccctccaggccttctactatgaccagaaggccatcatgtccaacgaggagtttgacaacctcaaggaggagctcatgtgggaggggagcagcgtcgtcattgctaaacagacgaacagtgtcattgtgaaggagggtcccaggtgcagtctaaggagtcataaggtgtacagtgacttgaatgttgactacataaagatgtttctgctaaatgttccagccaccaccgtagctctgggactgttctttttcattgatgaattgactggttttgagatcaatgtgttccaggtcagtgtccacctgattcaactgccagagcctttcggattcattttcacatggtttgctgctttgcccctaatattgttcttagcacagtcattgactaaggctatagtccaggactttttaatcctcaagattcgtgtctaccctcttgatgtgcttatttctaagaagcacccttccaatgttctatttccagttgcagtgccgagctggagtatgactcaaaatctcgggtgatcacacttccagaagcatcaaatgcataaacataggaacagggagctccagcgcttgtggattatatagaataataaaggtggctgtccgcacagtatagcaaactgcgaagcctgcaactactgaagtttggtctgtagcaggctcagttgggaatgtgtagcagagtatggatggtcatgatccatggtgtggatgagttgcagagtactgtgctgtgctgtgtgtgtagtaggaaggaaaagcttaggtaaagctgccgcctgccgattgtgcagtcagtccagtacgttggtatgcgaccatctcaagtctgggctttgatttgaagcaatgatttttggcaatgaatgaacaagctatctactgtatatacagttatacacacaaacgatttgcactgtttttgtacagttatgtttgcaaggcccaagtctattggccggccacggcctggctgactgatgagcccaagcctggcacacggtccacggcccaaggcccgaactcctaactgtttttttttttttgaataactgac

SEQ ID NO: 11914 - DNA, 1241 bp, Zea Mays
atggccgcctcttccattcctccttgccaggttcaggagcaagatgacgaggtggtggacaggaacatcctcccctactgcagcatcgacaggaagcagaagaagacgctgggagagatggagcaggagttcctgcaagccctccaggccttctactatgaccagaaggccatcatgtccaacgaggagtttgacaacctcaaggaggagctcatgtgggaggggagcagcgtcgtcattgctaaacagacgaacagtgtcattgtgaaggagggtcccaggtgcagtctaaggagtcataaggtgtacagtgacttgaatgttgactacataaagatgtttctgctaaatgttccagccaccaccgtagctctgggactgttctttttcattgatgaattgactggttttgagatcaatgtgttccaggtcagtgtccacctgattcaactgccagagcctttcggattcattttcacatggtttgctgctttgcccctaatattgttcttagcacagtcattgactaaggctatagtccaggactttttaatcctcaaggggccatgtcctaattgtggtactgaaaacctttccttctttgggactatactgtcagtctccagtggcggtacaacaaacaaagtgaaatgtgcaaattgcagtgccgagctggagtatgactcaaaatctcgggtgatcacacttccagaagcatcaaatgcataaacataggaacagggagctccagcgcttgtggattatatagaataataaaggtggctgtccgcacagtatagcaaactgcgaagcctgcaactactgaagtttggtctgtagcaggctcagttgggaatgtgtagcagagtatggatggtcatgatccatggtgtggatgagttgcagagtactgtgctgtgctgtgtgtgtagtaggaaggaaaagcttaggtaaagctgccgcctgccgattgtgcagtcagtccagtacgttggtatgcgaccatctcaagtctgggctttgatttgaagcaatgatttttggcaatgaatgaacaagctatctactgtatatacagttatacacacaaacgatttgcactgtttttgtacagttatgtttgcaaggcccaagtctattggccggccacggcctggctgactgatgagcccaagcctggcacacggtccacggcccaaggcccgaactcctaactgtttttttttttttgaataactgac

SEQ ID NO: 11915 - DNA, 2308 bp, Zea Mays
gagctatcagtagctctacaccttggataagttataaatagccctagaaatctaattgacctatctagaagagttggaaagctcagattcaacaaaacacacttttggagcttgagctgaatcaaggaatatgagttagagaaatgagaatgtccaaggatcatgacttagactagttggaaagtcactagatatatttgtttaagtcataggaacacccacaagtgcagccaaacttgtttgaagaagatatgatcaaaagtgtcaaaattggtctgtactctagcgcatcagatcggtccggtgggtcactgaaccgtctgcgcagggggtctggacttggatatctggcggttggctatccaccagaccggtactgtagggggtccggtgcaccaccccatagactgttttttgcccgatcactccaacagctatttgggtagttggaggctataaataccccccaaccagcacattgaagacagaagagctacaccagacactactacgtcaagtgcaacaactcttacgcattcaatagcctccaagtgccaaatcaagtgattcgagctcgagaaaattagtgccttgcgagagtttttttatttgagttgttgacaagttcttatgcctttgttttggttttctttcttattcccaacctccattcattcactcacttgtaaagctagcaagagacacctaaggatgtgtttggtttgaggtcaaagtaggatgaggcagggtcatccctaacagtcaccactttttttatttggtagaagtgatgaacttggatggaaccatcccagtttttgtttagatggtgttcagctgtcactgctcgagaggggcgggggcggccatcccagttttcgggaccgcgagagaagcgggggcggcaccgtccactcgattttttaggaccacgccaccaccgaaaattgctccggtgttcacctcgcccccgcgtgacccccacccaaacatcatagaaatggccgcctcttccattcctccttgccaggttcaggagcaagatgacgaggtggtggacaggaacatcctcccctactgcagcatcgacaggaagcagaagaagacgctgggagagatggagcaggagttcctgcaagccctccaggccttctactatgaccagaaggccatcatgtccaacgaggagtttgacaacctcaaggaggagctcatgtgggaggggagcagcgtcgtcattgctaaacgaagatgagcaaaagcttttggaagcttccatggcctatgcctccggcaacccgatcatgtctgatgctgagttcgacgagttgaaactcaaattaaagacagacgaacagtgtcattgtgaaggagggtcccaggtgcagtctaaggagtcataaggtgtacagtgacttgaatgttgactacataaagatgtttctgctaaatgttccagccaccaccgtagctctgggactgttctttttcattgatgaattgactggttttgagatcaatgtgttccaggtcagtgtccacctgattcaactgccagagcctttcggattcattttcacatggtttgctgctttgcccctaatattgttcttagcacagtcattgactaaggctatagtccaggactttttaatcctcaagattcgtgtctaccctcttgatgtgcttatttctaagaagcacccttccaatgttctatttccagttgcagtgccgagctggagtatgactcaaaatctcgggtgatcacacttccagaagcatcaaatgcataaacataggaacagggagctccagcgcttgtggattatatagaataataaaggtggctgtccgcacagtatagcaaactgcgaagcctgcaactactgaagtttggtctgtagcaggctcagttgggaatgtgtagcagagtatggatggtcatgatccatggtgtggatgagttgcagagtactgtgctgtgctgtgtgtgtagtaggaaggaaaagcttaggtaaagctgccgcctgccgattgtgcagtcagtccagtacgttggtatgcgaccatctcaagtctgggctttgatttgaagcaatgatttttggcaatgaatgaacaagctatctactgtatatacagttatacacacaaacgatttgcactgtttttgtacagttatgtttgcaaggcccaagtctattggccggccacggcctggctgactgatgagcccaagcctggcacacggtccacggcccaaggcccgaactcctaactgtttttttttttttgaataactgac

SEQ ID NO: 11916 - DNA, 1144 bp, Zea Mays
atggccgcctcttccattcctccttgccaggttcaggagcaagatgacgaggtggtggacaggaacatcctcccctactgcagcatcgacaggaagcagaagaagacgctgggagagatggagcaggagttcctgcaagccctccaggccttctactatgaccagaaggccatcatgtccaacgaggagtttgacaacctcaaggaggagctcatgtgggaggggagcagcgtcgtcattgctaaacgaagatgagcaaaagcttttggaagcttccatggcctatgcctccggcaacccgatcatgtctgatgctgagttcgacgagttgaaactcaaattaaagacagacgaacagtgtcattgtgaaggagggtcccaggtgcagtctaaggagtcataaggtgtacagtgacttgaatgttgactacataaagatgtttctgctaaatgttccagccaccaccgtagctctgggactgttctttttcattgatgaattgactggttttgagatcaatgtgttccaggtcagtgtccacctgattcaactgccagagcctttcggattcattttcacatggtttgctgctttgcccctaatattgttcttagcacagtcattgactaaggctatagtccaggactttttaatcctcaagattcgtgtctaccctcttgatgtgcttatttctaagaagcacccttccaatgttctatttccagttgcagtgccgagctggagtatgactcaaaatctcgggtgatcacacttccagaagcatcaaatgcataaacatagggccagggtttgaacccgtgacctggtgaaagggactctgctgccttcaccatgggatattaccccatctgcagctgttgctttgtagtcaatccagtaaataggctgtggccaagtacaaatagagttacatgtttatttgttgttcctaaaatgtatgatacataaactgcatttcagttgggacatataacatcaaagcaattacaatgaagtgtctgttatatagatggtgctaaagagcccacctatgttgaaaagaatttctgatccaatgatataaaatcaaaatgtggtcaagcgcatgcaagatgtaccgtgtgcagcctgacgatataaaat

SEQ ID NO: 11917 - DNA, 5378 bp, Zea Mays
ctggagtatgactcaaaatctcgggtgatcacacttccagaagcatcaaatgcataaacataggtatgagcctacactctgcagcatatcttatatttttttggaaaggacggcaagagtttttccataatctttattagatgaagaaaaataaaaaaggttgtatagacactaaacgaaaagaaagcaaagcgcttcagctggggtgactcggaacaccaaagcaagacaggaaaccacagaccactcccaactgaaaaagaaactggcttaagcgcactccacaaaccacccataccggcagccgaactactgaggacattagaagctgaaacctaaaccgactactctgtagctgtgctaggttgcataaccaaattgtattgggtgatgtcatctttgcacaaacttgtgacttcacttggacgtctagtcttttgttggaagtttcttccattacactccttgccaccagaaatagattatgattccatcgaacactttctttgttgacttatcaaaggtggctctacatttgcccagtaactataaatggatcctctttggtctatattccgaatgtgggggatatcacgccagctttgaagtattgcccaagtctcctttgtgaacactctgcagcatatgtagcagataaatgagtgaaactttttgtactgcctattggaggagaataatacaatacacaaacagcccatagggcatagtacataaagcccaagggcaaaatacataaacgctaacacctcccacagtcgaaactctagttacctcagacattgagactggaccgaaagttggagaacaccgaggagggaagccccttggtgaagatgtcagcgaactgcgaagtcgtcggaacgtgaggacccagacatcaccgatggcgacgcactcacggacgaagtggaggtcgatctcaacatgcttcgtgcgttggtgctgaacggggttggagaggtacaccgcactgacatagtcgcagtagacaagagtgctccggtgaagaggctggtggagctccaggataagttggcgcagcctggacgcctcagccacaccgttggcatggcacgatactcagcctcagcactcgagcgggagacgacgggctgtctcttggaagaccgggagacgaggttgtctcccaagaagacaacgtagccggacgtggagcgacgtgtgtccgagcagccaacccagtcagcatcggtgtagacaacaagctcagtcggagtggattgccgggggagaagaccgaaattgagggtgccacgaaggtagcgaagaatccgcttaacagcggtgaggcgcggctcccgaggatcatgcatatgaaggcacacgtgttgaacaccataggagatatctggcgagtgaaagtgaggtacagtagggcaccagccaaactcctgaaggcagtggggtcatcgataggagcaccgtcaatagaggagatcttggcctgagtatcaaccagggtggaatagggcttgcagtcagtcatccaagcacgatccagaatatctagactgtagtggcgctgctggaggaagagaccagtagaccgctgctcggcaatacccaagaaatggtgaagctgatcgagatccttcattgcaactgttgtaaggcagtgatggtccgatgcaacagagcagagctggaggccgtaaagacaatgtcatccacatacagtagcaggtacataacattcgtgccctggtggtagaggaacagagaggtgtctgaccgggcctcaacaaaccctagagagagcagaaaggtggcgaaatggttgtaccaggcccgaggcatctgcttatgcccatacaaggacttgtttaggcggcaaactagatctgggcgagctggattcacaaaaccagtaggctggctgcaatacactgtctctgtcaggtaccatgaaggcgtacttgacatcctgctggtgaatgggccaagagcacgagactgaaagagccaggacagtgcgaatagtcgccggtttcaccaccgagctaaaagtctcatcatagccaacacgtggtcactgagtgaaaccccgaagaacccatctggccttgtaccgctctagagagccattagccttcttatgagtgaagacccacttgccggtgacgacgttaccacaggtgggacgtggcaccaagtctcaagtgtggttggcgagaagcgcctcgtactcctccatagcgcgccgccagtgaagatcggcaagcgcgccacggacggaggacggtacgggggagacgaccgcagaggtggacgactcggggatggtcgccgagagagtcaggtgatccacgagacgaagcgtcccggtggccgacgtgtcaccatcgggtgaacatggcgagggtcccgggggaggaggggagggtgggacaccgacggctcggcgagggaactggtcggtgcaccctcacaagcacgacgctagtagacgtgcatgggctcgacgaagcggcgaggcaccaacggagggggaggcgctgtcggagaaggtggtagctcgatccgcgggcatcgttggtagacgcgcacaaagcaaggggggtccaggcctgggcgaggtgggagcaccgcatccgtgcgcggcacagcagagggctctgcagccacaggtggcgcaacaggggagtctggggccataggagggacagcaggagagaccggggccgtgcggggcacgacagacggggccgaagaggcctcatgtaccccaggatgcatgagcggcgacaacggggcggttggtgagtgacctgcaggggggagaaacaaaggtggctggacaggaggagccacaaggtcagcatcaaataaacttgccaagtcagagctcgaggtggaagcagtggtagcgaaagtgaagcaggacttatcgaaaaggacatggcgagagataatgacaagacgagaggagagatcataacattgatacctcttatgatcaggagagtacccatggaagtcacaacgagacgagcggggtgcaaacttgtggggagcagtggtcgagaggttgggatagcaagcacacccgaagacacgaaggtgatcataggagggacgagtaccaaagagagcaaagtgcggagtgggagcactaattgccttggtgggaaggcgattgagcagataggtggctgtgtgcagggcctcggcctagaagcgagcgggaaccgaggcctggaacatcagggagcgcatgatgtcgttggtggtccgaatcatgcgcttagccttgccattccgggaagagtgtaggggcaagacatgcaaagctgaacaccgtgagtgagaaaggagtgagaaaggagtgggaggtagagttatcaaactcacgcccgttgtcgcactgattagcctgaatagtgcgaccgaactgagtagacacccaagcaaagaagtgagagatagtcgtgaaagtatcggatttcaagcgcaggggaaaagtccaggagtaatgcgagaaatcatcgacaataaccaggtagtacttatatcccgaaacactgatcataggagaggtccacaagtcatagtgaatgagagcaaaaggacgtacaacctgagaggtagaggaagagaaacgaaggcgtacatgacgacctaactgacaagcatgacagagggactcatgtgttctttgagtacaagagatggcggagctacataacaacttggacaaagcatccatgccggggagcctgcaaaagtcgttctgtctagctgcaacgctttaatcatgcgccttattatagtggtttcactttcacaataataaatgcggccatactcatgaggccaatgcacgagcaaacaaacagccttttttgtgcggatgggaaaggtgatgttacatgcatgtactgatgtgcgtgaggggaatgttaggagtatacatgagtgaataatgggcagaaaacatctggtgtaaagatgtgaaggatgccctaattaaggagtaactgtgtacattcacgtagctgatatatattctcttttgtgacggatcggaacgggctacggtaaaccacgtgccaggttgaaaagaggcttttggcactgacaggttggtcttaatctttagcaatgtgtaccgtgtgtgcacgtcttttgctactggaccagatcgattagcagtgcgcgctttgaatacaatgtttcaagactgacgcgggggtggggggggggtaaaagaaaacatcccctcttatgtctcttattttgatagtcagtcacactatttatcacaaagaacatgtcctggctgttgttttgtttcagacaatttgtttaccagagctgctcttttgttggatcaagaaaggacacagaagcagtagtatgtcgttgagcagtgtgaaagaaacaagtcaaagctagcgtttgaggagcttaatcggggccatgctagctaaatgaagctgtctaggaagcaggaacatcggagggattatattgtccatccacccattcaaagctaagatgtctctgtctgaattgacaaatggcagccagcaaccagcatagcgcggcacatcacacacattgaacagaccacacaaagctctgatgcctttcgtccagcatgccaaggggcgacggccaaggggcgctatggccacctcaatcacctccaccaccacggccgccactcagaacaccatgagcccccggcggcgacggcgatgatcaccccataatccggaatccggaggcggcgtcgacgtggtaggagcaagcggggtgggcgagggtgggtggagctgaagagagccaaggccacaggagagtgacccacgacattatcagtgagcccctctagcagcagtcgttccgcacctgctagaaggtagggaacggacaggtgtgcacgatcagcggccgcaagtgggagtagcactcgttgagccccagaaggaggtttaggacaagcgtgcggtcactgatcggctcgccgagcgcacaaaaatcgtctgtcgtcctctcaagctgacgacagtactcggtgaccgagagatccccctgggtgaagatgcagaaggtgaaagggaattaggcttacacctagttcctatataattttggtggttgaattacccaacacaaatctttggactaactagtttgcccaagtgtatagattatacaggtgtaaaaggctcacactcagccaataaaaagaccaagttttggattcaataaaggagcaaaggggcaaccgagggcaccccttgtctggcgcaccggactgtccggtgtgccaccggacaatgaacagtacctgtccggtgcaccaggggacttagactccaactcttcac

SEQ ID NO: 11918 - DNA, 1676 bp, Zea Mays
gtaacaaaaatacaaacacaagtgttgcgagctcacttgggccacacttcttcccacagatttcactaattttcttggacatgctaacagtctacagaatgtacagcgagcttgtatcaagcacgattgctgaaggaggaccctttgcctcaaggacgtcatttgtaaaactcttgagatctgtcaagagggaaaccctaaagttgatcgagacttttgtggacaaggcggaagatttgccacatataggaaagcagtttgtaccaccaatgatggatcctgttcttggtgattatgctagaaatgtacccgatgcaagggagtctgaagttctgtccttgtttgcaacaatcattaacaagtacaaaggggaaatgcttgaggatgtgcctcgtatatttgaggctgttttccagtgcacccttgagatgattactaagaactttgaagattatcctgagcaccgcctcaaatttttttctttgcttcgtgcaattggcacccattgcttccaagcattaatccagctttcaagtcagcaattgaagcttgtgatcgattcaattaattgggcgttcagacatacagagagaaatattgcagagactggccttagcctgttgttggagatcttgaaaaaattccaggcttcaggattccaaaaccaattctacaaaacctactttttgacaattgagcaagagatttttgcagtcctcacagacacattccacaaacctggtttcaagcttcatgtttcggtgctgcaacacttgttttgtgcggttgatggtctaacggagcctctatgggacgcgtcttctgtaccttaccaatatacggataatgctatgtttgttcgagattacaccataaagctcttagggacatcatttcctaacatgacagtaaccgaggtgacaaagtttgtagatggtcttcttagttcaaaacttgatcttccaagcttcaaaaaccatattagagacttcctggtgcagtccaaggagttctcagttcaggataacaaggatctatacgcggaagaggctgctgcccaaagagagagggagcgccaacgtatgcttgccattccggggctcattgcccctagcgagttgcaagacgagatggtagattcgtagtgttccttgttgattcagctctctaatgtagcttcctgtttgttggtccggcatcggaatacctctggagccctcgacgtccaagttttcttccagggtggtgaaagaaggtgcctgctgtaattttatttttggttacctccacatgatgctgattccaagatttgtggtagtagacagtcagttttgccgcatgactgctgctgggggtctctcagcagctgtggttgcctggatgtgttagcagcggctcttgtgctcggtgtactttgctaacattgatttgctgtctcatcaacaagggtaggtttggcttggctgtgtatggagaaaaaactatgttcttttgttagcactctggtgcggagattacatatataaatgtagtaatttgttctgtgctgattatgtatacgaggaatcagtttccttgttggattcagagcagctttagctactggttggcaagtgggagagagacgatggatgggaccacccctgcccgtctgtctttgacgtccacacgcgtag

SEQ ID NO: 11919 - DNA, 4441 bp, Zea Mays
cccagctctgcccctctctctcttaaaccccccaaaaccaaaaattaaaatccgccttctttcttctcccccgactccctcttccggtaagaatccggcccgccgccgccgccgctagcgtcgccgcgctcgctgcttctagggctgcgccttctcgcgcctccggtgccttccctgctccccacgatcccctgcctccacaagcttccttcacctgctcactccaaccgctgccgccatggcggagaagctcagggatctaagccagccggtagacgtgacgctcctcgatgctactgtcgctgccttctacggcaccggatctaaagaggagaggagcgccgctgatcagatactacgtgacctacaaaacaacccagacatgtggctacaagttgtacacattctgcagaattcccagaacctcaacaccaagttctttgcattgcaaatacttgaaagtgttatcaagtacaggtggaatgcattgcccgtcgatcaacgtgatggcataaagaattacatatctgatgttattgtgcagctttccagcaatgaagttacctttcggcaggagaggctttatgtcaataaactcaatattattttggtgcaggtactgaaacatgagtggcctgccagatggtcatccttcatacctgatcttgttgcagctgcaaagagtagtgaaactctatgtgaaaattgcatggctatattgaagcttctaagcgaagaaatttttgacttctcaagaggtgaaatgacacaacaaaagatcaaagaactgaagtcgtcacttaacagtgagttccggctcattcacgagctatgtttatatgtcctatctgcaacgcaaaggccagagctcatccgtgctacattggcgacactccatgctttcttatcatggatccctgttggattcatctttgagtcaccgttgctggagacattactgaagttcttccctatggctgcttatcggaatcttacacttcaatgcctaacagaggttgcagcacttcagtttggtgatttttataatgtgcagtatgtgaagacatatacatttttcattattcagttgcaggctattcttcctcctgaaaaaatcccggacgtatatgctaatggttccactgaagagcaggcgtttatacaaaatcttgcactcttcttcacatcattttttaagaatcacatgcgtatactggaaacaactcaagaaaatattgctgctttgcttatgggtctcgagtaccttattggaatttcatatgttgacgatacagaggtttttaaggtgtccttggattactggaatgtatttgtattagagctatttgaagcacacaatcaaatggaacctgcagtaactgcgcagatggttcctggaatggtagatgggggcacagctgttaaacagaggagacagctttactctggcccactctcgaaactacggatgctgatgatttgccgtatggcaaagcctgaggaagtacttattgttgaagacgaaaacggcaatattgtacgcgagacaatgaaagacaacgacgttcttgttcagtacaagatcatgagggaaacactgatctatttatcccatcttgatcacgaggacacagaacaacagatgttgaagaaactaagcaagcaattaaatggagaagactggagttggaataaccttaatactctctgttgggctattggatcaatatcaggttctatggtagaggagcaggagaatagatttctggttatggttattcgtgatttgctaaacctctgtgaaatcacaaagggaaaggacaataaagctgtgattgcaagtaacattatgtatgttgttggtcagtatccaagatttctcagggctcattggaagtttttgaaaactgtggtcaacaaattgtttgagttcatgcatgagatgcatcctggagttcaggatatggcatgtgataccttcctgaaaattgttcaaaaatgcaagcgcaagtttgtgacacaacaggtgggcgagaatgaaccatttgtttctgaacttctgtccaaccttgctacaaccatcgccgatcttgagccacatcagattcatacgttttacgaatcagttggccatatgatccaagctgaatctgacaacactaatagggatgaatacctcaagagattgatgagccttcctaaccagaagtgggcagaaataatcggacaggcaagccaaagtattgatatcctgaagaaccaagatgttatccgatcagttctcaacattctacagacaaacacaagtgttgcgagctcacttgggccacacttcttcccacagatttcactaattttcttggacatgctaacagtctacagaatgtacagcgagcttgtatcaagcacgattgctgaaggaggaccctttgcctcaaggacgtcatttgtaaaactcttgagatctgtcaagagggaaaccctaaagttgatcgagacttttgtggacaaggcggaagatttgccacatataggaaagcagtttgtaccaccaatgatggatcctgttcttggtgattatgctagaaatgtacccgatgcaagggagtctgaagttctgtccttgtttgcaacaatcattaacaagtatagtatgcctgttctttgttcattctgtaccatggtcacatgccgatttttttccaaacgaagctgcacctgaatttttttaaattaattcctcttaaaaaagtcacgtcggatgtctagagccacaattgaattcatgtatttccattcttggctatttctcattaattgcatctttgcatcaattataacggttaaaatttttctgcattcgtggccatttctcattaattttatcttttgcatcaattcgaaaggttaattctttcctgcaggtacaaaggggaaatgcttgaggatgtgcctcgtatatttgaggctgttttccagtgcacccttgagatgattactaagaactttgaagattatcctgagcaccgcctcaaatttttttctttgcttcgtgcaattggcacccattgcttccaagcattaatccagctttcaagtcagcaattgaagcttgtgatcgattcaattaattgggcgttcagacatacagagagaaatattgcagagactggccttagcctgttgttggagatcttgaaaaaattccaggcttcaggattccaaaaccaattctacaaaacctactttttgacaattgagcaagagatttttgcagtcctcacagacacattccacaaacctggtttcaagcttcatgtttcggtgctgcaacacttgttttgtgcggttgatggtctaacggagcctctatgggacgcgtcttctgtaccttaccaatatacggataatgctatgtttgttcgagattacaccataaagctcttagggacatcatttcctaacatgacagtaaccgaggtgacaaagtttgtagatggtcttcttagttcaaaacttgatcttccaagcttcaaaaaccatattagagacttcctggtgcagtccaaggagttctcagttcaggataacaaggatctatacgcggaagaggctgctgcccaaagagagagggagcgccaacgtatgcttgccattccggggctcattgcccctagcgagttgcaagacgagatggtagattcgtagtgttccttgttgattcagctctctaatgtagcttcctgtttgttggtccggcatcggaatacctctggagccctcgacgtccaagttttcttccagggtggtgaaagaaggtgcctgctgtaattttatttttggttacctccacatgatgctgattccaagatttgtggtagtagacagtcagttttgccgcatgactgctgctgggggtctctcagcagctgtggttgcctggatgtgttagcagcggctcttgtgctcggtgtactttgctaacattggtgcgtgtactttgcccatcatatattatattgtggtacatcattgtatgcttctttggtttaagttaatagatggaatagcgatttatgtatccaggcaggctggtaggaaccttgttactatgtctgtagtgtactattctgtgagatatctcatacgcctttttttttctttttctttggtgcattcctcaatgtgtagatttgctgtctcatcaacaagggtaggtttggcttggctgtgtatggagaaaaaactatgttcttttgttagcactctggtgcggagattacatatataaatgtagtaatttgttctgtgctgattatgtatacgaggaatcagtttccttgttggattcagagcagctttagctactggttggcaagtgggagagagacgatggatgggaccacccctgcccgtctgtctttgacgtccacacgcgtag

SEQ ID NO: 11920 - DNA, 3933 bp, Zea Mays
cccagctctgcccctctctctcttaaaccccccaaaaccaaaaattaaaatccgccttctttcttctcccccgactccctcttccggtaagaatccggcccgccgccgccgccgctagcgtcgccgcgctcgctgcttctagggctgcgccttctcgcgcctccggtgccttccctgctccccacgatcccctgcctccacaagcttccttcacctgctcactccaaccgctgccgccatggcggagaagctcagggatctaagccagccggtagacgtgacgctcctcgatgctactgtcgctgccttctacggcaccggatctaaagaggagaggagcgccgctgatcagatactacgtgacctacaaaacaacccagacatgtggctacaagttgtacacattctgcagaattcccagaacctcaacaccaagttctttgcattgcaaatacttgaaagtgttatcaagtacaggtggaatgcattgcccgtcgatcaacgtgatggcataaagaattacatatctgatgttattgtgcagctttccagcaatgaagttacctttcggcaggagaggctttatgtcaataaactcaatattattttggtgcaggtactgaaacatgagtggcctgccagatggtcatccttcatacctgatcttgttgcagctgcaaagagtagtgaaactctatgtgaaaattgcatggctatattgaagcttctaagcgaagaaatttttgacttctcaagaggtgaaatgacacaacaaaagatcaaagaactgaagtcgtcacttaacagtgagttccggctcattcacgagctatgtttatatgtcctatctgcaacgcaaaggccagagctcatccgtgctacattggcgacactccatgctttcttatcatggatccctgttggattcatctttgagtcaccgttgctggagacattactgaagttcttccctatggctgcttatcggaatcttacacttcaatgcctaacagaggttgcagcacttcagtttggtgatttttataatgtgcagtatgtgaagacatatacatttttcattattcagttgcaggctattcttcctcctgaaaaaatcccggacgtatatgctaatggttccactgaagagcaggcgtttatacaaaatcttgcactcttcttcacatcattttttaagaatcacatgcgtatactggaaacaactcaagaaaatattgctgctttgcttatgggtctcgagtaccttattggaatttcatatgttgacgatacagaggtttttaaggtgtccttggattactggaatgtatttgtattagagctatttgaagcacacaatcaaatggaacctgcagtaactgtaagcatgatggggcttcaggcgcagatggttcctggaatggtagatgggggcacagctgttaaacagaggagacagctttactctggcccactctcgaaactacggatgctgatgatttgccgtatggcaaagcctgaggaagtacttattgttgaagacgaaaacggcaatattgtacgcgagacaatgaaagacaacgacgttcttgttcagtacaagatcatgagggaaacactgatctatttatcccatcttgatcacgaggacacagaacaacagatgttgaagaaactaagcaagcaattaaatggagaagactggagttggaataaccttaatactctctgttgggctattggatcaatatcaggttctatggtagaggagcaggagaatagatttctggttatggttattcgtgatttgctaaacctctgtgaaatcacaaagggaaaggacaataaagctgtgattgcaagtaacattatgtatgttgttggtcagtatccaagatttctcagggctcattggaagtttttgaaaactgtggtcaacaaattgtttgagttcatgcatgagatgcatcctggagttcaggatatggcatgtgataccttcctgaaaattgttcaaaaatgcaagcgcaagtttgtgacacaacaggtgggcgagaatgaaccatttgtttctgaacttctgtccaaccttgctacaaccatcgccgatcttgagccacatcagattcatacgttttacgaatcagttggccatatgatccaagctgaatctgacaacactaatagggatgaatacctcaagagattgatgagccttcctaaccagaagtgggcagaaataatcggacaggcaagccaaagtattgatatcctgaagaaccaagatgttatccgatcagttctcaacattctacagacaaacacaagtgttgcgagctcacttgggccacacttcttcccacagatttcactaattttcttggacatgctaacagtctacagaatgtacagcgagcttgtatcaagcacgattgctgaaggaggaccctttgcctcaaggacgtcatttgtaaaactcttgagatctgtcaagagggaaaccctaaagttgatcgagacttttgtggacaaggcggaagatttgccacatataggaaagcagtttgtaccaccaatgatggatcctgttcttggtgattatgctagaaatgtacccgatgcaagggagtctgaagttctgtccttgtttgcaacaatcattaacaagtacaaaggggaaatgcttgaggatgtgcctcgtatatttgaggctgttttccagtgcacccttgagatgattactaagaactttgaagattatcctgagcaccgcctcaaatttttttctttgcttcgtgcaattggcacccattgcttccaagcattaatccagctttcaagtcagcaattgaagcttgtgatcgattcaattaattgggcgttcagacatacagagagaaatattgcagagactggccttagcctgttgttggagatcttgaaaaaattccaggcttcaggattccaaaaccaattctacaaaacctactttttgacaattgagcaagagatttttgcagtcctcacagacacattccacaaacctggtttcaagcttcatgtttcggtgctgcaacacttgttttgtgcggttgatggtctaacggagcctctatgggacgcgtcttctgtaccttaccaatatacggataatgctatgtttgttcgagattacaccataaagctcttagggacatcatttcctaacatgacagtaaccgaggtgacaaagtttgtagatggtcttcttagttcaaaacttgatcttccaagcttcaaaaaccatattagagacttcctggtgcagtccaaggagttctcagttcaggataacaaggatctatacgcggaagaggctgctgcccaaagagagagggagcgccaacgtatgcttgccattccggggctcattgcccctagcgagttgcaagacgagatggtagattcgtagtgttccttgttgattcagctctctaatgtagcttcctgtttgttggtccggcatcggaatacctctggagccctcgacgtccaagttttcttccagggtggtgaaagaaggtgcctgctgtaattttatttttggttacctccacatgatgctgctgggggtctctcagcagctgtggttgcctggatgtgttagcagcggctcttgtgctcggtgtactttgctaacattgatttgctgtctcatcaacaagggtaggtttggcttggctgtgtatggagaaaaaactatgttcttttgttagcactctggtgcggagattacatatataaatgtagtaatttgttctgtgctgattatgtatacgaggaatcagtttccttgttggattcagagcagctttagctactggttggcaagtgggagagagacgatggatgggaccacccctgcccgtctgtctttgacgtccacacgcgtag

SEQ ID NO: 11921 - DNA, 3961 bp, Zea Mays
cccagctctgcccctctctctcttaaaccccccaaaaccaaaaattaaaatccgccttctttcttctcccccgactccctcttccggtaagaatccggcccgccgccgccgccgctagcgtcgccgcgctcgctgcttctagggctgcgccttctcgcgcctccggtgccttccctgctccccacgatcccctgcctccacaagcttccttcacctgctcactccaaccgctgccgccatggcggagaagctcagggatctaagccagccggtagacgtgacgctcctcgatgctactgtcgctgccttctacggcaccggatctaaagaggagaggagcgccgctgatcagatactacgtgacctacaaaacaacccagacatgtggctacaagttgtacacattctgcagaattcccagaacctcaacaccaagttctttgcattgcaaatacttgaaagtgttatcaagtacaggtggaatgcattgcccgtcgatcaacgtgatggcataaagaattacatatctgatgttattgtgcagctttccagcaatgaagttacctttcggcaggagaggctttatgtcaataaactcaatattattttggtgcaggtactgaaacatgagtggcctgccagatggtcatccttcatacctgatcttgttgcagctgcaaagagtagtgaaactctatgtgaaaattgcatggctatattgaagcttctaagcgaagaaatttttgacttctcaagaggtgaaatgacacaacaaaagatcaaagaactgaagtcgtcacttaacagtgagttccggctcattcacgagctatgtttatatgtcctatctgcaacgcaaaggccagagctcatccgtgctacattggcgacactccatgctttcttatcatggatccctgttggattcatctttgagtcaccgttgctggagacattactgaagttcttccctatggctgcttatcggaatcttacacttcaatgcctaacagaggttgcagcacttcagtttggtgatttttataatgtgcagtatgtgaagacatatacatttttcattattcagttgcaggctattcttcctcctgaaaaaatcccggacgtatatgctaatggttccactgaagagcaggcgtttatacaaaatcttgcactcttcttcacatcattttttaagaatcacatgcgtatactggaaacaactcaagaaaatattgctgctttgcttatgggtctcgagtaccttattggaatttcatatgttgacgatacagaggtttttaaggtgtccttggattactggaatgtatttgtattagagctatttgaagcacacaatcaaatggaacctgcagtaactgcgcagatggttcctggaatggtagatgggggcacagctgttaaacagaggagacagctttactctggcccactctcgaaactacggatgctgatgatttgccgtatggcaaagcctgaggaagtacttattgttgaagacgaaaacggcaatattgtacgcgagacaatgaaagacaacgacgttcttgttcagtacaagatcatgagggaaacactgatctatttatcccatcttgatcacgaggacacagaacaacagatgttgaagaaactaagcaagcaattaaatggagaagactggagttggaataaccttaatactctctgttgggctattggatcaatatcaggttctatggtagaggagcaggagaatagatttctggttatggttattcgtgatttgctaaacctctgtgaaatcacaaagggaaaggacaataaagctgtgattgcaagtaacattatgtatgttgttggtcagtatccaagatttctcagggctcattggaagtttttgaaaactgtggtcaacaaattgtttgagttcatgcatgagatgcatcctggagttcaggatatggcatgtgataccttcctgaaaattgttcaaaaatgcaagcgcaagtttgtgacacaacaggtgggcgagaatgaaccatttgtttctgaacttctgtccaaccttgctacaaccatcgccgatcttgagccacatcagattcatacgttttacgaatcagttggccatatgatccaagctgaatctgacaacactaatagggatgaatacctcaagagattgatgagccttcctaaccagaagtgggcagaaataatcggacaggcaagccaaagtattgatatcctgaagaaccaagatgttatccgatcagttctcaacattctacagacaaacacaagtgttgcgagctcacttgggccacacttcttcccacagatttcactaattttcttggacatgctaacagtctacagaatgtacagcgagcttgtatcaagcacgattgctgaaggaggaccctttgcctcaaggacgtcatttgtaaaactcttgagatctgtcaagagggaaaccctaaagttgatcgagacttttgtggacaaggcggaagatttgccacatataggaaagcagtttgtaccaccaatgatggatcctgttcttggtgattatgctagaaatgtacccgatgcaagggagtctgaagttctgtccttgtttgcaacaatcattaacaagtacaaaggggaaatgcttgaggatgtgcctcgtatatttgaggctgttttccagtgcacccttgagatgattactaagaactttgaagattatcctgagcaccgcctcaaatttttttctttgcttcgtgcaattggcacccattgcttccaagcattaatccagctttcaagtcagcaattgaagcttgtgatcgattcaattaattgggcgttcagacatacagagagaaatattgcagagactggccttagcctgttgttggagatcttgaaaaaattccaggcttcaggattccaaaaccaattctacaaaacctactttttgacaattgagcaagagatttttgcagtcctcacagacacattccacaaacctggtttcaagcttcatgtttcggtgctgcaacacttgttttgtgcggttgatggtctaacggagcctctatgggacgcgtcttctgtaccttaccaatatacggataatgctatgtttgttcgagattacaccataaagctcttagggacatcatttcctaacatgacagtaaccgaggtgacaaagtttgtagatggtcttcttagttcaaaacttgatcttccaagcttcaaaaaccatattagagacttcctggtgcagtccaaggagttctcagttcaggataacaaggatctatacgcggaagaggctgctgcccaaagagagagggagcgccaacgtatgcttgccattccggggctcattgcccctagcgagttgcaagacgagatggtagattcgtagtgttccttgttgattcagctctctaatgtagcttcctgtttgttggtccggcatcggaatacctctggagccctcgacgtccaagttttcttccagggtggtgaaagaaggtgcctgctgtaattttatttttggttacctccacatgatgctgattccaagatttgtggtagtagacagtcagttttgccgcatgactgctgctgggggtctctcagcagctgtggttgcctggatgtgttagcagcggctcttgtgctcggtgtactttgctaacattgatttgctgtctcatcaacaagggtaggtttggcttggctgtgtatggagaaaaaactatgttcttttgttagcactctggtgcggagattacatatataaatgtagtaatttgttctgtgctgattatgtatacgaggaatcagtttccttgttggattcagagcagctttagctactggttggcaagtgggagagagacgatggatgggaccacccctgcccgtctgtctttgacgtccacacgcgtag

SEQ ID NO: 11922 - DNA, 4054 bp, Zea Mays
cccagctctgcccctctctctcttaaaccccccaaaaccaaaaattaaaatccgccttctttcttctcccccgactccctcttccggtaagaatccggcccgccgccgccgccgctagcgtcgccgcgctcgctgcttctagggctgcgccttctcgcgcctccggtgccttccctgctccccacgatcccctgcctccacaagcttccttcacctgctcactccaaccgctgccgccatggcggagaagctcagggatctaagccagccggtagacgtgacgctcctcgatgctactgtcgctgccttctacggcaccggatctaaagaggagaggagcgccgctgatcagatactacgtgacctacaaaacaacccagacatgtggctacaagttgtacacattctgcagaattcccagaacctcaacaccaagttctttgcattgcaaatacttgaaagtgttatcaagtacaggtggaatgcattgcccgtcgatcaacgtgatggcataaagaattacatatctgatgttattgtgcagctttccagcaatgaagttacctttcggcaggagaggctttatgtcaataaactcaatattattttggtgcaggtactgaaacatgagtggcctgccagatggtcatccttcatacctgatcttgttgcagctgcaaagagtagtgaaactctatgtgaaaattgcatggctatattgaagcttctaagcgaagaaatttttgacttctcaagaggtgaaatgacacaacaaaagatcaaagaactgaagtcgtcacttaacagtgagttccggctcattcacgagctatgtttatatgtcctatctgcaacgcaaaggccagagctcatccgtgctacattggcgacactccatgctttcttatcatggatccctgttggattcatctttgagtcaccgttgctggagacattactgaagttcttccctatggctgcttatcggaatcttacacttcaatgcctaacagaggttgcagcacttcagtttggtgatttttataatgtgcagtatgtgaagacatatacatttttcattattcagttgcaggctattcttcctcctgaaaaaatcccggacgtatatgctaatggttccactgaagagcaggcgtttatacaaaatcttgcactcttcttcacatcattttttaagaatcacatgcgtatactggaaacaactcaagaaaatattgctgctttgcttatgggtctcgagtaccttattggaatttcatatgttgacgatacagaggtttttaaggtgtccttggattactggaatgtatttgtattagagctatttgaagcacacaatcaaatggaacctgcagtaactgcgcagatggttcctggaatggtagatgggggcacagctgttaaacagaggagacagctttactctggcccactctcgaaactacggatgctgatgatttgccgtatggcaaagcctgaggaagtacttattgttgaagacgaaaacggcaatattgtacgcgagacaatgaaagacaacgacgttcttgttcagtacaagatgttgaagaaactaagcaagcaattaaatggagaagactggagttggaataaccttaatactctctgttgggctattggatcaatatcaggttctatggtagaggagcaggagaatagatttctggttatggttattcgtgatttgctaaacctctgtgaaatcacaaagggaaaggacaataaagctgtgattgcaagtaacattatgtatgttgttggtcagtatccaagatttctcagggctcattggaagtttttgaaaactgtggtcaacaaattgtttgagttcatgcatgagatgcatcctggagttcaggatatggcatgtgataccttcctgaaaattgttcaaaaatgcaagcgcaagtttgtgacacaacaggtgggcgagaatgaaccatttgtttctgaacttctgtccaaccttgctacaaccatcgccgatcttgagccacatcagattcatacgttttacgaatcagttggccatatgatccaagctgaatctgacaacactaatagggatgaatacctcaagagattgatgagccttcctaaccagaagtgggcagaaataatcggacaggcaagccaaagtattgatatcctgaagaaccaagatgttatccgatcagttctcaacattctacagacaaacacaagtgttgcgagctcacttgggccacacttcttcccacagatttcactaattttcttggacatgctaacagtctacagaatgtacagcgagcttgtatcaagcacgattgctgaaggaggaccctttgcctcaaggacgtcatttgtaaaactcttgagatctgtcaagagggaaaccctaaagttgatcgagacttttgtggacaaggcggaagatttgccacatataggaaagcagtttgtaccaccaatgatggatcctgttcttggtgattatgctagaaatgtacccgatgcaagggagtctgaagttctgtccttgtttgcaacaatcattaacaagtacaaaggggaaatgcttgaggatgtgcctcgtatatttgaggctgttttccagtgcacccttgagatgattactaagaactttgaagattatcctgagcaccgcctcaaatttttttctttgcttcgtgcaattggcacccattgcttccaagcattaatccagctttcaagtcagcaattgaagcttgtgatcgattcaattaattgggcgttcagacatacagagagaaatattgcagagactggccttagcctgttgttggagatcttgaaaaaattccaggcttcaggattccaaaaccaattctacaaaacctactttttgacaattgagcaagagatttttgcagtcctcacagacacattccacaaacctggtttcaagcttcatgtttcggtgctgcaacacttgttttgtgcggttgatggtctaacggagcctctatgggacgcgtcttctgtaccttaccaatatacggataatgctatgtttgttcgagattacaccataaagctcttagggacatcatttcctaacatgacagtaaccgaggtgacaaagtttgtagatggtcttcttagttcaaaacttgatcttccaagcttcaaaaaccatattagagacttcctggtgcagtccaaggagttctcagttcaggataacaaggatctatacgcggaagaggctgctgcccaaagagagagggagcgccaacgtatgcttgccattccggggctcattgcccctagcgagttgcaagacgagatggtagattcgtagtgttccttgttgattcagctctctaatgtagcttcctgtttgttggtccggcatcggaatacctctggagccctcgacgtccaagttttcttccagggtggtgaaagaaggtgcctgctgtaattttatttttggttacctccacatgatgctgctgggggtctctcagcagctgtggttgcctggatgtgttagcagcggctcttgtgctcggtgtactttgctaacattggtgcgtgtactttgcccatcatatattatattgtggtacatcattgtatgcttctttggtttaagttaatagatggaatagcgatttatgtatccaggcaggctggtaggaaccttgttactatgtctgtagtgtactattctgtgagatatctcatacgcctttttttttctttttctttggtgcattcctcaatgtgtagatttgctgtctcatcaacaagggtaggtttggcttggctgtgtatggagaaaaaactatgttcttttgttagcactctggtgcggagattacatatataaatgtagtaatttgttctgtgctgattatgtatacgaggaatcagtttccttgttggattcagagcagctttagctactggttggcaagtgggagagagacgatggatgggaccacccctgcccgtctgtctttgacgtccacacgcgtag

SEQ ID NO: 11923 - DNA, 4125 bp, Zea Mays
cccagctctgcccctctctctcttaaaccccccaaaaccaaaaattaaaatccgccttctttcttctcccccgactccctcttccggtaagaatccggcccgccgccgccgccgctagcgtcgccgcgctcgctgcttctagggctgcgccttctcgcgcctccggtgccttccctgctccccacgatcccctgcctccacaagcttccttcacctgctcactccaaccgctgccgccatggcggagaagctcagggatctaagccagccggtagacgtgacgctcctcgatgctactgtcgctgccttctacggcaccggatctaaagaggagaggagcgccgctgatcagatactacgtgacctacaaaacaacccagacatgtggctacaagttgtacacattctgcagaattcccagaacctcaacaccaagttctttgcattgcaaatacttgaaagtgttatcaagtacaggtggaatgcattgcccgtcgatcaacgtgatggcataaagaattacatatctgatgttattgtgcagctttccagcaatgaagttacctttcggcaggagaggctttatgtcaataaactcaatattattttggtgcaggtactgaaacatgagtggcctgccagatggtcatccttcatacctgatcttgttgcagctgcaaagagtagtgaaactctatgtgaaaattgcatggctatattgaagcttctaagcgaagaaatttttgacttctcaagaggtgaaatgacacaacaaaagatcaaagaactgaagtcgtcacttaacagtgagttccggctcattcacgagctatgtttatatgtcctatctgcaacgcaaaggccagagctcatccgtgctacattggcgacactccatgctttcttatcatggatccctgttggattcatctttgagtcaccgttgctggagacattactgaagttcttccctatggctgcttatcggaatcttacacttcaatgcctaacagaggttgcagcacttcagtttggtgatttttataatgtgcagtatgtgaagacatatacatttttcattattcagttgcaggctattcttcctcctgaaaaaatcccggacgtatatgctaatggttccactgaagagcaggcgtttatacaaaatcttgcactcttcttcacatcattttttaagaatcacatgcgtatactggaaacaactcaagaaaatattgctgctttgcttatgggtctcgagtaccttattggaatttcatatgttgacgatacagaggtttttaaggtgtccttggattactggaatgtatttgtattagagctatttgaagcacacaatcaaatggaacctgcagtaactgtaagcatgatggggcttcaggcgcagatggttcctggaatggtagatgggggcacagctgttaaacagaggagacagctttactctggcccactctcgaaactacggatgctgatgatttgccgtatggcaaagcctgaggaagtacttattgttgaagacgaaaacggcaatattgtacgcgagacaatgaaagacaacgacgttcttgttcagtacaagatcatgagggaaacactgatctatttatcccatcttgatcacgaggacacagaacaacagatgttgaagaaactaagcaagcaattaaatggagaagactggagttggaataaccttaatactctctgttgggctattggatcaatatcaggttctatggtagaggagcaggagaatagatttctggttatggttattcgtgatttgctaaacctctgtgaaatcacaaagggaaaggacaataaagctgtgattgcaagtatgttgttggtcagtatccaagatttctcagggctcattggaagtttttgaaaactgtggtcaacaaattgtttgagttcatgcatgagatgcatcctggagttcaggatatggcatgtgataccttcctgaaaattgttcaaaaatgcaagcgcaagtttgtgacacaacaggtgggcgagaatgaaccatttgtttctgaacttctgtccaaccttgctacaaccatcgccgatcttgagccacatcagattcatacgttttacgaatcagttggccatatgatccaagctgaatctgacaacactaatagggatgaatacctcaagagattgatgagccttcctaaccagaagtgggcagaaataatcggacaggcaagccaaagtattgatatcctgaagaaccaagatgttatccgatcagttctcaacattctacagacaaacacaagtgttgcgagctcacttgggccacacttcttcccacagatttcactaattttcttggacatgctaacagtctacagaatgtacagcgagcttgtatcaagcacgattgctgaaggaggaccctttgcctcaaggacgtcatttgtaaaactcttgagatctgtcaagagggaaaccctaaagttgatcgagacttttgtggacaaggcggaagatttgccacatataggaaagcagtttgtaccaccaatgatggatcctgttcttggtgattatgctagaaatgtacccgatgcaagggagtctgaagttctgtccttgtttgcaacaatcattaacaagtacaaaggggaaatgcttgaggatgtgcctcgtatatttgaggctgttttccagtgcacccttgagatgattactaagaactttgaagattatcctgagcaccgcctcaaatttttttctttgcttcgtgcaattggcacccattgcttccaagcattaatccagctttcaagtcagcaattgaagcttgtgatcgattcaattaattgggcgttcagacatacagagagaaatattgcagagactggccttagcctgttgttggagatcttgaaaaaattccaggcttcaggattccaaaaccaattctacaaaacctactttttgacaattgagcaagagatttttgcagtcctcacagacacattccacaaacctggtttcaagcttcatgtttcggtgctgcaacacttgttttgtgcggttgatggtctaacggagcctctatgggacgcgtcttctgtaccttaccaatatacggataatgctatgtttgttcgagattacaccataaagctcttagggacatcatttcctaacatgacagtaaccgaggtgacaaagtttgtagatggtcttcttagttcaaaacttgatcttccaagcttcaaaaaccatattagagacttcctggtgcagtccaaggagttctcagttcaggataacaaggatctatacgcggaagaggctgctgcccaaagagagagggagcgccaacgtatgcttgccattccggggctcattgcccctagcgagttgcaagacgagatggtagattcgtagtgttccttgttgattcagctctctaatgtagcttcctgtttgttggtccggcatcggaatacctctggagccctcgacgtccaagttttcttccagggtggtgaaagaaggtgcctgctgtaattttatttttggttacctccacatgatgctgctgggggtctctcagcagctgtggttgcctggatgtgttagcagcggctcttgtgctcggtgtactttgctaacattggtgcgtgtactttgcccatcatatattatattgtggtacatcattgtatgcttctttggtttaagttaatagatggaatagcgatttatgtatccaggcaggctggtaggaaccttgttactatgtctgtagtgtactattctgtgagatatctcatacgcctttttttttctttttctttggtgcattcctcaatgtgtagatttgctgtctcatcaacaagggtaggtttggcttggctgtgtatggagaaaaaactatgttcttttgttagcactctggtgcggagattacatatataaatgtagtaatttgttctgtgctgattatgtatacgaggaatcagtttccttgttggattcagagcagctttagctactggttggcaagtgggagagagacgatggatgggaccacccctgcccgtctgtctttgacgtccacacgcgtag

SEQ ID NO: 11924 - DNA, 4155 bp, Zea Mays
agcaactccccgcgtcccaacccagctctgcccctctctctcttaaaccccccaaaaccaaaaattaaaatccgccttctttcttctcccccgactccctcttccggtaagaatccggcccgccgccgccgccgctagcgtcgccgcgctcgctgcttctagggctgcgccttctcgcgcctccggtgccttccctgctccccacgatcccctgcctccacaagcttccttcacctgctcactccaaccgctgccgccatggcggagaagctcagggatctaagccagccggtagacgtgacgctcctcgatgctactgtcgctgccttctacggcaccggatctaaagaggagaggagcgccgctgatcagatactacgtgacctacaaaacaacccagacatgtggctacaagttgtacacattctgcagaattcccagaacctcaacaccaagttctttgcattgcaaatacttgaaagtgttatcaagtacaggtggaatgcattgcccgtcgatcaacgtgatggcataaagaattacatatctgatgttattgtgcagctttccagcaatgaagttacctttcggcaggagaggctttatgtcaataaactcaatattattttggtgcaggtactgaaacatgagtggcctgccagatggtcatccttcatacctgatcttgttgcagctgcaaagagtagtgaaactctatgtgaaaattgcatggctatattgaagcttctaagcgaagaaatttttgacttctcaagaggtgaaatgacacaacaaaagatcaaagaactgaagtcgtcacttaacagtgagttccggctcattcacgagctatgtttatatgtcctatctgcaacgcaaaggccagagctcatccgtgctacattggcgacactccatgctttcttatcatggatccctgttggattcatctttgagtcaccgttgctggagacattactgaagttcttccctatggctgcttatcggaatcttacacttcaatgcctaacagaggttgcagcacttcagtttggtgatttttataatgtgcagtatgtgaagacatatacatttttcattattcagttgcaggctattcttcctcctgaaaaaatcccggacgtatatgctaatggttccactgaagagcaggcgtttatacaaaatcttgcactcttcttcacatcattttttaagaatcacatgcgtatactggaaacaactcaagaaaatattgctgctttgcttatgggtctcgagtaccttattggaatttcatatgttgacgatacagaggtttttaaggtgtccttggattactggaatgtatttgtattagagctatttgaagcacacaatcaaatggaacctgcagtaactgtaagcatgatggggcttcaggcgcagatggttcctggaatggtagatgggggcacagctgttaaacagaggagacagctttactctggcccactctcgaaactacggatgctgatgatttgccgtatggcaaagcctgaggaagtacttattgttgaagacgaaaacggcaatattgtacgcgagacaatgaaagacaacgacgttcttgttcagtacaagatcatgagggaaacactgatctatttatcccatcttgatcacgaggacacagaacaacagatgttgaagaaactaagcaagcaattaaatggagaagactggagttggaataaccttaatactctctgttgggctattggatcaatatcaggttctatggtagaggagcaggagaatagatttctggttatggttattcgtgatttgctaaacctctgtgaaatcacaaagggaaaggacaataaagctgtgattgcaagtaacattatgtatgttgttggtcagtatccaagatttctcagggctcattggaagtttttgaaaactgtggtcaacaaattgtttgagttcatgcatgagatgcatcctggagttcaggatatggcatgtgataccttcctgaaaattgttcaaaaatgcaagcgcaagtttgtgacacaacaggtgggcgagaatgaaccatttgtttctgaacttctgtccaaccttgctacaaccatcgccgatcttgagccacatcagattcatacgttttacgaatcagttggccatatgatccaagctgaatctgacaacactaatagggatgaatacctcaagagattgatgagccttcctaaccagaagtgggcagaaataatcggacaggcaagccaaagtattgatatcctgaagaaccaagatgttatccgatcagttctcaacattctacagacaaacacaagtgttgcgagctcacttgggccacacttcttcccacagatttcactaattttcttggacatgctaacagtctacagaatgtacagcgagcttgtatcaagcacgattgctgaaggaggaccctttgcctcaaggacgtcatttgtaaaactcttgagatctgtcaagagggaaaccctaaagttgatcgagacttttgtggacaaggcggaagatttgccacatataggaaagcagtttgtaccaccaatgatggatcctgttcttggtgattatgctagaaatgtacccgatgcaagggagtctgaagttctgtccttgtttgcaacaatcattaacaagtacaaaggggaaatgcttgaggatgtgcctcgtatatttgaggctgttttccagtgcacccttgagatgattactaagaactttgaagattatcctgagcaccgcctcaaatttttttctttgcttcgtgcaattggcacccattgcttccaagcattaatccagctttcaagtcagcaattgaagcttgtgatcgattcaattaattgggcgttcagacatacagagagaaatattgcagagactggccttagcctgttgttggagatcttgaaaaaattccaggcttcaggattccaaaaccaattctacaaaacctactttttgacaattgagcaagagatttttgcagtcctcacagacacattccacaaacctggtttcaagcttcatgtttcggtgctgcaacacttgttttgtgcggttgatggtctaacggagcctctatgggacgcgtcttctgtaccttaccaatatacggataatgctatgtttgttcgagattacaccataaagctcttagggacatcatttcctaacatgacagtaaccgaggtgacaaagtttgtagatggtcttcttagttcaaaacttgatcttccaagcttcaaaaaccatattagagacttcctggtgcagtccaaggagttctcagttcaggataacaaggatctatacgcggaagaggctgctgcccaaagagagagggagcgccaacgtatgcttgccattccggggctcattgcccctagcgagttgcaagacgagatggtagattcgtagtgttccttgttgattcagctctctaatgtagcttcctgtttgttggtccggcatcggaatacctctggagccctcgacgtccaagttttcttccagggtggtgaaagaaggtgcctgctgtaattttatttttggttacctccacatgatgctgctgggggtctctcagcagctgtggttgcctggatgtgttagcagcggctcttgtgctcggtgtactttgctaacattggtgcgtgtactttgcccatcatatattatattgtggtacatcattgtatgcttctttggtttaagttaatagatggaatagcgatttatgtatccaggcaggctggtaggaaccttgttactatgtctgtagtgtactattctgtgagatatctcatacgcctttttttttctttttctttggtgcattcctcaatgtgtagatttgctgtctcatcaacaagggtaggtttggcttggctgtgtatggagaaaaaactatgttcttttgttagcactctggtgcggagattacatatataaatgtagtaatttgttctgtgctgattatgtatacgaggaatcagtttccttgttggattcagagcagctttagctactggttggcaagtgggagagagacgatggatgggaccacccctgcccgtctgtctttgacgtccacacgcgtag

SEQ ID NO: 11925 - DNA, 3324 bp, Zea Mays
cccagctctgcccctctctctcttaaaccccccaaaaccaaaaattaaaatccgccttctttcttctcccccgactccctcttccggtaagaatccggcccgccgccgccgccgctagcgtcgccgcgctcgctgcttctagggctgcgccttctcgcgcctccggtgccttccctgctccccacgatcccctgcctccacaagcttccttcacctgctcactccaaccgctgccgccatggcggagaagctcagggatctaagccagccggtagacgtgacgctcctcgatgctactgtcgctgccttctacggcaccggatctaaagaggagaggagcgccgctgatcagatactacgtgacctacaaaacaacccagacatgtggctacaagttgtacacattctgcagaattcccagaacctcaacaccaagttctttgcattgcaaatacttgaaagtgttatcaagtacaggtggaatgcattgcccgtcgatcaacgtgatggcataaagaattacatatctgatgttattgtgcagctttccagcaatgaagttacctttcggcaggagaggctttatgtcaataaactcaatattattttggtgcaggtactgaaacatgagtggcctgccagatggtcatccttcatacctgatcttgttgcagctgcaaagagtagtgaaactctatgtgaaaattgcatggctatattgaagcttctaagcgaagaaatttttgacttctcaagaggtgaaatgacacaacaaaagatcaaagaactgaagtcgtcacttaacagtgagttccggctcattcacgagctatgtttatatgtcctatctgcaacgcaaaggccagagctcatccgtgctacattggcgacactccatgctttcttatcatggatccctgttggattcatctttgagtcaccgttgctggagacattactgaagttcttccctatggctgcttatcggaatcttacacttcaatgcctaacagaggttgcagcacttcagtttggtgatttttataatgtgcagtatgtgaagacatatacatttttcattattcagttgcaggctattcttcctcctgaaaaaatcccggacgtatatgctaatggttccactgaagagcaggcgtttatacaaaatcttgcactcttcttcacatcattttttaagaatcacatgcgtatactggaaacaactcaagaaaatattgctgctttgcttatgggtctcgagtaccttattggaatttcatatgttgacgatacagaggtttttaaggtgtccttggattactggaatgtatttgtattagagctatttgaagcacacaatcaaatggaacctgcagtaactgcgcagatggttcctggaatggtagatgggggcacagctgttaaacagaggagacagctttactctggcccactctcgaaactacggatgctgatgatttgccgtatggcaaagcctgaggaagtacttattgttgaagacgaaaacggcaatattgtacgcgagacaatgaaagacaacgacgttcttgttcagtacaagatcatgagggaaacactgatctatttatcccatcttgatcacgaggacacagaacaacagatgttgaagaaactaagcaagcaattaaatggagaagactggagttggaataaccttaatactctctgttgggctattggatcaatatcaggttctatggtagaggagcaggagaatagatttctggttatggttattcgtgatttgctaaacctctgtgaaatcacaaagggaaaggacaataaagctgtgattgcaagtatgttgttggtcagtatccaagatttctcagggctcattggaagtttttgaaaactgtggtcaacaaattgtttgagttcatgcatgagatgcatcctggagttcaggatatggcatgtgataccttcctgaaaattgttcaaaaatgcaagcgcaagtttgtgacacaacaggtgggcgagaatgaaccatttgtttctgaacttctgtccaaccttgctacaaccatcgccgatcttgagccacatcagattcatacgttttacgaatcagttggccatatgatccaagctgaatctgacaacactaatagggatgaatacctcaagagattgatgagccttcctaaccagaagtgggcagaaataatcggacaggcaagccaaagtattgatatcctgaagaaccaagatgttatccgatcagttctcaacattctacagacaaacacaagtgttgcgagctcacttgggccacacttcttcccacagatttcactaattttcttggacatgctaacagtctacagaatgtacagcgagcttgtatcaagcacgattgctgaaggaggaccctttgcctcaaggacgtcatttgtaaaactcttgagatctgtcaagagggaaaccctaaagttgatcgagacttttgtggacaaggcggaagatttgccacatataggaaagcagtttgtaccaccaatgatggatcctgttcttggtgattatgctagaaatgtacccgatgcaagggagtctgaagttctgtccttgtttgcaacaatcattaacaagtacaaaggggaaatgcttgaggatgtgcctcgtatatttgaggctgttttccagtgcacccttgagatgattactaagaactttgaagattatcctgagcaccgcctcaaatttttttctttgcttcgtgcaattggcacccattgcttccaagcattaatccagctttcaagtcagcaattgaagcttgtgatcgattcaattaattgggcgttcagacatacagagagaaatattgcagagactggccttagcctgttgttggagatcttgaaaaaattccaggcttcaggattccaaaaccaattctacaaaacctactttttgacaattgagcaagagatttttgcagtcctcacagacacattccacaaacctggtttcaagcttcatgtttcggtgctgcaacacttgttttgtgcggttgatggtctaacggagcctctatgggacgcgtcttctgtaccttaccaatatacggataatgctatgtttgttcgagattacaccataaagctcttagggacatcatttcctaacatgacagtaaccgaggtgacaaagtttgtagatggtcttcttagttcaaaacttgatcttccaagcttcaaaaaccatattagagacttcctggtgcagtccaaggagttctcagttcaggcccttggcgccaccagcagattggcg

SEQ ID NO: 11926 - DNA, 1447 bp, Zea Mays
ccattcccattcccattcccatccggtaacggcatcccgcgtccctcggctcggatcgccgccgcccaacggagcaggagcaggagcagcgatccatcctatcctaggagccaaaccctagccagctatggagccgcccgccgcctcctcctcgtctgatccccactccccgtctccgtctccttctccctccgcctccccggccaagcgctccgcctggaagcaccccgcccccaacgacaccgccgtcatggacgccaacaactggcccgcgctctccgacgccgccaagggcaacaagctcccggactcctcggctccatcacctgcgcccgtagccgcaccatcgcaaggagaacctatgctcagatgtgtacctgaggcagcagatggatggtcagggctgggttgatttatctcttatagctggcttcaaaaaggtccaagggctgaagaaggacctacaatatataaaagagacggtgcagtcctcatctgtactggaaatgaaggataataaaatcaggaagcacggagactgggagaaatgggtgatccctcgcgagagcaatcctgatgccccgtcaagattagcatctgtatcaagacctaatgtcaataacctgacatcacatctaggaggcatgggtctgcatgaatccgctagctctactggcgcagaggagctgaaccatcatgatgtcgtccagaacggatcgccttctggtaaggaaccggcagctgaagacagttctggtcagcaggagttgcaataagacagtggctcgccttcacaccatgactgcaggggttttgtgccagagcacaaatgatagtttcttcttttttttcgggtttttggggttggttggggggggggggtttggacgaggtgtgataatgactcatgaggggcgtgttagactgacaggcgaatgtgtttaccgggggtcaggtagataagattttgctttaccttgtggtattcaggcggaggggtagggcagctggtgaagcagcagagaaggaaggcggtggttacatctggaggcgcctcagatgacatggaagactgaaaaaacaagtctattgaagactgaaaaagaagtcaattgaagactagcgtagcggccctgggcggctttgttttcacaggatggtattctggtgttgcgatgaactagtcttcatcgggatggatgttgtaggaccttcaggttttttttttattttttttatggaggagctgaaagtttctgacttgggagagtgagggagtttgacttgttttgtttttgtggtggcgttaagttaaagtaagaagaagatgttagataatgtttgctccctgttcattctgctgtgctggccttgtatggtattatggtggctgtgaatgatggagactgagattgcgtggtcctgttctgcagcagcagcagaagac

SEQ ID NO: 11927 - DNA, 1918 bp, Zea Mays
ctcgtctcgtcactaggaagtggtactaggaatagagaggcgccgccgcatcccattcccattcccattcccatccggtaacggcatcccgcgtccctcggctcggatcgccgccgcccaacggagcaggagcaggagcagcgatccatcctatcctaggagccaaaccctagccagctatggagccgcccgccgcctcctcctcgtctgatccccactccccgtctccgtctccttctccctccgcctccccggccaagcgctccgcctggaagcaccccgcccccaacgacaccgccgtcatggacgccaacaactggcccgcgctctccgacgccgccaagggcaacaagctcccggactcctcggctccatcacctgcgcccgtagccgcaccatcggccgttgccaactcctccagttcgcaaaagcacggcgcccatcacggccgccacaagtccgccaggcgcattggcggtggtggcgaccactctccacgagaccatcctgaccggaacgttgccgctggttgggaccatgctgccggcggtggcgggggcaggggtgcccagaggaaccataataacggaggtggcaggaggggcaatggcgcacctgcctctgccactgggccttctcatcacggttctggtgccggtggcggcagcggcggaggctttggtgctaggcgaagaggggcatacgagccaccattctatcgtggccctccaccaccgatgggcatgggccactacatgagaggtgcgccgccgccaccgcccatgactgtcgcaccaccgttcatgggccctccaccgccaccagtttcgtccatgcgcccgtatgctggaccaatgatgttccatgacatgccatctcccatgtctcctgtatcccccatatacttttatgggccaccaccaccagaggctcttaggggactgcctcttgcgcctcctatggttggcccacctgcttatccatactttcaagcccagcctgaacctgaacctcagcctgatcctgagcctgatgcggaagaggaacgtgtcaagctgctcaagcagatagagttctacttcagcaaggagaacctatgctcagatgtgtacctgaggcagcagatggatggtcagggctgggttgatttatctcttatagctggcttcaaaaaggtccaagggctgaagaaggacctacaatatataaaagagacggtgcagtcctcatctgtactggaaatgaaggataataaaatcaggaagcacggagactgggagaaatgggtgatccctcgcgagagcaatcctgatgccccgtcaagattagcatctgtatcaagacctaatgtcaataacctgacatcacatctaggaggcatgggtctgcatgaatccgctagctctactggcgcagaggagctgaaccatcatgatgtcgtccagaacggatcgccttctggcggaggggtagggcagctggtgaagcagcagagaaggaaggcggtggttacatctggaggcgcctcagatgacatggaagactgaaaaaacaagtctattgaagactgaaaaagaagtcaattgaagactagcgtagcggccctgggcggctttgttttcacaggatggtattctggtgttgcgatgaactagtcttcatcgggatggatgttgtaggaccttcaggttttttttttattttttttatggaggagctgaaagtttctgacttgggagagtgagggagtttgacttgttttgtttttgtggtggcgttaagttaaagtaagaagaagatgttagataatgtttgctccctgttcattctgctgtgctggccttgtatggtattatggtggctgtgaatgatggagactgagattgcgtggtcctgttctgcagcagcagcagaagac

SEQ ID NO: 11928 - DNA, 2097 bp, Zea Mays
ctgagcagtgagaaggccaggagggagagccaacgcctggcaaatgcagtgcaatggccgccacccaccgtcccattcctagctagcttggagccttggcagagcagcagccagcagcctgcccagcacaaacccagcagggaaggaaaggagaagagagaaggagaggtcgaggcgagcaatggaggtcgtcgcgtcctccgaccaatatcgctcgtcctcctcttccgccagcagccccgcgcgccgttactacctgcccaagcccggcgcgctccgccgccccatctccttcgaggactcccccgactgggacgacatccaccccgacgacaccatccacctcgccaccgccgcctctgcctccatttccattgcgagcagcgcctacccctcgccttcgccctccctgccccaagggtcctcctccgcctctgctgcatgccgcgaccggaaggtggccggagttaccctcgtctggaaggacctcactgtctcctcactcgccgcagccacaaaccgcttctccgaccgcctcgtcaagagctccaacggctacgcgctgccggccactctcaccgtcatcatgggccccgcgcgctccggcaaatccaccctgctccgagcaattgcagggaggctcagctctactgagaggatatatggcgaagtctttgtcaacggcgccaagtctcccttaccatatggatcatatggttatgttgaccgagacgatgtgctcattgaatccctcacagtacgagagatgctatacttctccgcgctcctgcagcttcctggtttcctatcttcgaaaaaggcaattgtggaggatgctattgcagccatgtcattaggtgaccatgctgacaaactcattggcgggaattgttttatgacgaggcttcctaccggagaaagaaggcgggtcagcattgcgagagagcttgtgatgagaccacatgttttgttcattgatgaaccactgtacaatcttgacagtgtgtctgcgctgctcttaatggtaacattgaagaaactcgcaagcacaggatgcaccatcatattcacaatgtatcagagcagcacagaggtttttggactcttcgatcgtatttgcttgctttcaaatgggaacacactcttctttggagaaacattggcttgcctacagcacttctcgaatgctgggtttccatgtccaatcatgcaaagtccatctgaccacttcttgcgggcaatcaataccgacttcgacagaattatagccatgtgcaagaatttccaggtatatgttaaaattcattttgaatccaccttttgttttatcttaattagtttcagtcaatttgatggaagtctgctttggtcgtaagagataaaaacctttttagttattagcaggatgatcaaggggatttttcgtcagtgagcatggatacagcagtggcgattcggacactagaagcaacatacaaacaatcagctgactctgttgcagttgaatcaatgattgcaaagttgacagagaaggtagtgtccccgcgtcagtatatgatttattgatttcatcccttcatcctggtgtccaagccgttcgaggctcgtacgacatttcgtcttccccaaacgcgaagtgggtgaacctcctggttctgctactgatggcgctcggatatcggattcttctctacttgctgcttcgtctagacgtgaggaagaacgcgaggaggcttggaaactggaggtcatggtggtcaagtgtgcattctgctgccactggtgcaaagtgatttttgagcttctatctaatcgagtgagtgagtgtcgtaggtgtttagtgagttctttggtttggtttggtttggtttgtatgccctgtccatatgagaaatgtatgtatacacgtattggttggcaacaaacacaaaacaatatcattgtttcctaatgacatacatctatttatctatctatctttagaccgctggtgcatgtggtcgatctgtccatatgagaaatgtatgtatacacgtattggttggcaacaaacacaaaacaatatcattgtttcctaatgacatacatctatttatc

SEQ ID NO: 11929 - DNA, 2008 bp, Zea Mays
cttactcatccactcaatcaagcaatggaccctctgcttcgttttgtttctgtccctctcctttactaggaaggaatgttgtcttggatgagtttggaacccccaaagtggtcaatgatggagttaccattgcccgcgctattgagcttgctgatcccatggagaatgctggtgcttccttgattcgtgaagttgctagcaagacgaatgactcggctggtgatggaaccacaactgcctctgttctcgctagggagatcatcaaattgggcatgttgagcattacttcaggggcaaatccagtgtccgttaagaagggcattgataagactgttcagaaattggtggaggaacttgagaagaaatcaaggccggtcaagggtagtggggatattaaagctgttgctgccatatcagctggaaatgatgaatttgttgggactatgatcgccgaagctattgacaaggttggccctgatggtgtcctctcaattgagtcgtcatcgtcgtttgagaccacagttgaagttgaagaagggatggagcttgacagaggatatatctcccctcagtttgtcactaaccttgaaaaatctattgttgagttcgaaaatgctcggattcttgtcactgatcagaagatatcatcgataaaagaaattattcctctgttggagcagacaacacagttaagagcaccacttcttataattgcagaggatgtaagtggcgaggcgctggcaacattagtcataaacaagcttagaggaattttaaatgtggctgcaatcaaagctcctggttttggtgagaggcgtaaagctcttcttcaggacattgccattgttacaggtgctgaatatcaatccaaagatcttggtctactagttgaggatacaacagtggagcagcttggcatagctcggaaagttacaatctcaagttcctcgacgaccattatagcagatgctgctagcaaagacgatatccaggccagaatcgcgcagctgaagagagagctttctcagacggactcgacgtatgactctgagaagttggcagagagaattgcaaagctttctggtggagttgctgtggttaaggttggagcatcgaccgaggcagagctagaggaccgcaagctccgcatagaggacgcgaagaatgcgacttttgcagcaatagaggaaggtgaggtgattgtggataaaatccgggaaagcgagtgggagttcggttacaacgccatggcggacaagcacgagaacctggtggaggctggtgtgatcgaccctgccaaagtgactaggtgcgccctgcagaacgctgcctccgtggctggaatggtgctgactacccaagcaatcgttgtggagaagcccaagaaggctccagcagcagctgctgcagcggcaccatagggttctttcaccatgtaataatactttctagtgaaaaacaattttactaggcatggaacaggcacgttagagtgacgaggagaaaaaactatttttgtcatgcgtgggccggaataaattgagtcaggaattgcatggattttgggccaggacgatttgcaaattggttggattagagtgtggatggctgattggacattgtatcctatctgcattctgttcactcagttggctaattcacatttctctccagtccttccctcccttttgtgacgatgcagttttttatcgtctggtaaaatggcaaggcaacaaattcatggtgctgcttctatctccccgtctccatcccgcaccacaggtactatttgctctttcatccgctacgatctggcagcggtttccaatggtacatgacaacaccggcagagcatcgacggatcgcttgtggttgaagggcgaaaaggctttgcttgagttgctgctaggaccttggcaagagtagacaggcaagctgacagaggaggtgaagttggcagcagaagaaccagacacccagttggagttggatcagatgtagcacagca

SEQ ID NO: 11930 - DNA, 2330 bp, Zea Mays
tggttgcgtacagtaccctctagaagcctccgggtcgctcggtgtgggttgctaactactcgcagcagccagaggccagatccagccgccaaccccccaaacaaaaccctaggccaccattctgaccaccaggcacaagcagagcagaagcagacatggccaccattccgaccaccgattctggcctcgtcctcagttcctccgctctcctccggaggactaggagggccgcctcatccgtcaccgccaggctgccagccgtcgcccgccgtcgcccgcagctcctcgtgcgtgcctccgccaaggagatcgcctttgaccagggctccagagccgcccttcaggccggcgtcgagaagctcgccgccgcggtcggcgtcaccctcggacccagaggaaggaatgttgtcttggatgagtttggaacccccaaagtggtcaatgatggagttaccattgcccgcgctattgagcttgctgatcccatggagaatgctggtgcttccttgattcgtgaagttgctagcaagacgaatgactcggctggtgatggaaccacaactgcctctgttctcgctagggagatcatcaaattgggcatgttgagcattacttcaggggcaaatccagtgtccgttaagaagggcattgataagactgttcagaaattggtggaggaacttgagaagaaatcaaggccggtcaagggtagtggggatattaaagctgttgctgccatatcagctggaaatgatgaatttgttgggactatgatcgccgaagctattgacaaggttggccctgatggtgtcctctcaattgagtcgtcatcgtcgtttgagaccacagttgaagttgaagaagggatggagtgcagaggatgtaagtggcgaggcgctggcaacattagtcataaacaagcttagaggaattttaaatgtggctgcaatcaaagctcctggttttggtgagaggcgtaaagctcttcttcaggacattgccattgttacaggtgctgaatatcaatccaaagatcttggtctactagttgaggatacaacagtggagcagcttggcatagctcggaaagttacaatctcaagttcctcgacgaccattatagcagatgctgctagcaaagacgatatccaggccagaatcgcgcagctgaagagagagctttctcagacggactcgacgtatgactctgagaagttggcagagagaattgcaaagctttctggtggagttgctgtggttaaggttggagcatcgaccgaggcagagctagaggaccgcaagctccgcatagaggacgcgaagaatgcgacttttgcagcaatagaggaaggtattgttccaggaggcggtgcagcatatgttcatctatcgacattcgtaccggctatcaaggagacgttggatgatcctgaggagcgcctaggtgctgatatcattcagaaggctttggtggcacctgcagcgctgatagcccataatgctggggtggaaggtgaggtgattgtggataaaatccgggaaagcgagtgggagttcggttacaacgccatggcggacaagcacgagaacctggtggaggctggtgtgatcgaccctgccaaagtgactaggtgcgccctgcagaacgctgcctccgtggctggaatggtgctgactacccaagcaatcgttgtggagaagcccaagaaggctccagcagcagctgctgcagcggcaccatagggttctttcaccatgtaataatactttctagtgaaaaacaattttactaggcatggaacaggcacgttagagtgacgaggagaaaaaactatttttgtcatgcgtgggccggaataaattgagtcaggaattgcatggattttgggccaggacgatttgcaaattggttggattagagtgtggatggctgattggacattgtatcctatctgcattctgttcactcagttggctaattcacatttctctccagtccttccctcccttttgtgacgatgcagttttttatcgtctggtaaaatggcaaggcaacaaattcatggtgctgcttctatctccccgtctccatcccgcaccacaggtactatttgctctttcatccgctacgatctggcagcggtttccaatggtacatgacaacaccggcagagcatcgacggatcgcttgtggttgaagggcgaaaaggctttgcttgagttgctgctaggaccttggcaagagtagacaggcaagctgacagaggaggtgaagttggcagcagaagaaccagacacccagttggagttggatcagatgtagcacagca

SEQ ID NO: 11931 - DNA, 2489 bp, Zea Mays
tggttgcgtacagtaccctctagaagcctccgggtcgctcggtgtgggttgctaactactcgcagcagccagaggccagatccagccgccaaccccccaaacaaaaccctaggccaccattctgaccaccaggcacaagcagagcagaagcagacatggccaccattccgaccaccgattctggcctcgtcctcagttcctccgctctcctccggaggactaggagggccgcctcatccgtcaccgccaggctgccagccgtcgcccgccgtcgcccgcagctcctcgtgcgtgcctccgccaaggagatcgcctttgaccagggctccagagccgcccttcaggccggcgtcgagaagctcgccgccgcggtcggcgtcaccctcggacccagaggaaggaatgttgtcttggatgagtttggaacccccaaagtggtcaatgatggagttaccattgcccgcgctattgagcttgctgatcccatggagaatgctggtgcttccttgattcgtgaagttgctagcaagacgaatgactcggctggtgatggaaccacaactgcctctgttctcgctagggagatcatcaaattgggcatgttgagcattacttcaggggcaaatccagtgtccgttaagaagggcattgataagactgttcagaaattggtggaggaacttgagaagaaatcaaggccggtcaagggtagtggggatattaaagctgttgctgccatatcagctggaaatgatgaatttgttgggactatgatcgccgaagctattgacaaggttggccctgatggtgtcctctcaattgagtcgtcatcgtcgtttgagaccacagttgaagttgaagaagggatggagaggatatatctcccctcagtttgtcactaaccttgaaaaatctattgttgagttcgaaaatgctcggattcttgtcactgatcagaagatatcatcgataaaagaaattattcctctgttggagcagacaacacagttaagagcaccacttcttataattgcagaggatgtaagtggcgaggcgctggcaacattagtcataaacaagcttagaggaattttaaatgtggctgcaatcaaagctcctggttttggtgagaggcgtaaagctcttcttcaggacattgccattgttacaggtgctgaatatcaatccaaagatcttggtctactagttgaggatacaacagtggagcagcttggcatagctcggaaagttacaatctcaagttcctcgacgaccattatagcagatgctgctagcaaagacgatatccaggccagaatcgcgcagctgaagagagagctttctcagacggactcgacgtatgactctgagaagttggcagagagaattgcaaagctttctggtggagttgctgtggttaaggttggagcatcgaccgaggcagagctagaggaccgcaagctccgcatagaggacgcgaagaatgcgacttttgcagcaatagaggaaggtattgttccaggaggcggtgcagcatatgttcatctatcgacattcgtaccggctatcaaggagacgttggatgatcctgaggagcgcctaggtgctgatatcattcagaaggctttggtggcacctgcagcgctgatagcccataatgctggggtggaaggtgaggtgattgtggataaaatccgggaaagcgagtgggagttcggttacaacgccatggcggacaagcacgagaacctggtggaggctggtgtgatcgaccctgccaaagtgactaggtgcgccctgcagaacgctgcctccgtggctggaatggtgctgactacccaagcaatcgttgtggagaagcccaagaaggctccagcagcagctgctgcagcggcaccatagggttctttcaccatgtaataatactttctagtgaaaaacaattttactaggcatggaacaggcacgttagagtgacgaggagaaaaaactatttttgtcatgcgtgggccggaataaattgagtcaggaattgcatggattttgggccaggacgatttgcaaattggttggattagagtgtggatggctgattggacattgtatcctatctgcattctgttcactcagttggctaattcacatttctctccagtccttccctcccttttgtgacgatgcagttttttatcgtctggtaaaatggcaaggcaacaaattcatggtgctgcttctatctccccgtctccatcccgcaccacaggtactatttgctctttcatccgctacgatctggcagcggtttccaatggtacatgacaacaccggcagagcatcgacggatcgcttgtggttgaagggcgaaaaggctttgcttgagttgctgctaggaccttggcaagagtagacaggcaagctgacagaggaggtgaagttggcagcagaagaaccagacacccagttggagttggatcagatgtagcacagca

SEQ ID NO: 11932 - DNA, 2078 bp, Zea Mays
gaaatttagcatgcagattggattaagaatttggctaatggaagcctacattctgacgaacagacgcctcacggcactcctatggagtttggaaggagatccatcattgagagacataatgagagtgttgatgcattgataaattgtgttgttgaaaatgttggattcagtgaagggaagccggttgctgcaataaccatatacaaatgccttcttcattggagaatttttgagacggacaaaacaaatgtttttgatcgattgattcagatttttggttctgcaatgcagaaacaagataacaatgctgatcttgcatactggttatcaaattcatcatctctactgattatactacaaaagagcctcaaacctcctggttcatctgtaacaactccaatgaaaagaccacagactcagacatcattccttggaaggatgggatttcgtgcttcaagtattactgttgatatggatcttgtccgccaagttgaggccaagtatcctgctctcctttttaagcagcaacttacagcttttgtggaaggcttatatggaatgatccgagacaatgtgaagaaagaaatatcttcagtaatttcactagtcattcaggttaccccatctatcgaaagtcatcctcaggcaccaagaaatgcaaaagctggtttgatcacagatcaaggtagctattggcagacaatagtcaaacatttgaatgacctcttagaaattttgcaagaaaattgtgtaccgacagtttttgctcggaagatctttacacagattttctcattcatcaatgctcaactcttaaatagtcttctcgtgcgtcgggagtgctgttcctttagcaatggggaatatgtgaaacaagggttggacgaacttgagacttggtgcacagtggccaagccagagtacgcaggatcagcatgggatgaacttaagcacatatgccaggctgttggtttcctggtcattttcaaaaagttcaggatctcgtatgatgaaatcatcagtgatttgtgcccagtattgagtgtccagcaaatttacaaaatctgcactcagtactgggatgataaatataataccgagagtgtatctgaagaggtccttgatgagatgaaaaaagtggtgaacgagggatctggccaaggcacttcatcagacaatacatttttgctaaatgaggagataagcttgcctctatctctggaggagattgccaactctatggatgccaaggaatttcagaatgtgagtccaccgcaggaactccttgacaacgctgcattccagttcttgagaagctgaggatgagaaagacagggaggcaggcatagatagaagatacagatagatagaaatgcccggtgtcccccttagctaggtgctgtaaattcagatagttcggtcggtccatgtagccttttgaaatgaaattcttggccattctcgcttcacgtatgggccttgtaaatttagatagtgtgcgctgagcggaggagccagttcaccgacgtcgccaagccgtcgcggatccacccgtcgttgaccccatggacgctaaccccacgcccccatgggggaggaggaggaggccacatcgtacaagcagcagccggagaagatgtgtggcggccagaggaagaaggctgagtcagtgatcgcaacggagaagttatgtggagttctggcgttgtgtggcattgggctggggaattaaggagctcaacctgttggttagcgggttaggataggggatgtccatgtcaggtaaccgtttgaaaatttcctccttttcttctggtttatgctggtggtttgatttcgttggacctacatataggtggtgattttaattagttgatgttgttggatacatgtttactgtacttttgaagctttatcagtgggatttgcattgatgccctggtaaattgcagctgctcttaacgggaatgctgagagattttcgattgacaattccctaggcctcgtttggattcttagaattgaattccattgtaataattataatttagatatagatcaatcaaactaatatgatt

SEQ ID NO: 11933 - DNA, 4203 bp, Zea Mays
aagaaaaaagggcgaccaaaagacaactatgaagtatgaatcgcttcacttccgtcacaacagtagggattagggaacatggccacatcccaaggtgcttcccctggaggaggaatctgccaaccaaataaggccgcaagagccgtaatatggccctgcgagagaggctctctaaacaaactgctgtaacgctcaagatcttgatctccaatactttgagcaattttgtatcaatctaacgaacgagaagctccaacaacactttaatcagcatgtctttaagatggagcaggaagaatacaccaaagaagaaattgactggagttatatccagtttgtggacaaccaagaaattctggatctaattgagaagaaacctgggggaataattgctcttttggatgagacatgcatgttgcgaaattcaacgcatgagacatttgctgagaagttatatcaaaagtttaaagacaaccctcacttcagtaaacccaaattttcacggtctggcttcactgttcatcactatgctggcaatgtcacttatcaaacagacctgtttttagataaaaacatagattatgctgtaaatgaacatcaagttttgttaaatgcctcaaaatgttcatttgtgtcaagtctttttccaccgtgtgaagaatcaacaaaatccacaaaatttacttcaatcggctcaagtttcaagcaacaattgcagagtctgctagaaactctgagtgcaacagaaccacactatatccggtgcataaaaccaaataatgttctcaagccagcaatatttgagaacagtaatgttctccagcagcttcgttgtgggggagttttggaggcaataaggataagctgtctgggataccctactaggaggacattttatgaatttgttaatcgatttggtattctacaacccaaagtccttggtcgaagccatgatgaagttactgctgcaaaaatgcttcttgacaaagccaatcttgcaggctatcagattggaaagacgaaagtatttcttcgtgctggtcaaatggcagagttagatgctctaaggacagaagttttgggactttctgctaaaaaaatacaaagcaaacttcggtcatttctggctcgcaaaaaatatatcgagctgcaacaatgtgctacacaaatccaggcaatatgcaggggaacaactgcaagaaggcgttatgaaaaccttcgtagggatgtagcttcattgaaaatgcagacctgctaccgtatgcactatgcaaggaaaaactatgtagaaatctgttctgcgtcaactaatatccagtctggtttacgtggtatgggtgctcgcatcaaactccgcttgaagcggcaaacaaaagctgcagtgattattcagagtcgatgccgctgttatttagtacgttcacgatatgttaggctggtgaaggccacaattacggctcagtgcggttggagaagaagagtggccagaaaggaacttcgaaacctcaaaatggctgcaaaagagactggtgctctacaggctgccaaaagcaaactggagaaggaagttgaggagcttacatggcggctacagctggagaaacgtattagggctgatttggaagaagctaagtcacaagaaaataagaagctccaattacaattgcaggaattgcaattgcaactcaaagacacaaaggacctattgaaaagggaacatgaagctgccaaagaagcatcagagaaggctgctgcagtaccagagattcttgctgatacagctcaagtcaatgagcttactgctgaaaatgagaagctcaagtcattggtggcctcttttgaggaaaaacttcagaatgcagaacagaagttcgaagaaacagagaaagctagggaagaattagtcaagaaagcaacagatgcagagtcaaagataaatgaactgaagaacacaatgcaaaggttcttctgacgttacataaaagtgttgattctatctgcaaagttataaggcattacatgtgtaaattttgtcatgattagccttcaagaaaagttgactagcacggaggcagaaaaccatgttctcaggcagcaatctatgaaagcaagacctgataatatgcctttgcttaacatgcatcggaaatcaaatttggctaatggaagcctacattctgacgaacagacgcctcacggcactcctatggagtttggaaggagatccatcattgagagacataatgagagtgttgatgcattgataaattgtgttgttgaaaatgttggattcagtgaagggaagccggttgctgcaataaccatatacaaatgccttcttcattggagaatttttgagacggacaaaacaaatgtttttgatcgattgattcagatttttggttctgcaatgcagaaacaagataacaatgctgatcttgcatactggttatcaaattcatcatctctactgattatactacaaaagagcctcaaacctcctggttcatctgtaacaactccaatgaaaagaccacagactcagacatcattccttggaaggatgggatttcgtgcttcaagtattactgttgatatggatcttgtccgccaagttgaggccaagtatcctgctctcctttttaagcagcaacttacagcttttgtggaaggcttatatggaatgatccgagacaatgtgaagaaagaaatatcttcagtaatttcactagtcattcaggttaccccatctatcgaaagtcatcctcaggcaccaagaaatgcaaaagctggtttgatcacagatcaaggtagctattggcagacaatagtcaaacatttgaatgacctcttagaaattttgcaagaaaattgtgtaccgacagtttttgctcggaagatctttacacagattttctcattcatcaatgctcaactcttaaatagtcttctcgtgcgtcgggagtgctgttcctttagcaatggggaatatgtgaaacaagggttggacgaacttgagacttggtgcacagtggccaagccagagtacgcaggatcagcatgggatgaacttaagcacatatgccaggctgttggtttcctggtcattttcaaaaagttcaggatctcgtatgatgaaatcatcagtgatttgtgcccagtattgagtgtccagcaaatttacaaaatctgcactcagtactgggatgataaatataataccgagagtgtatctgaagaggtccttgatgagatgaaaaaagtggtgaacgagggatctggccaaggcacttcatcagacaatacatttttgctaaatgaggagataagcttgcctctatctctggaggagattgccaactctatggatgccaaggaatttcagaatgtgagtccaccgcaggaactccttgacaacgctgcattccagttcttgagaagctgaggatgagaaagacagggaggcaggcatagatagaagatacagatagatagaaatgcccggtgtcccccttagctaggtgctgtaaattcagatagttcggtcggtccatgtagccttttgaaatgaaattcttggccattctcgcttcacgtatgggccttgtaaatttagatagtgtgcgctgagcggaggagccagttcaccgacgtcgccaagccgtcgcggatccacccgtcgttgaccccatggacgctaaccccacgcccccatgggggaggaggaggaggccacatcgtacaagcagcagccggagaagatgtgtggcggccagaggaagaaggctgagtcagtgatcgcaacggagaagttatgtggagttctggcgttgtgtggcattgggctggggaattaaggagctcaacctgttggttagcgggttaggataggggatgtccatgtcaggtaaccgtttgaaaatttcctccttttcttctggtttatgctggtggtttgatttcgttggacctacatataggtggtgattttaattagttgatgttgttggatacatgtttactgtacttttgaagctttatcagtgggatttgcattgatgccctggtaaattgcagctgctcttaacgggaatgctgagagattttcgattgacaattccctaggcctcgtttggattcttagaattgaattccattgtaataattataatttagatatagatcaatcaaactaatatgatt

SEQ ID NO: 11934 - DNA, 3943 bp, Zea Mays
ctagacttcgcacgctgtcttgccttgctttgcgctttgagcaattttgtatcaatctaacgaacgagaagctccaacaacactttaatcagcatgtctttaagatggagcaggaagaatacaccaaagaagaaattgactggagttatatccagtttgtggacaaccaagaaattctggatctaattgagaagaaacctgggggaataattgctcttttggatgagacatgcatgttgcgaaattcaacgcatgagacatttgctgagaagttatatcaaaagtttaaagacaaccctcacttcagtaaacccaaattttcacggtctggcttcactgttcatcactatgctggcaatgtcacttatcaaacagacctgtttttagataaaaacatagattatgctgtaaatgaacatcaagttttgttaaatgcctcaaaatgttcatttgtgtcaagtctttttccaccgtgtgaagaatcaacaaaatccacaaaatttacttcaatcggctcaagtttcaagcaacaattgcagagtctgctagaaactctgagtgcaacagaaccacactatatccggtgcataaaaccaaataatgttctcaagccagcaatatttgagaacagtaatgttctccagcagcttcgttgtgggggagttttggaggcaataaggataagctgtctgggataccctactaggaggacattttatgaatttgttaatcgatttggtattctacaacccaaagtccttggtcgaagccatgatgaagttactgctgcaaaaatgcttcttgacaaagccaatcttgcaggctatcagattggaaagacgaaagtatttcttcgtgctggtcaaatggcagagttagatgctctaaggacagaagttttgggactttctgctaaaaaaatacaaagcaaacttcggtcatttctggctcgcaaaaaatatatcgagctgcaacaatgtgctacacaaatccaggcaatatgcaggggaacaactgcaagaaggcgttatgaaaaccttcgtagggatgtagcttcattgaaaatgcagacctgctaccgtatgcactatgcaaggaaaaactatgtagaaatctgttctgcgtcaactaatatccagtctggtttacgtggtatgggtgctcgcatcaaactccgcttgaagcggcaaacaaaagctgcagtgattattcagagtcgatgccgctgttatttagtacgttcacgatatgttaggctggtgaaggccacaattacggctcagtgcggttggagaagaagagtggccagaaaggaacttcgaaacctcaaaatggctgcaaaagagactggtgctctacaggctgccaaaagcaaactggagaaggaagttgaggagcttacatggcggctacagctggagaaacgtattagggctgatttggaagaagctaagtcacaagaaaataagaagctccaattacaattgcaggaattgcaattgcaactcaaagacacaaaggacctattgaaaagggaacatgaagctgccaaagaagcatcagagaaggctgctgcagtaccagagattcttgctgatacagctcaagtcaatgagcttactgctgaaaatgagaagctcaagtcattggtggcctcttttgaggaaaaacttcagaatgcagaacagaagttcgaagaaacagagaaagctagggaagaattagtcaagaaagcaacagatgcagagtcaaagataaatgaactgaagaacacaatgcaaagccttcaagaaaagttgactagcacggaggcagaaaaccatgttctcaggcagcaatctatgaaagcaagacctgataatatgcctttgcttaacatgcatcggaaatcaaatttggctaatggaagcctacattctgacgaacagacgcctcacggcactcctatggagtttggaaggagatccatcattgagagacataatgagagtgttgatgcattgataaattgtgttgttgaaaatgttggattcagtgaagggaagccggttgctgcaataaccatatacaaatgccttcttcattggagaatttttgagacggacaaaacaaatgtttttgatcgattgattcagatttttggttctgcaatgcagaaacaagataacaatgctgatcttgcatactggttatcaaattcatcatctctactgattatactacaaaagagcctcaaacctcctggttcatctgtaacaactccaatgaaaagaccacagactcagacatcattccttggaaggatgggatttcgtgcttcaagtattactgttgatatggatcttgtccgccaagttgaggccaagtatcctgctctcctttttaagcagcaacttacagcttttgtggaaggcttatatggaatgatccgagacaatgtgaagaaagaaatatcttcagtaatttcactagtcattcaggttaccccatctatcgaaagtcatcctcaggcaccaagaaatgcaaaagctggtttgatcacagatcaaggtagctattggcagacaatagtcaaacatttgaatgacctcttagaaattttgcaagaaaattgtgtaccgacagtttttgctcggaagatctttacacagattttctcattcatcaatgctcaactcttaaatagtcttctcgtgcgtcgggagtgctgttcctttagcaatggggaatatgtgaaacaagggttggacgaacttgagacttggtgcacagtggccaagccagagtacgcaggatcagcatgggatgaacttaagcacatatgccaggctgttggtttcctggtcattttcaaaaagttcaggatctcgtatgatgaaatcatcagtgatttgtgcccagtattgagtgtccagcaaatttacaaaatctgcactcagtactgggatgataaatataataccgagagtgtatctgaagaggtccttgatgagatgaaaaaagtggtgaacgagggatctggccaaggcacttcatcagacaatacatttttgctaaatgaggagataagcttgcctctatctctggaggagattgccaactctatggatgccaaggaatttcagaatgtgagtccaccgcaggaactccttgacaacgctgcattccagttcttgagaagctgaggatgagaaagacagggaggcaggcatagatagaagatacagatagatagaaatgcccggtgtcccccttagctaggtgctgtaaattcagatagttcggtcggtccatgtagccttttgaaatgaaattcttggccattctcgcttcacgtatgggccttgtaaatttagatagtgtgcgctgagcggaggagccagttcaccgacgtcgccaagccgtcgcggatccacccgtcgttgaccccatggacgctaaccccacgcccccatgggggaggaggaggaggccacatcgtacaagcagcagccggagaagatgtgtggcggccagaggaagaaggctgagtcagtgatcgcaacggagaagttatgtggagttctggcgttgtgtggcattgggctggggaattaaggagctcaacctgttggttagcgggttaggataggggatgtccatgtcaggtaaccgtttgaaaatttcctccttttcttctggtttatgctggtggtttgatttcgttggacctacatataggtggtgattttaattagttgatgttgttggatacatgtttactgtacttttgaagctttatcagtgggatttgcattgatgccctggtaaattgcagctgctcttaacgggaatgctgagagattttcgattgacaattccctaggcctcgtttggattcttagaattgaattccattgtaataattataatttagatatagatcaatcaaactaatatgatt

SEQ ID NO: 11935 - DNA, 4223 bp, Zea Mays
cgccagcctccgtggagagggcgccgaccaggctcattgaggacgacgggcctgcggggcggggagggcacgcggccccgcaaggaggggcgatgccgtcgtgtgcaggggaggagctcccaatagttgggtggcgccgacaggcagagcgagtagaagcaggggtgacacggtggatgcacgcgctggaaaaacagaggaggttggaggcgcggtggggagaggctcgccgaaggtaaggggggtcaccgcgggagcagagtccctctggcggctaggaacagaggaaggggagggaagatggcttaccattgctttgagcaattttgtatcaatctaacgaacgagaagctccaacaacactttaatcagcatgtctttaagatggagcaggaagaatacaccaaagaagaaattgactggagttatatccagtttgtggacaaccaagaaattctggatctaattgagaagaaacctgggggaataattgctcttttggatgagacatgcatgttgcgaaattcaacgcatgagacatttgctgagaagttatatcaaaagtttaaagacaaccctcacttcagtaaacccaaattttcacggtctggcttcactgttcatcactatgctggcaatgtcacttatcaaacagacctgtttttagataaaaacatagattatgctgtaaatgaacatcaagttttgttaaatgcctcaaaatgttcatttgtgtcaagtctttttccaccgtgtgaagaatcaacaaaatccacaaaatttacttcaatcggctcaagtttcaagcaacaattgcagagtctgctagaaactctgagtgcaacagaaccacactatatccggtgcataaaaccaaataatgttctcaagccagcaatatttgagaacagtaatgttctccagcagcttcgttgtgggggagttttggaggcaataaggataagctgtctgggataccctactaggaggacattttatgaatttgttaatcgatttggtattctacaacccaaagtccttggtcgaagccatgatgaagttactgctgcaaaaatgcttcttgacaaagccaatcttgcaggctatcagattggaaagacgaaagtatttcttcgtgctggtcaaatggcagagttagatgctctaaggacagaagttttgggactttctgctaaaaaaatacaaagcaaacttcggtcatttctggctcgcaaaaaatatatcgagctgcaacaatgtgctacacaaatccaggcaatatgcaggggaacaactgcaagaaggcgttatgaaaaccttcgtagggatgtagcttcattgaaaatgcagacctgctaccgtatgcactatgcaaggaaaaactatgtagaaatctgttctgcgtcaactaatatccagtctggtttacgtggtatgggtgctcgcatcaaactccgcttgaagcggcaaacaaaagctgcagtgattattcagagtcgatgccgctgttatttagtacgttcacgatatgttaggctggtgaaggccacaattacggctcagtgcggttggagaagaagagtggccagaaaggaacttcgaaacctcaaaatggctgcaaaagagactggtgctctacaggctgccaaaagcaaactggagaaggaagttgaggagcttacatggcggctacagctggagaaacgtattagggctgatttggaagaagctaagtcacaagaaaataagaagctccaattacaattgcaggaattgcaattgcaactcaaagacacaaaggacctattgaaaagggaacatgaagctgccaaagaagcatcagagaaggctgctgcagtaccagagattcttgctgatacagctcaagtcaatgagcttactgctgaaaatgagaagctcaagtcattggtggcctcttttgaggaaaaacttcagaatgcagaacagaagttcgaagaaacagagaaagctagggaagaattagtcaagaaagcaacagatgcagagtcaaagataaatgaactgaagaacacaatgcaaagccttcaagaaaagttgactagcacggaggcagaaaaccatgttctcaggcagcaatctatgaaagcaagacctgataatatgcctttgcttaacatgcatcggaaatcaaatttggctaatggaagcctacattctgacgaacagacgcctcacggcactcctatggagtttggaaggagatccatcattgagagacataatgagagtgttgatgcattgataaattgtgttgttgaaaatgttggattcagtgaagggaagccggttgctgcaataaccatatacaaatgccttcttcattggagaatttttgagacggacaaaacaaatgtttttgatcgattgattcagatttttggttctgcaatgcagaaacaagataacaatgctgatcttgcatactggttatcaaattcatcatctctactgattatactacaaaagagcctcaaacctcctggttcatctgtaacaactccaatgaaaagaccacagactcagacatcattccttggaaggatgggatttcgtgcttcaagtattactgttgatatggatcttgtccgccaagttgaggccaagtatcctgctctcctttttaagcagcaacttacagcttttgtggaaggcttatatggaatgatccgagacaatgtgaagaaagaaatatcttcagtaatttcactagtcattcaggttaccccatctatcgaaagtcatcctcaggcaccaagaaatgcaaaagctggtttgatcacagatcaaggtagctattggcagacaatagtcaaacatttgaatgacctcttagaaattttgcaagaaaattgtgtaccgacagtttttgctcggaagatctttacacagattttctcattcatcaatgctcaactcttaaatagtcttctcgtgcgtcgggagtgctgttcctttagcaatggggaatatgtgaaacaagggttggacgaacttgagacttggtgcacagtggccaagccagagtacgcaggatcagcatgggatgaacttaagcacatatgccaggctgttggtttcctggtcattttcaaaaagttcaggatctcgtatgatgaaatcatcagtgatttgtgcccagtattgagtgtccagcaaatttacaaaatctgcactcagtactgggatgataaatataataccgagagtgtatctgaagaggtccttgatgagatgaaaaaagtggtgaacgagggatctggccaaggcacttcatcagacaatacatttttgctaaatgaggagataagcttgcctctatctctggaggagattgccaactctatggatgccaaggaatttcagaatgtgagtccaccgcaggaactccttgacaacgctgcattccagttcttgagaagctgaggatgagaaagacagggaggcaggcatagatagaagatacagatagatagaaatgcccggtgtcccccttagctaggtgctgtaaattcagatagttcggtcggtccatgtagccttttgaaatgaaattcttggccattctcgcttcacgtatgggccttgtaaatttagatagtgtgcgctgagcggaggagccagttcaccgacgtcgccaagccgtcgcggatccacccgtcgttgaccccatggacgctaaccccacgcccccatgggggaggaggaggaggccacatcgtacaagcagcagccggagaagatgtgtggcggccagaggaagaaggctgagtcagtgatcgcaacggagaagttatgtggagttctggcgttgtgtggcattgggctggggaattaaggagctcaacctgttggttagcgggttaggataggggatgtccatgtcaggtaaccgtttgaaaatttcctccttttcttctggtttatgctggtggtttgatttcgttggacctacatataggtggtgattttaattagttgatgttgttggatacatgtttactgtacttttgaagctttatcagtgggatttgcattgatgccctggtaaattgcagctgctcttaacgggaatgctgagagattttcgattgacaattccctaggcctcgtttggattcttagaattgaattccattgtaataattataatttagatatagatcaatcaaactaatatgatt

SEQ ID NO: 11936 - DNA, 5486 bp, Zea Mays
cgaacatgctcccaaataattcttaccaagcaagcaccaccctccaggcgtccctccctcttcactgcttctagcatcgctgctaaaaatagtagtgaagggacacccaaacaaacgcaaccagcagcgttcacgacgacgatgcagggatatgccgagaccggggattctaccaatttgatcccctccgtctcgcgaccgccgtcctgcggtggtgctgccgctgcgtcgcgggtttgatgtcgccgctgtcaatctgattcttccgtcgcaatggcgtccaaaagccgctttgttgtgggctctcatgtctgggttgaggacccagatgaggcctggatggatggcttggtggaacagatcaatggggacgaacttgtcgtcaactgcacctctggaaagaaggtaactgctaatgtgtcaagtgcctaccccaaggataccgagtctccacgtggtggtgtggaggatatgacaaggctagcatatttacatgaaccaggagtgcttcaaaacctaaagtctagatttatgctaaatgaaatatatacttatactgggaatatcttgatagctgttaatccatttcaaagacttcctcacctatataacaacgatatgatgggcatttacaaaggagcagaatttggtgagctgagtccccatccattcgccatcgctgaccgttcgtatagacttatgatcaatgatcatataagccaagcaatattggtgagtggagagagtggagcagggaagaccgaaagcactaaaagtcttatgcaataccttgctttcatgggtggtaagcctcaagctgaaggaaggtcagtgcaacaacagatcctggagtccaacccggttcttgaggcatttggcaacgcaaaaaccgtcaggaacaataattcaagtcgttttggaaagtttgttgagattcagtttgatgcgaatgggaagatatcaggagctgctataaggacctatcttctagaaagatcacgtgtgtgccaaatatctgatccagaaagaaactaccactgcttttacatgctatgttctgcaccaccagaagattgcaaaaaatataaattgggagatcccagatcatttcactatctcaaccagtccaactgtattgcgcttgatgggctggatgactccaaagaatacacggaaaccagaagagctatgggtattgtgggtatgagtactgacgaacaggatgcaatatttagagttgtggctgctattcttcatctgggtaacatagaatttgcagaaggaagcgaagacgattcttcagtacccaaagacgagaaatcccaatttcatcttaagacagcagctgagcttttcatgtgtgatgaaaaaggtctcgaggaatctttgtgcaagcgtgtaatggcaacacgtggggagagtattacaaaaaatttagatccacgagctgcagctctgagtagagatgcattgtctaggattgtttattcacgtttgtttgattggattgtaaataaaatcaatagttcaattggtcaagatcctgattcaaagattttgattggtgtccttgacatttatggtttcgagagtttcttgacaaacagctttgagcaattttgtatcaatctaacgaacgagaagctccaacaacactttaatcagcatgtctttaagatggagcaggaagaatacaccaaagaagaaattgactggagttatatccagtttgtggacaaccaagaaattctggatctaattgagaagaaacctgggggaataattgctcttttggatgagacatgcatgttgcgaaattcaacgcatgagacatttgctgagaagttatatcaaaagtttaaagacaaccctcacttcagtaaacccaaattttcacggtctggcttcactgttcatcactatgctggcaatgtcacttatcaaacagacctgtttttagataaaaacatagattatgctgtaaatgaacatcaagttttgttaaatgcctcaaaatgttcatttgtgtcaagtctttttccaccgtgtgaagaatcaacaaaatccacaaaatttacttcaatcggctcaagtttcaagcaacaattgcagagtctgctagaaactctgagtgcaacagaaccacactatatccggtgcataaaaccaaataatgttctcaagccagcaatatttgagaacagtaatgttctccagcagcttcgttgtgggggagttttggaggcaataaggataagctgtctgggataccctactaggaggacattttatgaatttgttaatcgatttggtattctacaacccaaagtccttggtcgaagccatgatgaagttactgctgcaaaaatgcttcttgacaaagccaatcttgcaggctatcagattggaaagacgaaagtatttcttcgtgctggtcaaatggcagagttagatgctctaaggacagaagttttgggactttctgctaaaaaaatacaaagcaaacttcggtcatttctggctcgcaaaaaatatatcgagctgcaacaatgtgctacacaaatccaggcaatatgcaggggaacaactgcaagaaggcgttatgaaaaccttcgtagggatgtagcttcattgaaaatgcagacctgctaccgtatgcactatgcaaggaaaaactatgtagaaatctgttctgcgtcaactaatatccagtctggtttacgtggtatgggtgctcgcatcaaactccgcttgaagcggcaaacaaaagctgcagtgattattcagagtcgatgccgctgttatttagtacgttcacgatatgttaggctggtgaaggccacaattacggctcagtgcggttggagaagaagagtggccagaaaggaacttcgaaacctcaaaatggctgcaaaagagactggtgctctacaggctgccaaaagcaaactggagaaggaagttgaggagcttacatggcggctacagctggagaaacgtattagggctgatttggaagaagctaagtcacaagaaaataagaagctccaattacaattgcaggaattgcaattgcaactcaaagacacaaaggacctattgaaaagggaacatgaagctgccaaagaagcatcagagaaggctgctgcagtaccagagattcttgctgatacagctcaagtcaatgagcttactgctgaaaatgagaagctcaagtcattggtggcctcttttgaggaaaaacttcagaatgcagaacagaagttcgaagaaacagagaaagctagggaagaattagtcaagaaagcaacagatgcagagtcaaagataaatgaactgaagaacacaatgcaaagccttcaagaaaagttgactagcacggaggcagaaaaccatgttctcaggcagcaatctatgaaagcaagacctgataatatgcctttgcttaacatgcatcggaaatcaaatttggctaatggaagcctacattctgacgaacagacgcctcacggcactcctatggagtttggaaggagatccatcattgagagacataatgagagtgttgatgcattgataaattgtgttgttgaaaatgttggattcagtgaagggaagccggttgctgcaataaccatatacaaatgccttcttcattggagaatttttgagacggacaaaacaaatgtttttgatcgattgattcagatttttggttctgcaatgcagaaacaagataacaatgctgatcttgcatactggttatcaaattcatcatctctactgattatactacaaaagagcctcaaacctcctggttcatctgtaacaactccaatgaaaagaccacagactcagacatcattccttggaaggatgggatttcgtgcttcaagtattactgttgatatggatcttgtccgccaagttgaggccaagtatcctgctctcctttttaagcagcaacttacagcttttgtggaaggcttatatggaatgatccgagacaatgtgaagaaagaaatatcttcagtaatttcactagtcattcaggcaccaagaaatgcaaaagctggtttgatcacagatcaaggtagctattggcagacaatagtcaaacatttgaatgacctcttagaaattttgcaagaaaattgtgtaccgacagtttttgctcggaagatctttacacagattttctcattcatcaatgctcaactcttaaatagtcttctcgtgcgtcgggagtgctgttcctttagcaatggggaatatgtgaaacaagggttggacgaacttgagacttggtgcacagtggccaagccagagtacgcaggatcagcatgggatgaacttaagcacatatgccaggctgttggtttcctggtcattttcaaaaagttcaggatctcgtatgatgaaatcatcagtgatttgtgcccagtattgagtgtccagcaaatttacaaaatctgcactcagtactgggatgataaatataataccgagagtgtatctgaagaggtccttgatgagatgaaaaaagtggtgaacgagggatctggccaaggcacttcatcagacaatacatttttgctaaatgaggagataagcttgcctctatctctggaggagattgccaactctatggatgccaaggaatttcagaatgtgagtccaccgcaggaactccttgacaacgctgcattccagttcttgagaagctgaggatgagaaagacagggaggcaggcatagatagaagatacagatagatagaaatgcccggtgtcccccttagctaggtgctgtaaattcagatagttcggtcggtccatgtagccttttgaaatgaaattcttggccattctcgcttcacgtatgggccttgtaaatttagatagtgtgcgctgagcggaggagccagttcaccgacgtcgccaagccgtcgcggatccacccgtcgttgaccccatggacgctaaccccacgcccccatgggggaggaggaggaggccacatcgtacaagcagcagccggagaagatgtgtggcggccagaggaagaaggctgagtcagtgatcgcaacggagaagttatgtggagttctggcgttgtgtggcattgggctggggaattaaggagctcaacctgttggttagcgggttaggataggggatgtccatgtcaggtaaccgtttgaaaatttcctccttttcttctggtttatgctggtggtttgatttcgttggacctacatataggtggtgattttaattagttgatgttgttggatacatgtttactgtacttttgaagctttatcagtgggatttgcattgatgccctggtaaattgcagctgctcttaacgggaatgctgagagattttcgattgacaattccctaggcctcgtttggattcttagaattgaattccattgtaataattataatttagatatagatcaatcaaactaatatgatt

SEQ ID NO: 11937 - DNA, 1996 bp, Zea Mays
cttaaataggagaaatttttagccctctgcttcaagattcaatcccgaagcttgtatgtcttagtcacttctttgcaaattcaaaagcttatacatggtgatgaccttccacagttctgcccccagtccccagttagaaggaggtagtttgcatcttccgttgctggaccctaacatgcgtgcgacaccattgactccatcagagtggaaggaaagacttgaagctaggacatgccttgatgtgtcctcaggcgaaacatctggaagggggcttttgctgcttgatgtgaggaatgattatgaatgggatgttgggcactttgaaggtgctcagcggcctaatgtggactgcttcagaagcacttcctttggactttcgggagagacagatcctctaaatggtgtagacaaagagaggacagatatactaatgtactgcaccggggggataagatgtgatgtgtattcaacaattcttaggaagaagggctttcggaatctgtatacactggagggaggagtgtcgaactatctcaaggtggaggggccagcagggtgggtgggaaatctctttgtctttgatggccggctctcgttgccaccagcgacattcaatgaggaagaagatgaggaggaacagcaggagaacaagaggtgggtggggtgctgctacgtgtgcggatcagaggtggtggagctgcggcaccgcaactgcgccaacatagactgcaaccgcctttatctgtgctgcggttggtgtgcggaggagctgtgcggctgctgctgctccgactgcaaggtcgcccctcggctgcggccgctgctgccaggccaccagagatacttgaaatggcatgtctaccgcgacggacggacggacgatgaaaacaaactttatggttttgttgacgatgacagcagtggcctgtgaggttgagatagttcacgactgaaaatccaacatcccaggagggaatactttgtcttgtcgtgtgcctacctacttttatacttggacagatgagtgagtgagagttcagagttgagccggctatgtttagagtcacatgaagcgttcagatgcaacaaactttatggttttgttgggtttcttacaaattccattccactttagacctcttgtttctaaaccatatggtatttttctcgaaaacaaaagagaactgcgcatcattgtattaagaagagaaaaaggtctaaaccgacaagtagaaaccagaaatttggagggattttatcaaacacatagcggttccgatgattccataggatccaaaaccctaaaataattagagaattgagaccctctttggctacaccttgcagctggtcacttaatctctcccaccactgcatactgctagattcacctggttgggggctgaatccctgcaaattaacctgaccgagcaaacgaaaccagaaatgcctagcaaagacacatccaacctgtcctcaggctcttgcggacaactttctggatggataagacctctcttttggagtcgatccgctgtccaacatctcttaaaagcagccaaccattgaaaaaaaaattgcatttgggaggggcccaagaatgccaaattctctcccagtgcccaaaattagtagaaccaatgaaaagactttcgtatgcagctttggcagaatactttccatctgttgcaaatctgaatatatgtttatcttcctgattctgcagcaggttaatggagcttaaaatgtcccaaaggtccaggaaatcaactagcactccaactgaaactgcacctctaatatctgtcaaccatcttctatctgtcaaagcctcctggactgatctagtgttcaaatttctcttgggcacagcagcaaatagtctaggagccaaatcctttttccttgcagccagcgatccttccagaaaagggttgaagaaccatttccaatttccgttataacagccacagaaaagaaagccttcactgttcca

SEQ ID NO: 11938 - DNA, 2229 bp, Zea Mays
gtgaaagccgcccatggcgtccactgtccaccacaacagccaccaggcgctcctcctccggcctctccccactccgtctcgccacccccgcctctccttctcgccgcgcccagccggcctccgttccttcttcccggcttctggttgccgccttggcacgcatggcgttgcgcttgcagagccagagttcgttcccctacaggaggaggaggaggaggaggaggacgcccgattcgtcgtggtgaccttctacaaattcgtgcccctctttgacccccacgccgaggtcgccagacacctcaacttcctccagggacgcgacatacatggtcgcatttacttgaatgagaagggaatcaatgctcagtacagtggccctcacaaagatgcagtggcatatgcagactgggttaagaaacatcatcagttttctgatatgcttgttcaaacctcaccagctgtaactgggcatgcctttcctagactgaaactacggtacaaaccatcacttgttcagattatgaatgggatgttgggcactttgaaggtgctcagcggcctaatgtggactgcttcagaagcacttcctttggactttcgggagaggtaatacattgctcagatcctctaaatggtgtagacaaagagaggacagatatactaatgtactgcaccggggggataagatgtgatgtgtattcaacaattcttaggaagaagggctttcggaatctgtatacactggagggaggagtgtcgaactatctcaaggtggaggggccagcagggtgggtgggaaatctctttgtctttgatggccggctctcgttgccaccagcgacattcaatgaggaagaagatgaggaggaacagcaggagaacaagaggtgggtggggtgctgctacgtgtgcggatcagaggtggtggagctgcggcaccgcaactgcgccaacatagactgcaaccgcctttatctgtgctgcggttggtgtgcggaggagctgtgcggctgctgctgctccgactgcaaggtcgcccctcggctgcggccgctgctgccaggccaccagagatacttgaaatggcatgtctaccgcgacggacggacggacgatgaaaacaaactttatggttttgttgacgatgacagcagtggcctgtgaggttgagatagttcacgactgaaaatccaacatcccaggagggaatactttgtcttgtcgtgtgcctacctacttttatacttggacagatgagtgagtgagagttcagagttgagccggctatgtttagagtcacatgaagcgttcagatgcaacaaactttatggttttgttgggtttcttacaaattccattccactttagacctcttgtttctaaaccatatggtatttttctcgaaaacaaaagagaactgcgcatcattgtattaagaagagaaaaaggtctaaaccgacaagtagaaaccagaaatttggagggattttatcaaacacatagcggttccgatgattccataggatccaaaaccctaaaataattagagaattgagaccctctttggctacaccttgcagctggtcacttaatctctcccaccactgcatactgctagattcacctggttgggggctgaatccctgcaaattaacctgaccgagcaaacgaaaccagaaatgcctagcaaagacacatccaacctgtcctcaggctcttgcggacaactttctggatggataagacctctcttttggagtcgatccgctgtccaacatctcttaaaagcagccaaccattgaaaaaaaaattgcatttgggaggggcccaagaatgccaaattctctcccagtgcccaaaattagtagaaccaatgaaaagactttcgtatgcagctttggcagaatactttccatctgttgcaaatctgaatatatgtttatcttcctgattctgcagcaggttaatggagcttaaaatgtcccaaaggtccaggaaatcaactagcactccaactgaaactgcacctctaatatctgtcaaccatcttctatctgtcaaagcctcctggactgatctagtgttcaaatttctcttgggcacagcagcaaatagtctaggagccaaatcctttttccttgcagccagcgatccttccagaaaagggttgaagaaccatttccaatttccgttataacagccacagaaaagaaagccttcactgttcca

SEQ ID NO: 11939 - DNA, 2519 bp, Zea Mays
gatagcgtgcgtgaaagccgcccatggcgtccactgtccaccacaacagccaccaggcgctcctcctccggcctctccccactccgtctcgccacccccgcctctccttctcgccgcgcccagccggcctccgttccttcttcccggcttctggttgccgccttggcacgcatggcgttgcgcttgcagagccagagttcgttcccctacaggaggaggaggaggaggaggaggacgcccgattcgtcgtggtgaccttctacaaattcgtgcccctctttgacccccacgccgaggtcgccagacacctcaacttcctccaggttcttctgtcctgctcgacttcgctttcgtccagtactaccgtgtctcatttctccacccaatttaccacatagagtatgggaaacgatgcgatttcttatgcgtcggcgtcgcgtctgtctaaatctcttcttcttatgtatcatatatcagggacgcgacatacatggtcgcatttacttgaatgagaagggaatcaatgctcagactgggttaagaaacatcatcagttttctgatatgcttgttcaaacctcaccagctgtaactgggcatgcctttcctagactgaaactacggtacaaaccatcacttgttcagttagaaggaggtagtttgcatcttccgttgctggaccctaacatgcgtgcgacaccattgactccatcagagtggaaggaaagacttgaagctaggacatgccttgatgtgtcctcaggcgaaacatctggaagggggcttttgctgcttgatgtgaggaatgattatgaatgggatgttgggcactttgaaggtgctcagcggcctaatgtggactgcttcagaagcacttcctttggactttcgggagaggtaatacattgctcagatcctctaaatggtgtagacaaagagaggacagatatactaatgtactgcaccggggggataagatgtgatgtgtattcaacaattcttaggaagaagggctttcggaatctgtatacactggagggaggagtgtcgaactatctcaaggtggaggggccagcagggtgggtgggaaatctctttgtctttgatggccggctctcgttgccaccagcgacattcaatgaggaagaagatgaggaggaacagcaggagaacaagaggtgggtggggtgctgctacgtgtgcggatcagaggtggtggagctgcggcaccgcaactgcgccaacatagactgcaaccgcctttatctgtgctgcggttggtgtgcggaggagctgtgcggctgctgctgctccgactgcaaggtcgcccctcggctgcggccgctgctgccaggccaccagagatacttgaaatggcatgtctaccgcgacggacggacggacgatgaaaacaaactttatggttttgttgacgatgacagcagtggcctgtgaggttgagatagttcacgactgaaaatccaacatcccaggagggaatactttgtcttgtcgtgtgcctacctacttttatacttggacagatgagtgagtgagagttcagagttgagccggctatgtttagagtcacatgaagcgttcagatgcaacaaactttatggttttgttgggtttcttacaaattccattccactttagacctcttgtttctaaaccatatggtatttttctcgaaaacaaaagagaactgcgcatcattgtattaagaagagaaaaaggtctaaaccgacaagtagaaaccagaaatttggagggattttatcaaacacatagcggttccgatgattccataggatccaaaaccctaaaataattagagaattgagaccctctttggctacaccttgcagctggtcacttaatctctcccaccactgcatactgctagattcacctggttgggggctgaatccctgcaaattaacctgaccgagcaaacgaaaccagaaatgcctagcaaagacacatccaacctgtcctcaggctcttgcggacaactttctggatggataagacctctcttttggagtcgatccgctgtccaacatctcttaaaagcagccaaccattgaaaaaaaaattgcatttgggaggggcccaagaatgccaaattctctcccagtgcccaaaattagtagaaccaatgaaaagactttcgtatgcagctttggcagaatactttccatctgttgcaaatctgaatatatgtttatcttcctgattctgcagcaggttaatggagcttaaaatgtcccaaaggtccaggaaatcaactagcactccaactgaaactgcacctctaatatctgtcaaccatcttctatctgtcaaagcctcctggactgatctagtgttcaaatttctcttgggcacagcagcaaatagtctaggagccaaatcctttttccttgcagccagcgatccttccagaaaagggttgaagaaccatttccaatttccgttataacagccacagaaaagaaagccttcactgttcca

SEQ ID NO: 11940 - DNA, 2325 bp, Zea Mays
ccgaagaagagtagagcagagcagacagaggatagcgtgcgtgaaagccgcccatggcgtccactgtccaccacaacagccaccaggcgctcctcctccggcctctccccactccgtctcgccacccccgcctctccttctcgccgcgcccagccggcctccgttccttcttcccggcttctggttgccgccttggcacgcatggcgttgcgcttgcagagccagagttcgttcccctacaggaggaggaggaggaggaggaggacgcccgattcgtcgtggtgaccttctacaaattcgtgcccctctttgacccccacgccgaggtcgccagacacctcaacttcctccagggacgcgacatacatggtcgcatttacttgaatgagaagggaatcaatgctcagtacagtggccctcacaaagatgcagtggcatatgcagactgggttaagaaacatcatcagttttctgatatgcttgttcaaacctcaccagctgtaactgggcatgcctttcctagactgaaactacggtacaaaccatcacttgttcagttagaaggaggtagtttgcatcttccgttgctggaccctaacatgcgtgcgacaccattgactccatcagagtggaaggaaagacttgaagctaggacatgccttgatgtgtcctcaggcgaaacatctggaagggggcttttgctgcttgatgtgaggaatgattatgaatgggatgttgggcactttgaaggtgctcagcggcctaatgtggactgcttcagaagcacttcctttggactttcgggagaggaagaagggctttcggaatctgtatacactggagggaggagtgtcgaactatctcaaggtggaggggccagcagggtgggtgggaaatctctttgtctttgatggccggctctcgttgccaccagcgacattcaatgaggaagaagatgaggaggaacagcaggagaacaagaggtgggtggggtgctgctacgtgtgcggatcagaggtggtggagctgcggcaccgcaactgcgccaacatagactgcaaccgcctttatctgtgctgcggttggtgtgcggaggagctgtgcggctgctgctgctccgactgcaaggtcgcccctcggctgcggccgctgctgccaggccaccagagatacttgaaatggcatgtctaccgcgacggacggacggacgatgaaaacaaactttatggttttgttgacgatgacagcagtggcctgtgaggttgagatagttcacgactgaaaatccaacatcccaggagggaatactttgtcttgtcgtgtgcctacctacttttatacttggacagatgagtgagtgagagttcagagttgagccggctatgtttagagtcacatgaagcgttcagatgcaacaaactttatggttttgttgggtttcttacaaattccattccactttagacctcttgtttctaaaccatatggtatttttctcgaaaacaaaagagaactgcgcatcattgtattaagaagagaaaaaggtctaaaccgacaagtagaaaccagaaatttggagggattttatcaaacacatagcggttccgatgattccataggatccaaaaccctaaaataattagagaattgagaccctctttggctacaccttgcagctggtcacttaatctctcccaccactgcatactgctagattcacctggttgggggctgaatccctgcaaattaacctgaccgagcaaacgaaaccagaaatgcctagcaaagacacatccaacctgtcctcaggctcttgcggacaactttctggatggataagacctctcttttggagtcgatccgctgtccaacatctcttaaaagcagccaaccattgaaaaaaaaattgcatttgggaggggcccaagaatgccaaattctctcccagtgcccaaaattagtagaaccaatgaaaagactttcgtatgcagctttggcagaatactttccatctgttgcaaatctgaatatatgtttatcttcctgattctgcagcaggttaatggagcttaaaatgtcccaaaggtccaggaaatcaactagcactccaactgaaactgcacctctaatatctgtcaaccatcttctatctgtcaaagcctcctggactgatctagtgttcaaatttctcttgggcacagcagcaaatagtctaggagccaaatcctttttccttgcagccagcgatccttccagaaaagggttgaagaaccatttccaatttccgttataacagccacagaaaagaaagccttcactgttcca

SEQ ID NO: 11941 - DNA, 2421 bp, Zea Mays
agaaatccgaagaagagtagagcagagcagacagaggatagcgtgcgtgaaagccgcccatggcgtccactgtccaccacaacagccaccaggcgctcctcctccggcctctccccactccgtctcgccacccccgcctctccttctcgccgcgcccagccggcctccgttccttcttcccggcttctggttgccgccttggcacgcatggcgttgcgcttgcagagccagagttcgttcccctacaggaggaggaggaggaggaggaggacgcccgattcgtcgtggtgaccttctacaaattcgtgcccctctttgacccccacgccgaggtcgccagacacctcaacttcctccagggacgcgacatacatggtcgcatttacttgaatgagaagggaatcaatgctcagtggccctcacaaagatgcagtggcatatgcagactgggttaagaaacatcatcagttttctgatatgcttgttcaaacctcaccagctgtaactgggcatgcctttcctagactgaaactacggtacaaaccatcacttgttcagttagaaggaggtagtttgcatcttccgttgctggaccctaacatgcgtgcgacaccattgactccatcagagtggaaggaaagacttgaagctaggacatgccttgatgtgtcctcaggcgaaacatctggaagggggcttttgctgcttgatgtgaggaatgattatgaatgggatgttgggcactttgaaggtgctcagcggcctaatgtggactgcttcagaagcacttcctttggactttcgggagagacagatcctctaaatggtgtagacaaagagaggacagatatactaatgtactgcaccggggggataagatgtgatgtgtattcaacaattcttaggaagaagggctttcggaatctgtatacactggagggaggagtgtcgaactatctcaaggtggaggggccagcagggtgggtgggaaatctctttgtctttgatggccggctctcgttgccaccagcgacattcaatgaggaagaagatgaggaggaacagcaggagaacaagaggtgggtggggtgctgctacgtgtgcggatcagaggtggtggagctgcggcaccgcaactgcgccaacatagactgcaaccgcctttatctgtgctgcggttggtgtgcggaggagctgtgcggctgctgctgctccgactgcaaggtcgcccctcggctgcggccgctgctgccaggccaccagagatacttgaaatggcatgtctaccgcgacggacggacggacgatgaaaacaaactttatggttttgttgacgatgacagcagtggcctgtgaggttgagatagttcacgactgaaaatccaacatcccaggagggaatactttgtcttgtcgtgtgcctacctacttttatacttggacagatgagtgagtgagagttcagagttgagccggctatgtttagagtcacatgaagcgttcagatgcaacaaactttatggttttgttgggtttcttacaaattccattccactttagacctcttgtttctaaaccatatggtatttttctcgaaaacaaaagagaactgcgcatcattgtattaagaagagaaaaaggtctaaaccgacaagtagaaaccagaaatttggagggattttatcaaacacatagcggttccgatgattccataggatccaaaaccctaaaataattagagaattgagaccctctttggctacaccttgcagctggtcacttaatctctcccaccactgcatactgctagattcacctggttgggggctgaatccctgcaaattaacctgaccgagcaaacgaaaccagaaatgcctagcaaagacacatccaacctgtcctcaggctcttgcggacaactttctggatggataagacctctcttttggagtcgatccgctgtccaacatctcttaaaagcagccaaccattgaaaaaaaaattgcatttgggaggggcccaagaatgccaaattctctcccagtgcccaaaattagtagaaccaatgaaaagactttcgtatgcagctttggcagaatactttccatctgttgcaaatctgaatatatgtttatcttcctgattctgcagcaggttaatggagcttaaaatgtcccaaaggtccaggaaatcaactagcactccaactgaaactgcacctctaatatctgtcaaccatcttctatctgtcaaagcctcctggactgatctagtgttcaaatttctcttgggcacagcagcaaatagtctaggagccaaatcctttttccttgcagccagcgatccttccagaaaagggttgaagaaccatttccaatttccgttataacagccacagaaaagaaagccttcactgttcca

SEQ ID NO: 11942 - DNA, 2327 bp, Zea Mays
tagaaatccgaagaagagtagagcagagcagacagaggatagcgtgcgtgaaagccgcccatggcgtccactgtccaccacaacagccaccaggcgctcctcctccggcctctccccactccgtctcgccacccccgcctctccttctcgccgcgcccagccggcctccgttccttcttcccggcttctggttgccgccttggcacgcatggcgttgcgcttgcagagccagagttcgttcccctacaggaggaggaggaggaggaggaggacgcccgattcgtcgtggtgaccttctacaaattcgtgcccctctttgacccccacgccgaggtcgccagacacctcaacttcctccagggacgcgacatacatggtcgcatttacttgaatgagaagggaatcaatgctcagtggccctcacaaagatgcagtggcatatgcagactgggttaagaaacatcatcagttttctgatatgcttgttcaaacctcaccagctgtaactgggcatgcctttcctagactgaaactacggtacaaaccatcacttgttcagttagaaggaggtagtttgcatcttccgttgctggaccctaacatgcgtgcgacaccattgactccatcagagtggaaggaaagacttgaagctaggacatgccttgatgtgtcctcaggcgaaacatctggaagggggcttttgctgcttgatgtgaggaatgattatgaatgggatgttgggcactttgaaggtgctcagcggcctaatgtggactgcttcagaagcacttcctttggactttcgggagaggaagaagggctttcggaatctgtatacactggagggaggagtgtcgaactatctcaaggtggaggggccagcagggtgggtgggaaatctctttgtctttgatggccggctctcgttgccaccagcgacattcaatgaggaagaagatgaggaggaacagcaggagaacaagaggtgggtggggtgctgctacgtgtgcggatcagaggtggtggagctgcggcaccgcaactgcgccaacatagactgcaaccgcctttatctgtgctgcggttggtgtgcggaggagctgtgcggctgctgctgctccgactgcaaggtcgcccctcggctgcggccgctgctgccaggccaccagagatacttgaaatggcatgtctaccgcgacggacggacggacgatgaaaacaaactttatggttttgttgacgatgacagcagtggcctgtgaggttgagatagttcacgactgaaaatccaacatcccaggagggaatactttgtcttgtcgtgtgcctacctacttttatacttggacagatgagtgagtgagagttcagagttgagccggctatgtttagagtcacatgaagcgttcagatgcaacaaactttatggttttgttgggtttcttacaaattccattccactttagacctcttgtttctaaaccatatggtatttttctcgaaaacaaaagagaactgcgcatcattgtattaagaagagaaaaaggtctaaaccgacaagtagaaaccagaaatttggagggattttatcaaacacatagcggttccgatgattccataggatccaaaaccctaaaataattagagaattgagaccctctttggctacaccttgcagctggtcacttaatctctcccaccactgcatactgctagattcacctggttgggggctgaatccctgcaaattaacctgaccgagcaaacgaaaccagaaatgcctagcaaagacacatccaacctgtcctcaggctcttgcggacaactttctggatggataagacctctcttttggagtcgatccgctgtccaacatctcttaaaagcagccaaccattgaaaaaaaaattgcatttgggaggggcccaagaatgccaaattctctcccagtgcccaaaattagtagaaccaatgaaaagactttcgtatgcagctttggcagaatactttccatctgttgcaaatctgaatatatgtttatcttcctgattctgcagcaggttaatggagcttaaaatgtcccaaaggtccaggaaatcaactagcactccaactgaaactgcacctctaatatctgtcaaccatcttctatctgtcaaagcctcctggactgatctagtgttcaaatttctcttgggcacagcagcaaatagtctaggagccaaatcctttttccttgcagccagcgatccttccagaaaagggttgaagaaccatttccaatttccgttataacagccacagaaaagaaagccttcactgttcca

SEQ ID NO: 11943 - DNA, 2450 bp, Zea Mays
gacggttcttccttcccggtgtcctagaaatccgaagaagagtagagcagagcagacagaggatagcgtgcgtgaaagccgcccatggcgtccactgtccaccacaacagccaccaggcgctcctcctccggcctctccccactccgtctcgccacccccgcctctccttctcgccgcgcccagccggcctccgttccttcttcccggcttctggttgccgccttggcacgcatggcgttgcgcttgcagagccagagttcgttcccctacaggaggaggaggaggaggaggaggacgcccgattcgtcgtggtgaccttctacaaattcgtgcccctctttgacccccacgccgaggtcgccagacacctcaacttcctccagggacgcgacatacatggtcgcatttacttgaatgagaagggaatcaatgctcagtacagtggccctcacaaagatgcagtggcatatgcagactgggttaagaaacatcatcagttttctgatatgcttgttcaaacctcaccagctgtaactgggcatgcctttcctagactgaaactacggtacaaaccatcacttgttcagttagaaggaggtagtttgcatcttccgttgctggaccctaacatgcgtgcgacaccattgactccatcagagtggaaggaaagacttgaagctaggacatgccttgatgtgtcctcaggcgaaacatctggaagggggcttttgctgcttgatgtgaggaatgattatgaatgggatgttgggcactttgaaggtgctcagcggcctaatgtggactgcttcagaagcacttcctttggactttcgggagagcagatcctctaaatggtgtagacaaagagaggacagatatactaatgtactgcaccggggggataagatgtgatgtgtattcaacaattcttaggaagaagggctttcggaatctgtatacactggagggaggagtgtcgaactatctcaaggtggaggggccagcagggtgggtgggaaatctctttgtctttgatggccggctctcgttgccaccagcgacattcaatgaggaagaagatgaggaggaacagcaggagaacaagaggtgggtggggtgctgctacgtgtgcggatcagaggtggtggagctgcggcaccgcaactgcgccaacatagactgcaaccgcctttatctgtgctgcggttggtgtgcggaggagctgtgcggctgctgctgctccgactgcaaggtcgcccctcggctgcggccgctgctgccaggccaccagagatacttgaaatggcatgtctaccgcgacggacggacggacgatgaaaacaaactttatggttttgttgacgatgacagcagtggcctgtgaggttgagatagttcacgactgaaaatccaacatcccaggagggaatactttgtcttgtcgtgtgcctacctacttttatacttggacagatgagtgagtgagagttcagagttgagccggctatgtttagagtcacatgaagcgttcagatgcaacaaactttatggttttgttgggtttcttacaaattccattccactttagacctcttgtttctaaaccatatggtatttttctcgaaaacaaaagagaactgcgcatcattgtattaagaagagaaaaaggtctaaaccgacaagtagaaaccagaaatttggagggattttatcaaacacatagcggttccgatgattccataggatccaaaaccctaaaataattagagaattgagaccctctttggctacaccttgcagctggtcacttaatctctcccaccactgcatactgctagattcacctggttgggggctgaatccctgcaaattaacctgaccgagcaaacgaaaccagaaatgcctagcaaagacacatccaacctgtcctcaggctcttgcggacaactttctggatggataagacctctcttttggagtcgatccgctgtccaacatctcttaaaagcagccaaccattgaaaaaaaaattgcatttgggaggggcccaagaatgccaaattctctcccagtgcccaaaattagtagaaccaatgaaaagactttcgtatgcagctttggcagaatactttccatctgttgcaaatctgaatatatgtttatcttcctgattctgcagcaggttaatggagcttaaaatgtcccaaaggtccaggaaatcaactagcactccaactgaaactgcacctctaatatctgtcaaccatcttctatctgtcaaagcctcctggactgatctagtgttcaaatttctcttgggcacagcagcaaatagtctaggagccaaatcctttttccttgcagccagcgatccttccagaaaagggttgaagaaccatttccaatttccgttataacagccacagaaaagaaagccttcactgttcca

SEQ ID NO: 11944 - DNA, 2143 bp, Zea Mays
ctcaaattcagcggcagctgtgtaatatttcgtaatttttttatgtgctttccgttgctatatggtcttgcttgcatgagtgactgtggaaataaacccaatgggacaggtacctgcaattgttgatggaagattcaaactatttgaaagtcatgcgattttgaggtatcttgcatcggttttccctggagtagctgaccactggtatccttctgacttgttcaccagagccaaaattgagtcaatcttggattggcatcactcaaatttgcggcgtggtgcagcaacccttgtaatgcacactgcattggctcccttccttggtcttacgacaagtcatgaggctgtgaaacaagcagagaagcttgtgatgcagtcactgggggtgatcgaatccgtatggctgaaaggcgatgccaagttcttgctaggtatcccccagccatcgattgcagatctgagccttgtctgtgagataatgcagttggagatccttggcgatgaggtccgtgaccgattcctgggagctcatgagaggatccttgtctggatggacaaggtgaagaaagccacgagccctcattttgaggaagcccacgagctccttttccaagtgaagaaggcacgcatggtgcaaggcagcagcagcaaggcttttgagtcgagcacaaagctcaaaacagcatcaaagctctgacgaccaaaggcagaataagcgacagacagatccatcttgtgatataatataataaacgggaactattattaattactgttggtattaattacacttattccagaaggccacaagtgcttcgttgcacttacttattccacaaggccacggtcgggaactacttactgttcgttccagcatgctatagtaaacaactctgcaacaacatcatccccaaaaaacaagcaaacaacaaaattggtatctagtctgtcttgaatctgtgtgaaatcctctccaggccgtccttgcactcttccattgccctcttcgacttgtctccaagggttgcaccaaacgcagatacgcttcccttcacttgtgctgatacctcgtttgccctggaagcagcacaagccccaaactcggtacaccactgccttgcatctgcagcttgctgctttaggattgcgatgaaggacctcacatgctgcatcactctctccaccgcaccccgagacctcacctccatctcaccagacattgtcttgagcttctccagcagagcttctgcctggttgatagactcgtcgactgcgttttctttgccagcgttagcccatgtcaccccagctgaggcgtcatccttcagttctccttcgacaacaactctgattccttgacgctcccattggttccgggcctcctcaagggcgcgtgcatgctcccgggcctttttggcttcctcctctgcccaagccctggttaagttaaagagcacaataacatcatgcacaatgaaataatatgcacaaaaatgatcaaatctcagatgtcaagaattcttcttgccttgccatagataacgccttcctctccacttcaagctcatactgaagttgcacaacagccgagttatcgctctcaatttccttttggagtttctcaatcctactcttctcgaacgacacctccaccttcttgctcagtacgttctgcagctgttcctctacctcactcctcaacttcaacagaacttccatttcagactcaacagcagctctgcccctgaccagaatattcttctcttcctctctttctgccctcaacctatctagctccaccctagcttcttcagctactttttcaagggtctctaccctttctctttcctccttaagctccctttcaaaacttgcattaagatctttctcgacctgagcaaccaatgcagcatgtgcatttacagctgcttcagctattttctctgcctcgatacgggcaacctcctccagaaccacttcgccagaatcaccagctgaaaatgctagggcagcttgtccctttgtcacaggtttgttcggttggaaaagtcttgtgaaaccttcaagacaagagctttagcgataaccctgaatccacaccaggaagatcaattatacaaagagcttaccgaaggcaagagct

SEQ ID NO: 11945 - DNA, 2186 bp, Zea Mays
gttctgtctgtcttcacttatccgaggttccgtgcagcagtggaaaagagcagattttagcagagcagcgagggtcggagaagcctccccaagcttcgaatcgctatgcagcccgtcaaggtgtacgccgaccggcggtcgcaaccctcccgagctgtcatcatcttctgcagggtgaaccagatcgatttcgaggaggtcacggtggatctgttcaagtctcagcacctcacacccgaattcaaaagtatccttctgacttgttcaccagagccaaaattgagtcaatcttggattggcatcactcaaatttgcggcgtggtgcagcaacccttgtaatgcacactgcattggctcccttccttggtcttacgacaagtcatgaggctgtgaaacaagcagagaagcttgtgatgcagtcactgggggtgatcgaatccgtatggctgaaaggcgatgccaagttcttgctaggtatcccccagccatcgattgcagatctgagccttgtctgtgagataatgcagttggagatccttggcgatgaggtccgtgaccgattcctgggagctcatgagaggatccttgtctggatggacaaggtgaagaaagccacgagccctcattttgaggaagcccacgagctccttttccaagtgaagaaggcacgcatggtgcaaggcagcagcagcaaggcttttgagtcgagcacaaagctcaaaacagcatcaaagctctgacgaccaaaggcagaataagcgacagacagatccatcttgtgatataatataataaacgggaactattattaattactgttggtattaattacacttattccagaaggccacaagtgcttcgttgcacttacttattccacaaggccacggtcgggaactacttactgttcgttccagcatgctatagtaaacaactctgcaacaacatcatccccaaaaaacaagcaaacaacaaaattggtatctagtctgtcttgaatctgtgtgaaatcctctccaggccgtccttgcactcttccattgccctcttcgacttgtctccaagggttgcaccaaacgcagatacgcttcccttcacttgtgctgatacctcgtttgccctggaagcagcacaagccccaaactcggtacaccactgccttgcatctgcagcttgctgctttaggattgcgatgaaggacctcacatgctgcatcactctctccaccgcaccccgagacctcacctccatctcaccagacattgtcttgagcttctccagcagagcttctgcctggttgatagactcgtcgactgcgttttctttgccagcgttagcccatgtcaccccagctgaggcgtcatccttcagttctccttcgacaacaactctgattccttgacgctcccattggttccgggcctcctcaagggcgcgtgcatgctcccgggcctttttggcttcctcctctgcccaagccctggttaagttaaagagcacaataacatcatgcacaatgaaataatatgcacaaaaatgatcaaatctcagatgtcaagaattcttcttgccttgccatagataacgccttcctctccacttcaagctcatactgaagttgcacaacagccgagttatcgctctcaatttccttttggagtttctcaatcctactcttctcgaacgacacctccaccttcttgctcagtacgttctgcagctgttcctctacctcactcctcaacttcaacagaacttccatttcagactcaacagcagctctgcccctgaccagaatattcttctcttcctctctttctgccctcaacctatctagctccaccctagcttcttcagctactttttcaagggtctctaccctttctctttcctccttaagctccctttcaaaacttgcattaagatctttctcgacctgagcaaccaatgcagcatgtgcatttacagctgcttcagctattttctctgcctcgatacgggcaacctcctccagaaccacttcgccagaatcaccagctgaaaatgctagggcagcttgtccctttgtcacaggtttgttcggttggaaaagtcttgtgaaaccttcaagacaagagctttagcgataaccctgaatccacaccaggaagatcaattatacaaagagcttaccgaaggcaagagct

SEQ ID NO: 11946 - DNA, 2195 bp, Zea Mays
ctcgctgcgccgcgtctgcgttctgtctgtcttcacttatccgagggtcggagaagcctccccaagcttcgaatcgctatgcagcccgtcaaggtgtacgccgaccggcggtcgcaaccctcccgagctgtcatcatcttctgcagggtgaaccagatcgatttcgaggaggtcacggtggatctgttcaagtctcagcacctcacacccgaattcaaaaaaataaacccaatgggacaggtacctgcaattgttgatggaagattcaaactatttgaaagtcatgcgattttgaggtatcttgcatcggttttccctggagtagctgaccactggtatccttctgacttgttcaccagagccaaaattgagtcaatcttggattggcatcactcaaatttgcggcgtggtgcagcaacccttgtaatgcacactgcattggctcccttccttggtcttacgacaagtcatgaggctgtgaaacaagcagagaagcttgtgatgcagtcactgggggtgatcgaatccgtatggctgaaaggcgatgccaagttcttgctaggtatcccccagccatcgattgcagatctgagccttgtctgtgagataatgcagttggagatccttggcgatgaggtccgtgaccgattcctgggagctcatgagaggatccttgtctggatggacaaggtgaagaaagccacgagccctcattttgaggaagcccacgagctccttttccaagtgaagaaggcacgcatggtgcaaggcagcagcagcaaggcttttgagtcgagcacaaagctcaaaacagcatcaaagctctgacgaccaaaggcagaataagcgacagacagatccatcttgtgatataatataataaacgggaactattattaattactgttggtattaattacacttattccagaaggccacaagtgcttcgttgcacttacttattccacaaggccacggtcgggaactacttactgttcgttccagcatgctatagtaaacaactctgcaacaacatcatccccaaaaaacaagcaaacaacaaaattggtatctagtctgtcttgaatctgtgtgaaatcctctccaggccgtccttgcactcttccattgccctcttcgacttgtctccaagggttgcaccaaacgcagatacgcttcccttcacttgtgctgatacctcgtttgccctggaagcagcacaagccccaaactcggtacaccactgccttgcatctgcagcttgctgctttaggattgcgatgaaggacctcacatgctgcatcactctctccaccgcaccccgagacctcacctccatctcaccagacattgtcttgagcttctccagcagagcttctgcctggttgatagactcgtcgactgcgttttctttgccagcgttagcccatgtcaccccagctgaggcgtcatccttcagttctccttcgacaacaactctgattccttgacgctcccattggttccgggcctcctcaagggcgcgtgcatgctcccgggcctttttggcttcctcctctgcccaagccctggttaagttaaagagcacaataacatcatgcacaatgaaataatatgcacaaaaatgatcaaatctcagatgtcaagaattcttcttgccttgccatagataacgccttcctctccacttcaagctcatactgaagttgcacaacagccgagttatcgctctcaatttccttttggagtttctcaatcctactcttctcgaacgacacctccaccttcttgctcagtacgttctgcagctgttcctctacctcactcctcaacttcaacagaacttccatttcagactcaacagcagctctgcccctgaccagaatattcttctcttcctctctttctgccctcaacctatctagctccaccctagcttcttcagctactttttcaagggtctctaccctttctctttcctccttaagctccctttcaaaacttgcattaagatctttctcgacctgagcaaccaatgcagcatgtgcatttacagctgcttcagctattttctctgcctcgatacgggcaacctcctccagaaccacttcgccagaatcaccagctgaaaatgctagggcagcttgtccctttgtcacaggtttgttcggttggaaaagtcgaaggcaagagct

SEQ ID NO: 11947 - DNA, 2257 bp, Zea Mays
cacccttatacgttgccctcgctgcgccgcgtctgcgttctgtctgtcttcacttatccgaggttccgtgcagcagtggaaaagagcagattttagcagagcagcgagggtcggagaagcctccccaagcttcgaatcgctatgcagcccgtcaaggtgtacgccgaccggcggtcgcaaccctcccgagctgtcatcatcttctgcagggtgaaccagatcgatttcgaggaggtcacggtggatctgttcaagtctcagcacctcacacccgaattcaaaaaaataaacccaatgggacaggtacctgcaattgttgatggaagattcaaactatttgaaagtcatgcgattttgaggtatcttgcatcggttttccctggagtagctgaccactgcaacccttgtaatgcacactgcattggctcccttccttggtcttacgacaagtcatgaggctgtgaaacaagcagagaagcttgtgatgcagtcactgggggtgatcgaatccgtatggctgaaaggcgatgccaagttcttgctaggtatcccccagccatcgattgcagatctgagccttgtctgtgagataatgcagttggagatccttggcgatgaggtccgtgaccgattcctgggagctcatgagaggatccttgtctggatggacaaggtgaagaaagccacgagccctcattttgaggaagcccacgagctccttttccaagtgaagaaggcacgcatggtgcaaggcagcagcagcaaggcttttgagtcgagcacaaagctcaaaacagcatcaaagctctgacgaccaaaggcagaataagcgacagacagatccatcttgtgatataatataataaacgggaactattattaattactgttggtattaattacacttattccagaaggccacaagtgcttcgttgcacttacttattccacaaggccacggtcgggaactacttactgttcgttccagcatgctatagtaaacaactctgcaacaacatcatccccaaaaaacaagcaaacaacaaaattggtatctagtctgtcttgaatctgtgtgaaatcctctccaggccgtccttgcactcttccattgccctcttcgacttgtctccaagggttgcaccaaacgcagatacgcttcccttcacttgtgctgatacctcgtttgccctggaagcagcacaagccccaaactcggtacaccactgccttgcatctgcagcttgctgctttaggattgcgatgaaggacctcacatgctgcatcactctctccaccgcaccccgagacctcacctccatctcaccagacattgtcttgagcttctccagcagagcttctgcctggttgatagactcgtcgactgcgttttctttgccagcgttagcccatgtcaccccagctgaggcgtcatccttcagttctccttcgacaacaactctgattccttgacgctcccattggttccgggcctcctcaagggcgcgtgcatgctcccgggcctttttggcttcctcctctgcccaagccctggttaagttaaagagcacaataacatcatgcacaatgaaataatatgcacaaaaatgatcaaatctcagatgtcaagaattcttcttgccttgccatagataacgccttcctctccacttcaagctcatactgaagttgcacaacagccgagttatcgctctcaatttccttttggagtttctcaatcctactcttctcgaacgacacctccaccttcttgctcagtacgttctgcagctgttcctctacctcactcctcaacttcaacagaacttccatttcagactcaacagcagctctgcccctgaccagaatattcttctcttcctctctttctgccctcaacctatctagctccaccctagcttcttcagctactttttcaagggtctctaccctttctctttcctccttaagctccctttcaaaacttgcattaagatctttctcgacctgagcaaccaatgcagcatgtgcatttacagctgcttcagctattttctctgcctcgatacgggcaacctcctccagaaccacttcgccagaatcaccagctgaaaatgctagggcagcttgtccctttgtcacaggtttgttcggttggaaaagtcttgtgaaaccttcaagacaagagctttagcgataaccctgaatccacaccaggaagatcaattatacaaagagcttaccgaaggcaagagct

SEQ ID NO: 11948 - DNA, 6586 bp, Zea Mays
ggtgccattctgaaggagaaactgtggacattgattgctcaaaatgagccctcattaatctctttacagttgcttctcaaactagcagatgacgattgcttagccatgctggatcttcttcaatcactgcttgtagatcattactttaggtctagctctagcatatgaattgggttttgtgtgtcagaccagtacctttcttttctgccatcagttgaatgggaaaaaccctaaccctagaatagggttgggcagtgtattaatagaccaaataactgggccaggcccattacaagagacgggtatctaacacccccccgcagtcacaactctatcctgtacagatgttgagactggatcgaaagtctaaaaatacactcgatggtaaccccttggtgaaaatgtcggcgaactgcagcgtggtggggacgctgagaacccgaacgtcaccggcagcgacacgctcgcggacgaagtgcaggtcaatctccacgtgcttggtgcgctgatgctgcacggggttggtggagaggtagaccgcgctgacgttgtcgcagtaaacgagggtggcgcgctggaggggactgtggagctcgtggaggagctggcgcagccaggaggcctctgccacgccgttggccacggcacggtactcggcctcagcgctggagcgagagacgacgtgctgtcgcttggcggcccaagagacgaggttggcgcccaggaacacggcgtaaccggaggtggaccgacgcgtgtcggggcagccagcccagtcagcgtcggtgtagaccacgagctccgccgtcagggatggtcggagtaggaggccgtagtcgagggagccgcggaggtagcgcagaatccgcttgagcgcggtgagatggggctcccgcggagtgtgcatatgcaggcacacctgctggacggcgtacgcgatgtcgggcctggagaaggtgaggtactggagcgcgccggtcaggctccggtaggacgtcgcgtcggcgaccggaggcccgtcgtcctcagagagcttcgcctgagtgtcgacaggcgtggagcagggcttgcagtcagacatgccagcccgctccaggatgtcgatggcgtactggcgctggtggaggaagagaccctggggccgacgctcggcggtgatgccgaggaagtggtggaggggccccaggtccttcatcgcgaactcccgctgaagggcgacgatcgtgcggtgtagaaggtcggcggtggatgtcgtgagcacaatgtcgtcgacgtagagcaggaggtagacggtgtcgtcgccgcgccggtagatgaacagggacgtgtccgacttggcctcaacgaagccgatggaggccaggtaggaggcgaagcgactgtaccatgcctgtggcgcctgcttgaggccgtacagggaccggttcagccgacagaccagatccggacggtcggcgtcgacgaagccggtgggctggctgcagtagacagtctccgtcagagtgccatggaggaaggcattcttgacatcgagctgatggatcgcccggtcgcgggagagggcgagggagaggacggcgcgaacagtggcgaacttgacgacggggctgaaggtctcgtcgtagtccactccggggcgctgtgtgaagccccgaaggacccaacgggccttgtagcggtcgagggagccatccgaggtcagcttgtggcgaaatagccacttgccggtgaccacattggtgcctggtggacgcggcaccaggtcccaggtgtggttggccaagagggccgcatactcctcctccatagcccgacgccaatgtgggtcggcgagggcagtgcgaacggaggagggcaccggggaagcgtcgggtggggtgctggacgtagtagctgccaggatcagccggtcgacggggcggagaacgccagcggcgcgccgagtcaccatcgggtggacgtgcccgggttcgcgatggatggcgaccgggtggtatatggacgactcggagcgcatcgccggggcgtcgggtatggtcggctcgcggcggtgatagacgacggctgggtcggcgaatcgggccgcgctcgtcgacgggcccgagtcgggatgtgccgaggaagtggcgtggccacggcgatggtagacgagggcggggttggcgaagcgagccgaggtcgacggagccgcgcgtggcgcaggcggggtcgacggggccgcgcgtggcgcaggcggggtcgacggggccgcgcgtggcgcaggcagggtcgacggggccgcgcgtggcacaggcggggtcgacggggccgcgcgtggcgtaggcgtggtcgacgtggccgcgcgtggcgcaggtaggatcgacggggccgcgcgtggcgcaggcggggtcgacggagccgcgcgtggcgcggaagaggtcggagtggccgcacgaggagcaggtaacggcgcaagacggggagccggaggtgggggaggaatcggatcggactcgaggagggagtcaagatcggtgggtggggtggagccagcaaggggaaacacgtcttcgtcgaagacgacatgacgagagatgatgatgcggtgggaggtgaggtccagacaccggtaccccttgtggtcaggggagtagccaaggaatagacagcgggtggagcgaggagaaagcttatgtggagcggtagcggaagtgttagggtagcaggcacagccgaacacgcgaaggtggtcataggaaggggctgtgccgtatagggcgaagtgaggggtagggtggcgcaccgccttcgagggaagacggttgaggaggtgggtagcagtgtgcagggcctctgcccagtagctggcagggagagacgcctggaagaggaggcagcggatcatgttggtggtggtgcgaatcatgcgctcggcccggccattctgagcagaggtgtagggacacgagagacgcagctggacgccgtgagtgaggaagaaagagcgagaggcgttgttgtcgaactcgcgaccattgtcgcactgcagggcacggaccgggcgccggaactgggtggatacccaggcgaagaagtgagtgagggtggtaaacgtgtcggacttcagccgaagggggaaagtccaaaggaaatgggagtggtcatccagaatgaccaggtagtatttgtagccggagaggctaaggacaggagatgtccagagatcacagtggacaagatcaaaggcctgaacagccctggacgtggaagtggaaaaaggaagacgggagtgacggccgagctgacatgcatgacagaggcgctcagaagagccccgagtatatgatatgtcggagtggccggaaagctgggacatgacgtcaggtccagggtgcccgaggcgacggtgccaaatggctgaggaggtggtggtagtagcaagagcatgtgatggggtggtagtagtaagtgcaggagatggggctactctggtgtgaggagtggagggcaagtgaagagaatagagtgggccggagctgtcacagcgagcgagcacagcatgtgtgggaaggtggcgtatggtgaggccccaggggtcgaactccatagagcactggttgtcactagtgaagcgacgcaccgagaggaggggatgagtcagtccgggagcaacaaggacgtcgttaaggcagaatggtccaggaagaaccgatgtacctactgaggtgaccgggagggtggaaccgttgccgacgacgatggaggtaggatgtgaggggtggggtggatgggagtggagtaacgaattagtggtgggggtagtgtggaaggaggccccggagtcaaccacccaatcggtggtggttcggggaggtggaagtggcgaatgtacggtgtgagcggagagagccaaagaaggtgccccgacagaggcactaggaagggagggagatgacatgggctcaaccgctagggaggcgatcgcagcacgtgggaagacaagcggtccaggcacatgacggcccgcctgagggtggacctcgacgcagtcccgaagaatagggttccagactggatcgaaggacacgaacatgccccggatgagctggccgtcgtggaggaggacacgcacagtcacgagagcgacgggcgggataaggctcatgtatggcgggggtgacgtcatgaaaccggtgtgggtggggacactgctgttaggagaagcgcaacggcgcgaggagcgcgaagggccgtccagaagggcgcgcgcagccacgagggacgagttcggggcggagtggctgggagttggggccgacggcgcccgacggcagggagtggctgtggtagcgctgctgggaacagagaggcagacagtgcccgagttggggccgacggcgcccgacggcagggagtggctgcggtaggcgctgatgggaacagaggcagacagtgcccgacagcaagggaagaggaggccgcagcggggagcgctcgcggcagggagaagggtgagatgaagcgaggtcggagatgagcgccgacctgaccacggcgtgcggtgctggagcagagtggaggcacgacgaggcaggacgccggcgtggagcagggacggcggcgtcgaggctgcaggtccggcggggcgggtcggctgcgcagcacggtcggccgaggcgtcgggcgtcgatgggtgcaggggcgcgcggtggcggctccaggcgcgggcactgctcggcgtcggggtagcagacggcggccttggcgacgcgagtgcggaccagccaagctcgcggtctcggcggtgcgagcgcggaccagcgactcacggccttggcggcgcgcgggcgggtcctggcgcggttgctgctcgcgtgtttggcgcgcgaagcagaggggcagggggcggcggccggggcaagggaaatgaccggcggcggctggagggaggagagggcgcctcgtcgggctggggcggcgcctggggagaaggcgcgcggccctggcggcgcgacggactaggggcggcgcctggagggtggcggctggaaaaaaaactacagtggctctggtaccaagttgaatgggaaaaaccctaaccctagaatagggttgggcagtgtattaatagaccaaataactgggccaggcccattacaagagacgggtatctaacaccatcaacttaattttttctcgaaaacgcgcaggagaactgcgcctcattatattaagaagaaaaagaaaccagggtctaaaagaaggcccaatacaaaagaccccttacggggccagaaacatgcatataggaaggaatccatctaggaaaacaaaaaaaaacccacacactgccaggaaagtccctagggctcagctaagggggctgccaggtaagaaatgccttttcccccgctatttcccatcgatgcatctcctcaagcagataatgaatgctcgtgaggctgtagcgaggaaaggcttccaaagtatactgcaaatgtctacagatggccttgttgttggttcgttaatgaattggttgatggataagcttgatccagttgacatgaccatactgcctggcctaggaaaggagctgaagataacaaaggagactgttcgtctaattcttgggttgcctagtgctgggggagggaaaccgtttatggattggtatggagaagttgatgctgctggcaggcttaggaaacaactcaaaatttcgaaggatgagtttgatattgccacccttcaggaaataattgttacaggtcgtgatgatgatctaaccattaggtgtttcttccttatcctattcaaccggctgttgttcccgacctcttcatggtcaatctccaacaatgaagttctaatgacagaagacatggaccgcttcccagacatcgattggtgtcagttagtatttaacgatttgtgtgaggctgctgcaaaatggcataaaaggaacactaatcatgtcaccgctacgatatataggtgttccatagtcattgtggtaattcctgtgatgccatagtctatgtacatcttgcattgtaggcgtggctatagtggttgttgcacctacacgtctcgaacagttgtgtttgtacacctgcaccatgaccgtagctgcagtggtgccttttatcgtaacatcgcccatcgcaattaatgtgatgaatggaagccttatcttgaccaccatgtaccacatgactgaatagagtcgcacatggcaccggggtcatcgttcctagggccgtcgcacggcaatacctcctctaacaagtaaataacatagcaaaagactatgacaacaaggatttctcattccttgacaatctgaggactaaaataaaggcctatggtcctagttcaaatattacacgtcatacgggtagatgcattaaatgtttcaaattcaaagtcacatatcatgatgtaacatttacctcccaaaggtacaaggagtccccaaatgatagttctcgccggaacaataccatgaacatgcggaatgcgaagagatagtcacccccgccaagtctttctgtgttgagaagtcgacaataaccaattgcaggatgtattgatgtaaaaccag

SEQ ID NO: 11949 - DNA, 566 bp, Zea Mays
agccctcattaatctctttacagttggtaattctgttgttctgaattttccactaagaatactttgttatcccacaaaatgacacgaaagtgcatgtatggatgtacttcagcatctcagcacctttttatttattatttagatcctgatgagctacttatggaatatgcatttatgtaaactgtgtttggagaaataattcttagtggttaaaagaattctaaagggtgtagtgtaatcattcgtattaaatcttatgacttttaagatctttgatgatacctcgaaactaaatctctttgtattaatgcttttgtaacactgttttctcctgacagcttctcaaactagcagatgacgattgcttagccatgctggatcttcttcaatcactgcttgtagatcattactttaggtctagctctagcatatgaattgggttttgtgtgtcagaccagtacctttcttttctgccatcagttgaatgggaaaaaccctaaccctagaatagggttgggcagtgtattaatagaccaaataactgggccaggcccattacaagagac

SEQ ID NO: 11950 - DNA, 636 bp, Zea Mays
gtgagtaccgtcctaatctggtagcgtggacagtccattggcctaaaatcagctgcacagcaaagagattgcttcaagggcaagaggctccaagtccacaggctggaattgttctgaatcagagaccagatgagaggatggtcagcacttcctcgtgctgctcatgaagctgtgtttcaacctcatacatagttccgttatgaaatgtatcagaggagattaagcaaaatatcccatgtggtgtcggtgtcgtccaggctgatgttgtccccttctcctgctgctcgtttcttttcacatgtttgtgatgtaaatgcccatactagaatgtcaccaaagtgttgattatgctcttatcatttgattacgcccctctcaaatttgcgtaaatacaaggtgtaattttttaagtctttaactgggttactcctactgacttggtagagcatggtaaattcagctacagtatcattgctgcaggaaccaagaaaggaaaggtgccctgttaataatgtttcctttctaaatgtcgctttgccagtttccaaatttcctgacatggaacagtaattgtaattttgaggagtattgtattgtcattgtcgtgggtacttctgtattgtattgtaatcttga

SEQ ID NO: 11951 - DNA, 819 bp, Zea Mays
gccgccttaacaactatgctttcaatgcctccttcacccgtgccaagaaatgggttcaagaacttcaagctcaaggaaatccgaatacaatagtggctcttgctggtaacaaggttgatatgctagatgcgaggcacgtggcagtagaggaagcaaagacgtatgcccaggagaacggtctcttcttcatggagacatctgctaaaactgcaatcaatgtgaatgacatattttatgagattgcaaagagattgcttcaagggcaagaggctccaagtccacaggctggaattgttctgaatcagagaccagatgagaggatggtcagcacttcctcgtgctgctcatgaagctgtgtttcaacctcatacatagttccgttatgaaatgtatcagaggagattaagcaaaatatcccatgtggtgtcggtgtcgtccaggctgatgttgtccccttctcctgctgctcgtttcttttcacatgtttgtgatgtaaatgcccatactagaatgtcaccaaagtgttgattatgctcttatcatttgattacgcccctctcaaatttgcgtaaatacaaggtgtaattttttaagtctttaactgggttactcctactgacttggtagagcatggtaaattcagctacagtatcattgctgcaggaaccaagaaaggaaaggtgccctgttaataatgtttcctttctaaatgtcgctttgccagtttccaaatttcctgacatggaacagtaattgtaattttgaggagtattgtattgtcattgtcgtgggtacttctgtattgtattgtaatcttga

SEQ ID NO: 11952 - DNA, 820 bp, Zea Mays
gtcagatcagtggggttgctaggcgaggcctccttcacccgtgccaagaaatgggttcaagaacttcaagctcaaggaaatccgaatacaatagtggctcttgctggtaacaaggttgatatgctagatgcgaggcacgtggcagtagaggaagcaaagacgtatgcccaggagaacggtctcttcttcatggagacatctgctaaaactgcaatcaatgtgaatgacatattttatgagattgcaaagagattgcttcaagggcaagaggctccaagtccacaggctggaattgttctgaatcagagaccagatgagaggatggtcagcacttcctcgtgctgctcatgaagctgtgtttcaacctcatacatagttccgttatgaaatgtatcagaggagattaagcaaaatatcccatgtggtgtcggtgtcgtccaggctgatgttgtccccttctcctgctgctcgtttcttttcacatgtttgtgatgtaaatgcccatactagaatgtcaccaaagtgttgattatgctcttatcatttgattacgcccctctcaaatttgcgtaaatacaaggtgtaattttttaagtctttaactgggttactcctactgacttggtagagcatggtaaattcagctacagtatcattgctgcaggaaccaagaaaggaaaggtgccctgttaataatgtttcctttctaaatgtcgctttgccagtttccaaatttcctgacatggaacagtaattgtaattttgaggagtattgtattgtcattgtcgtgggtacttctgtattgtattgtaatcttga

SEQ ID NO: 11953 - DNA, 1059 bp, Zea Mays
cgccaatactgggctgcttggttcttcttggagatgtaggcgctggcaaatctagcttggttcttcggtttgtcaagggacagtttgttgaattccaggaatcaacaatcggagcagctttcttttcccagaccttagcggtaaatgatgagactgttaagtttgaaatctgggatactgctgggcaggagaggtatcatagcttggcccccatgtattataggggtgcagccgccgccattgttgtctatgacatcacaaatccggcctccttcacccgtgccaagaaatgggttcaagaacttcaagctcaaggaaatccgaatacaatagtggctcttgctggtaacaaggttgatatgctagatgcgaggcacgtggcagtagaggaagcaaagacgtatgcccaggagaacggtctcttcttcatggagacatctgctaaaactgcaatcaatgtgaatgacatattttatgagattgcaaagagattgcttcaagggcaagaggctccaagtccacaggctggaattgttctgaatcagagaccagatgagaggatggtcagcacttcctcgtgctgctcatgaagctgtgtttcaacctcatacatagttccgttatgaaatgtatcagaggagattaagcaaaatatcccatgtggtgtcggtgtcgtccaggctgatgttgtccccttctcctgctgctcgtttcttttcacatgtttgtgatgtaaatgcccatactagaatgtcaccaaagtgttgattatgctcttatcatttgattacgcccctctcaaatttgcgtaaatacaaggtgtaattttttaagtctttaactgggttactcctactgacttggtagagcatggtaaattcagctacagtatcattgctgcaggaaccaagaaaggaaaggtgccctgttaataatgtttcctttctaaatgtcgctttgccagtttccaaatttcctgacatggaacagtaattgtaattttgaggagtattgtattgtcattgtcgtgggtacttctgtattgtattgtaatcttga

SEQ ID NO: 11954 - DNA, 1121 bp, Zea Mays
gtggaaaccctttttttctgggaaaacaatgaaccatataccaccaacggaacacgggaacggcggaagcaaacaactagaaattccccagcccggttccttttcgtgcggtttgatctcgtcggaggcccggccgcagttccgccatcagccatcgaattcgatggcggccaacttcgggaacaagatccgcaacgccaagctggttcttcttggagatgtaggcgctggcaaatctagcttggttcttcggtttgtcaagggacagtttgttgaattccaggaatcaacaatcggagcagctttcttttcccagaccttagcggtaaatgatgagactgttaagtttgaaatctgggatactgctgggcaggagaggtatcatagcttggcccccatgtattataggggtgcagccgccgccattgttgtctatgacatcacaaatccggaagcaaagacgtatgcccaggagaacggtctcttcttcatggagacatctgctaaaactgcaatcaatgtgaatgacatattttatgagattgcaaagagattgcttcaagggcaagaggctccaagtccacaggctggaattgttctgaatcagagaccagatgagaggatggtcagcacttcctcgtgctgctcatgaagctgtgtttcaacctcatacatagttccgttatgaaatgtatcagaggagattaagcaaaatatcccatgtggtgtcggtgtcgtccaggctgatgttgtccccttctcctgctgctcgtttcttttcacatgtttgtgatgtaaatgcccatactagaatgtcaccaaagtgttgattatgctcttatcatttgattacgcccctctcaaatttgcgtaaatacaaggtgtaattttttaagtctttaactgggttactcctactgacttggtagagcatggtaaattcagctacagtatcattgctgcaggaaccaagaaaggaaaggtgccctgttaataatgtttcctttctaaatgtcgctttgccagtttccaaatttcctgacatggaacagtaattgtaattttgaggagtattgtattgtcattgtcgtgggtacttctgtattgtattgtaatcttga

SEQ ID NO: 11955 - DNA, 557 bp, Zea Mays
tatgctgatattaaacttacaagaccagtcttctgactgcatttgatcaactgaagtcatgatgtccaaatgccaatgggacagtacattctttccttctgtgggccaataacaagagctttaatttatttattttcttggtataaagtgggttgcaatccaaacagattgcatttggacagttgcaactgtacactcatttaggaaggataggcctagcggcaattgtgagaagccttttcactgagtcaaatgacctaggttcgacagtctctatgcaaaaatgtaggaataaaatttgcctcggttttttagaccgcaatcgacatgtccttgtatgtaccctcagttgtgtctgtacgtaccctcacatttggtgcatttgactttctgcaaacagtgatgcaaagcatgcaatatcatgaacaaaaccattttccagtgaaaaaatagtcaggtccgttttgaagaaccaaaaaagattctgcgcatcgacctgtagctaatcaaaatttcaatattttggttacagaaggttccaggatgtacagtgaggt

SEQ ID NO: 11956 - DNA, 504 bp, Zea Mays
ctcatatttaataggttgcatagttatactagtttttctatatactaaatgatgcagctggattgaattgcttcaacagaaaaacaacagtactgaaactaatctacaggatgaagagttgaactacagagaactttttttgaatttgatctaagaggactgcattaatgaacatagcaaaaaagcagtatcatatatgatagcgttgattagtgaaataagtatagatgacaatcttgtgttgtgtagcacagtacacagatgtgatgcgagtcttacctcgctgcagattttcaacttgacgagttaacacttcaacaagatttactttttcatccatttctacagagaacagagaaaaggggggacaatttttcttgaatgaccaaaagcattttgatatcataattattgaaaaaatagcaatttgcgagaaatagaagcatgttaaggtcattgcacaattatttgattcaacaagataaccagtcttccttaaaaaac

SEQ ID NO: 11957 - DNA, 272 bp, Zea Mays
ctcatcgacgatgaagaaattgtgtctgtgctcagcacacaatgtccagtaaggagtactgcccaagatcaagatggaaaatgtcactctgttggggtgaccaactcactaaaccaaatttcatttaataacatgtccatgcactattactctttgcgtatatgtaaaggtagagaagaacaaaatcagcacacatctcttagcaatgttcattactgctaaaagctacagtttattaaataaaatagccacatattttaagtcaaagtgag

SEQ ID NO: 11958 - DNA, 3912 bp, Zea Mays
tattgttgtgattcatcgtaatattatattcataacgagatagcataatcctcgctcccgcacaaatgcacaattccatcccggccatggcagtctcctccccgccgcctcctcgattgcacctctccctccatcttcgaaagcctatccagaactcgccgcctagcggcaaaaaggcacgccccgctccgacagccgagacgctccgccgccggttcctccgccggggcgtctcgccgacccccaagatcctccacaccctccgcaagaaggaggcgcttaaggccctccgccgcgcaaggaaggacacggccgcagccgctactgcgtcacgcaatccgtgcgacgaggaggagacccgcttccgtgcggccgccgcggagtaccacgcgctcgcgggacggccatgggacgccggcacccgcggcatggcgcccccgcgcggtttggacggggaggagggcgggctcgagggcctgagggagatgctcgcggcgaggaggggcgacgggttccgttggctactggatgacgacatcgaggctgaggcagcggagaggaagcaacagaggcgtccgggcgccggctgggatgtggggaccgaggacgaggagaggaggattcagttgctagtcagcagaacatccatccaactggtattggagtcaaatgatccaaccttgccgcagcctgaagatcgaatatctggtgtcgagaagggcttggctgggttacaaccaaattgcgggccaccatggaacaaaaagaggttaaacggagattacctaagttttcgtgattggaggcttactagagtgatgaaaagggctgacatcatatatagtgaagataatctactgagaatactagatgggcttgaggcacgaggaaactggaggcaggctttatctattattgagtgggtgtacaatgaaaatagctataggcatcggaaaagcaggtttgtgtatacaaaattactctcaatccttgggaaatcattaagagcaactgaagcacttcacattttcaccatcatgcggggagatgctcaaatataccctgatatgcctgcataccattgtattgctgttactcttggtcgagctggtcttctgaaggagttaatcaagattattgagtatatgagacagaagccctcaaaactagtaatgaagatgcggcgcaaggattgggatccttcattggagcctgatgtacttgtttataactcggtgctcaatgcatgtgttctgtcacagcagtggaaaggtgtattttgggtgttccagcaaatgagaattggtggtttaccacctacaggagcaacatatgggttggccatggaagttatgttgaaagccaagaagtatgactttgtccagaagttctatgagaagatgcagaaaaatggcgtaccaccaagagcaataacttacaaagtgcttgtaagatctttttgggagcaggataaaattaatgaagctgttgaagcagtcaatgacatggaacaaagaggagttgttggagcagcaagtgtttactatgaattagcttgctgtctctgcaataatggaaggtggagagatgctatgttacaggttgagaagctgaaacagcttcccctcacgaaaccactggagtacgcatttactggaatgatcttagcctcatttaatggtggatatatctatgattgcatctcaatatttgaattaatgaaggaccactgcatgccaaatattgggactgtgaatgtcatgttaaaagtttatggacattgtgatatgtttgggaaggcaaaggacttgtttgaaaccaccaaggcttgtttcttaaattctcagacatatatccacgagcattcgtcattcaaagcagacacatatacatacaactctatgcttgaagcatctgcctctgcccaacagtgggaatacttcgaatatgtgtatagagagatggctctgtctcatcactgtctagatcaaagcaaatattcatggttgctcatcaaggcatgcagagctggaaagccatatttgctggagcatgcacttgactcgatacttgaaagaggagagatccctgatgtacagttgattactgaatcgatatgccagtctattgctcatagagattatggaaggacgctgcagctcttgaatattatgacccaggcctcaataaaaattaaagaagtcgagtgggattacctactacagcaaaatatgcatcaattcagcattgatgccctcgagggccttataaagtatctcagtactaatggtactaccaatgctgatcctgcagttgatttagtaagagcactgcagtcccaatgccgggacgataccagtactcaacagtttgaactctcttttcatggaagtggaaacaaatattcatgtagcagtctggcagaactagatcagctcacttgcaagaacttgtgcactgatataattcttgacgtccctggttctgatagagagatgcctcagttaggtgtcagtgctctcatgtgcagggacatctcattaaacggtcaacgagtggaaaacaaacatgagctttctgatcttgggcagaggggtccacaggtatctgcaattgacaaagtacttgattccatgaattcttatggtgacaattcgtatggggagatgccatcagcttcaaaaattcttgagctgtgggagcatgagaggtaaatgacatgtttgctccaaaaacagaaaattagaggataaatgaaatgctagcagatattatttgatatatgggcagtgcaatccttgtataaattactgacaaatgctgtaaatttgaaggcccctaagttggttcgtgggatctctgctgcaatcgtgttgcctaaaattattatcagaaggctcttatttgtgtgatctcattgtccatactacggaaaaaacagggaatatatagaagctctgagctcttggaagataaatttatgcattgacactgtttctctatttatagcgtctctcaaccctcacccaaccaccatctccatcgccaatgcatgggtctgggggcttttctgcgatcagcacctccttataaggacgacgtgatccactgctagccaaagaagcagcagatgaagtgttaaggccttcgtcttcacaccatcgctgatacttcaagcgacatccaagaaaagcattagatgggtggtgggggaaggaggagaggaggccaacgccgggagacaaagggtggttactgacgacattggaagaaggaccggcgtgaggctatagggtggaggagtagaggcatcgacctaagggaggccaaggggcatgagcggaagggacatctagctaaccttacattcagttgttggacatctaactattacactgtataacgcgtgcatatacatgtatccttatacaccctcgaaaaactatggcatcaaatctcaagatcaacaaaattatcataagcacctccatcgacagacatatcacttactggaagatgtcatcaacttttaaaataaatctggaaaatacaatcacccgtgcctaattgaggttaaacggtatgcaaattccacaagagtgttacgcccctagccaccggctcgagttcgccgagacgtgagcaaccagtgccgactccgagacgacgctttcagtcagatgcttttaacatggagagaaaaggcaacaggaaaagaaagctaaacaactttagttaggcgacactgggatcaataatgaattgattctttaagtttcaagagcaatcagcaatcctcctcttccaaacaggtatttagggtaaaaaaagaagtctacaatcattgtctcaatacgaagcaacatctctacatgcaatccttttttttaaccttgactaacataatgccag

SEQ ID NO: 11959 - DNA, 4148 bp, Zea Mays
tattgttgtgattcatcgtaatattatattcataacgagatagcataatcctcgctcccgcacaaatgcacaattccatcccggccatggcagtctcctccccgccgcctcctcgattgcacctctccctccatcttcgaaagcctatccagaactcgccgcctagcggcaaaaaggcacgccccgctccgacagccgagacgctccgccgccggttcctccgccggggcgtctcgccgacccccaagatcctccacaccctccgcaagaaggaggcgcttaaggccctccgccgcgcaaggaaggacacggccgcagccgctactgcgtcacgcaatccgtgcgacgaggaggagacccgcttccgtgcggccgccgcggagtaccacgcgctcgcgggacggccatgggacgccggcacccgcggcatggcgcccccgcgcggtttggacggggaggagggcgggctcgagggcctgagggagatgctcgcggcgaggaggggcgacgggttccgttggctactggatgacgacatcgaggctgaggcagcggagaggaagcaacagaggcgtccgggcgccggctgggatgtggggaccgaggacgaggagaggaggattcagttgctagtcagcagaacatccatccaactggtattggagtcaaatgatccaaccttgccgcagcctgaagatcgaatatctggtgtcgagaagggcttggctgggttacaaccaaattgcgggccaccatggaacaaaaagaggttaaacggagattacctaagttttcgtgattggaggcttactagagtgatgaaaagggctgacatcatatatagtgaagataatctactgagaatactagatgggcttgaggcacgaggaaactggaggcaggctttatctattattgagtgggtgtacaatgaaaatagctataggcatcggaaaagcaggtttgtgtatacaaaattactctcaatccttgggaaatcattaagagcaactgaagcacttcacattttcaccatcatgcggggagatgctcaaatataccctgatatgcctgcataccattgtattgctgttactcttggtcgagctggtcttctgaaggagttaatcaagattattgagtatatgagacagaagccctcaaaactagtaatgaagatgcggcgcaaggattgggatccttcattggagcctgatgtacttgtttataactcggtgctcaatgcatgtgttctgtcacagcagtggaaaggtgtattttgggtgttccagcaaatgagaattggtggtttaccacctacaggagcaacatatgggttggccatggaagttatgttgaaagccaagaagtatgactttgtccagaagttctatgagaagatgcagaaaaatggcgtaccaccaagagcaataacttacaaagtgcttgtaagatctttttgggagcaggataaaattaatgaagctgttgaagcagtcaatgacatggaacaaagaggagttgttggagcagcaagtgtttactatgaattagcttgctgtctctgcaataatggaaggtggagagatgctatgttacaggttgagaagctgaaacagcttcccctcacgaaaccactggagtacgcatttactggaatgatcttagcctcatttaatggtggatatatctatgattgcatctcaatatttgaattaatgaaggaccactgcatgccaaatattgggactgtgaatgtcatgttaaaagtttatggacattgtgatatgtttgggaaggcaaaggacttgtttgaaaccaccaaggcttgtttcttaaattctcagacatatatccacgagcattcgtcattcaaagcagacacatatacatacaactctatgcttgaagcatctgcctctgcccaacagtgggaatacttcgaatatgtgtatagagagatggctctgtctcatcactgtctagatcaaagcaaatattcatggttgctcatcaaggcatgcagagctggaaagccatatttgctggagcatgcacttgactcgatacttgaaagaggagagatccctgatgtacagttgattactgaatcgatatgccagtctattgctcatagagattatggaaggacgctgcagctcttgaatattatgacccaggcctcaataaaaattaaagaagtcgagtgggattacctactacagcaaaatatgcatcaattcagcattgatgccctcgagggccttataaagtatctcagtactaatggtactaccaatgctgatcctgcagttgatttagtaagagcactgcagtcccaatgccgggacgataccagtactcaacagtttgaactctcttttcatggaagtggaaacaaatattcatgtagcagtctggcagaactagatcagctcacttgcaagaacttgtgcactgatataattcttgacgtccctggttctgatagagagatgcctcagttaggtgtcagtgctctcatgtgcagggacatctcattaaacggtcaacgagtggaaaacaaacatgagctttctgatcttgggcagaggggtccacaggtatctgcaattgacaaagtacttgattccatgaattcttatggtgacaattcgtatggggagatgccatcagcttcaaaaattcttgagctgtgggagcatgagaggtaaatgacatgtttgctccaaaaacagaaaattagaggataaatgaaatgctagcagatattatttgatatatgggcagtgcaatccttgtataaattactgacaaatgctgtaaatttgaaggcccctaagttggttcgtgggatctctgctgcaatcgtgttgcctaaaattattatcagaaggctcttatttgtgtgatctcattgtccatactacggaaaaaacagggaatatatagaagctctgagctcttggaagataaatttatgcattgacactgtttctctatttatagcgtctctcaaccctcacccaaccaccatctccatcgccaatgcatgggtctgggggcttttctgcgatcagcacctccttataaggacgacgtgatccactgctagccaaagaagcagcagatgaagtgttaaggccttcgtcttcacaccatcgctgatacttcaagcgacatccaagaaaagcattagatgggtggtgggggaaggaggagaggaggccaacgccgggagacaaagggtggttactgacgacattggaagaaggaccggcgtgaggctatagggtggaggagtagaggcatcgacctaagggaggccaaggggcatgagcggaagggacatctagctaaccttacattcagttgttggacatctaactattacactgtataacgcgtgcatatacatgtatccttatacaccctcgaaaaactatggcatcaaatctcaagatcaacaaaattatcataagcacctccatcgacagacatatcacttactggaagatgtcatcaacttttaaaataaatctggaaaatacaatcacccgtgcctaattgaggttaaacggtatgcaaattccacaagagtgttacgcccctagccaccggctcgagttcgccgagacgtgagcaaccagtgccgactccgagacgacgctttcaggcccaaaccatcaatatcaatgctaatgtcttaagtaatcaaggcccaacagactgccagctgatggggcacttgccgaggaagaagaggatcccgtgatacgcctgggccttctaggagtgcgtaagggcgaatagaggagcagcgcagcctgggacagggacctgagcgtgtatggtggagaagagcgagaggaagaagcaggagcaagatcaccgtcagccagggtgaccgagtcagatgcttttaacatggagagaaaaggcaacaggaaaagaaagctaaacaactttagttaggcgacactgggatcaataatgaattgattctttaagtttcaagagcaatcagcaatcctcctcttccaaacaggtatttagggtaaaaaaagaagtctacaatcattgtctcaatacgaagcaacatctctacatgcaatccttttttttaaccttgactaacataatgccag

SEQ ID NO: 11960 - DNA, 2348 bp, Zea Mays
gccaaaaatctgaaatatcaaccaaacgggttatgttgaaagccaagaagtatgactttgtccagaagttctatgagaagatgcagaaaaatggcgtaccaccaagagcaataacttacaaagtgcttgtaagatctttttgggagcaggataaaattaatgaagctgttgaagcagtcaatgacatggaacaaagaggagttgttggagcagcaagtgtttactatgaattagcttgctgtctctgcaataatggaaggtggagagatgctatgttacaggttgagaagctgaaacagcttcccctcacgaaaccactggagtacgcatttactggaatgatcttagcctcatttaatggtggatatatctatgattgcatctcaatatttgaattaatgaaggaccactgcatgccaaatattgggactgtgaatgtcatgttaaaagtttatggacattgtgatatgtttgggaaggcaaaggacttgtttgaaaccaccaaggcttgtttcttaaattctcagacatatatccacgagcattcgtcattcaaagcagacacatatacatacaactctatgcttgaagcatctgcctctgcccaacagtgggaatacttcgaatatgtgtatagagagatggctctgtctcatcactgtctagatcaaagcaaatattcatggttgctcatcaaggcatgcagagctggaaagccatatttgctggagcatgcacttgactcgatacttgaaagaggagagatccctgatgtacagttgattactgaatcgatatgccagtctattgctcatagagattatggaaggacgctgcagctcttgaatattatgacccaggcctcaataaaaattaaagaagtcgagtgggattacctactacagcaaaatatgcatcaattcagcattgatgccctcgagggccttataaagtatctcagtactaatggtactaccaatgctgatcctgcagttgatttagtaagagcactgcagtcccaatgccgggacgataccagtactcaacagtttgaactctcttttcatggaagtggaaacaaatattcatgtagcagtctggcagaactagatcagctcacttgcaagaacttgtgcactgatataattcttgacgtccctggttctgatagagagatgcctcagttaggtgtcagtgctctcatgtgcagggacatctcattaaacggtcaacgagtggaaaacaaacatgagctttctgatcttgggcagaggggtccacaggtatctgcaattgacaaagtacttgattccatgaattcttatggtgacaattcgtatggggagatgccatcagcttcaaaaattcttgagctgtgggagcatgagaggtaaatgacatgtttgctccaaaaacagaaaattagaggataaatgaaatgctagcagatattatttgatatatgggcagtgcaatccttgtataaattactgacaaatgctgtaaatttgaaggcccctaagttggttcgtgggatctctgctgcaatcgtgttgcctaaaattattatcagaaggctcttatttgtgtgatctcattgtccatactacggaaaaaacagggaatatatagaagctctgagctcttggaagataaatttatgcattgacactgtttctctatttatagcgtctctcaaccctcacccaaccaccatctccatcgccaatgcatgggtctgggggcttttctgcgatcagcacctccttataaggacgacgtgatccactgctagccaaagaagcagcagatgaagtgttaaggccttcgtcttcacaccatcgctgatacttcaagcgacatccaagaaaagcattagatgggtggtgggggaaggaggagaggaggccaacgccgggagacaaagggtggttactgacgacattggaagaaggaccggcgtgaggctatagggtggaggagtagaggcatcgacctaagggaggccaaggggcatgagcggaagggacatctagctaaccttacattcagttgttggacatctaactattacactgtataacgcgtgcatatacatgtatccttatacaccctcgaaaaactatggcatcaaatctcaagatcaacaaaattatcataagcacctccatcgacagacatatcacttactggaagatgtcatcaacttttaaaataaatctggaaaatacaatcacccgtgcctaattgaggttaaacggtatgcaaattccacaagagtgttacgcccctagccaccggctcgagttcgccgagacgtgagcaaccagtgccgactccgagacgac

SEQ ID NO: 11961 - DNA, 3511 bp, Zea Mays
cacaattccatcccggccatggcagtctcctccccgccgcctcctcgattgcacctctccctccatcttcgaaagcctatccagaactcgccgcctagcggcaaaaaggcacgccccgctccgacagccgagacgctccgccgccggttcctccgccggggcgtctcgccgacccccaagatcctccacaccctccgcaagaaggaggcgcttaaggccctccgccgcgcaaggaaggacacggccgcagccgctactgcgtcacgcaatccgtgcgacgaggaggagacccgcttccgtgcggccgccgcggagtaccacgcgctcgcgggacggccatgggacgccggcacccgcggcatggcgcccccgcgcggtttggacggggaggagggcgggctcgagggcctgagggagatgctcgcggcgaggaggggcgacgggttccgttggctactggatgacgacatcgaggctgaggcagcggagaggaagcaacagaggcgtccgggcgccggctgggatgtggggaccgaggacgaggagaggaggattcagttgctagtcagcagcctgaagatcgaatatctggtgtcgagaagggcttggctgggttacaaccaaattgcgggccaccatggaacaaaaagaggttaaacggagattacctaagttttcgtgattggaggcttactagagtgatgaaaagggctgacatcatatatagtgaagataatctactgagaatactagatgggcttgaggcacgaggaaactggaggcaggctttatctattattgagtgggtgtacaatgaaaatagctataggcatcggaaaagcaggtttgtgtatacaaaattactctcaatccttgggaaatcattaagagcaactgaagcacttcacattttcaccatcatgcggggagatgctcaaatataccctgatatgcctgcataccattgtattgctgttactcttggtcgagctggtcttctgaaggagttaatcaagattattgagtatatgagacagaagccctcaaaactagtaatgaagatgcggcgcaaggattgggatccttcattggagcctgatgtacttgtttataactcggtgctcaatgcatgtgttctgtcacagcagtggaaaggtgtattttgggtgttccagcaaatgagaattggtggtttaccacctacaggagcaacatatgggttggccatggaagttatgttgaaagccaagaagtatgactttgtccagaagttctatgagaagatgcagaaaaatggcgtaccaccaagagcaataacttacaaagtgcttgtaagatctttttgggagcaggataaaattaatgaagctgttgaagcagtcaatgacatggaacaaagaggagttgttggagcagcaagtgtttactatgaattagcttgctgtctctgcaataatggaaggtggagagatgctatgttacaggttgagaagctgaaacagcttcccctcacgaaaccactggagtacgcatttactggaatgatcttagcctcatttaatggtggatatatctatgattgcatctcaatatttgaattaatgaaggaccactgcatgccaaatattgggactgtgaatgtcatgttaaaagtttatggacattgtgatatgtttgggaaggcaaaggacttgtttgaaaccaccaaggcttgtttcttaaattctcagacatatatccacgagcattcgtcattcaaagcagacacatatacatacaactctatgcttgaagcatctgcctctgcccaacagtgggaatacttcgaatatgtgtatagagagatggctctgtctcatcactgtctagatcaaagcaaatattcatggttgctcatcaaggcatgcagagctggaaagccatatttgctggagcatgcacttgactcgatacttgaaagaggagagatccctgatgtacagttgattactgaatcgatatgccagtctattgctcatagagattatggaaggacgctgcagctcttgaatattatgacccaggcctcaataaaaattaaagaagtcgagtgggattacctactacagcaaaatatgcatcaattcagcattgatgccctcgagggccttataaagtatctcagtactaatggtactaccaatgctgatcctgcagttgatttagtaagagcactgcagtcccaatgccgggacgataccagtactcaacagtttgaactctcttttcatggaagtggaaacaaatattcatgtagcagtctggcagaactagatcagctcacttgcaagaacttgtgcactgatataattcttgacgtccctggttctgatagagagatgcctcagttaggtgtcagtgctctcatgtgcagggacatctcattaaacggtcaacgagtggaaaacaaacatgagctttctgatcttgggcagaggggtccacaggtatctgcaattgacaaagtacttgattccatgaattcttatggtgacaattcgtatggggagatgccatcagcttcaaaaattcttgagctgtgggagcatgagaggtaaatgacatgtttgctccaaaaacagaaaattagaggataaatgaaatgctagcagatattatttgatatatgggcagtgcaatccttgtataaattactgacaaatgctgtaaatttgaaggcccctaagttggttcgtgggatctctgctgcaatcgtgttgcctaaaattattatcagaaggctcttatttgtgtgatctcattgtccatactacggaaaaaacagggaatatatagaagctctgagctcttggaagataaatttatgcattgacactgtttctctatttatagcgtctctcaaccctcacccaaccaccatctccatcgccaatgcatgggtctgggggcttttctgcgatcagcacctccttataaggacgacgtgatccactgctagccaaagaagcagcagatgaagtgttaaggccttcgtcttcacaccatcgctgatacttcaagcgacatccaagaaaagcattagatgggtggtgggggaaggaggagaggaggccaacgccgggagacaaagggtggttactgacgacattggaagaaggaccggcgtgaggctatagggtggaggagtagaggcatctagctaaccttacattcagttgttggacatctaactattacactgtataacgcgtgcatatacatgtatccttatacaccctcgaaaaactatggcatcaaatctcaagatcaacaaaattatcataagcacctccatcgacagacatatcacttactggaagatgtcatcaacttttaaaataaatctggaaaatacaatcacccgtgcctaattgaggttaaacggtatgcaaattccacaagagtgttacgcccctagccaccggctcgagttcgccgagacgtgagcaaccagtgccgactccgagacgac

SEQ ID NO: 11962 - DNA, 2045 bp, Zea Mays
atggcagtctcctccccgccgcctcctcgattgcacctctccctccatcttcgaaagcctatccagaactcgccgcctagcggcaaaaaggcacgccccgctccgacagccgagacgctccgccgccggttcctccgccggggcgtctcgccgacccccaagatcctccacaccctccgcaagaaggaggcgcttaaggccctccgccgcgcaaggaaggacacggccgcagccgctactgcgtcacgcaatccgtgcgacgaggaggagacccgcttccgtgcggccgccgcggagtaccacgcgctcgcgggacggccatgggacgccggcacccgcggcatggcgcccccgcgcggtttggacggggaggagggcgggctcgagggcctgagggagatgctcgcggcgaggaggggcgacgggttccgttggctactggatgacgacatcgaggctgaggcagcggagaggaagcaacagaggcgtccgggcgccggctgggatgtggggaccgaggacgaggagaggaggattcagttgctagtcagcagaacatccatccaactggtattggagtcaaatgatccaaccttgccgcagcctgaagatcgaatatctggtgtcgagaagggcttggctgggttacaaccaaattgcgggccaccatggaacaaaaagaggttaaacggagattacctaagttttcgtgattggaggcttactagagtgatgaaaagggctgacatcatatatagtgaagataatctactgagaatactagatgggcttgaggcacgaggaaactggaggcaggctttatctattattgagtgggtgtacaatgaaaatagctataggcatcggaaaagcaggtttgtgtatacaaaattactctcaatccttgggaaatcattaagagcaactgaagcacttcacattttcaccatcatgcggggagatgctcaaatataccctgatatgcctgcataccattgtattgctgttactcttggtcgagctggtcttctgaaggagttaatcaagattattgagtatatgagacagaagccctcaaaactagtaatgaagatgcggcgcaaggattgggatccttcattggagcctgatgtacttgtttataactcggtgctcaatgcatgtgttctgtcacagcagtggaaaggtgtattttgggtgttccagcaaatgagaattggtggtttaccacctacaggagcaacatatgggttggccatggaaccaaacctactctctagcaaagcaactaaccaaggcgaactgattcaagggggcttatcataagggttatgttgaaagccaagaagtatgactttgtccagaagttctatgagaagatgcagaaaaatggcgtaccaccaagagcaataacttacaaagtgcttgtaagatctttttgggagcaggataaaattaatgaagctgttgaagcagtcaatgacatggaacaaagaggagttgttggagcagcaagtgtttactatgaattagcttgctgtctctgcaataatggaaggtggagagatgctatgttacaggttgagaagctgaaacagcttcccctcacgaaaccactggagtacgcatttactggaatgatcttagcctcatttaatggtggatatatctatgattgcatctcaatatttgaattaatgaaggaccactgcatgccaaatattgggactgtgaatgtcatgttaaaagtttatggacattgtgatatgtttgggaaggcaaaggacttgtttgaaaccaccaaggcttgtttcttaaattctcagacatatatccacgagcattcgtcattcaaagcagacacatatacatacaactctatgcttgaagcatctgcctctgcccaacagtgggaatacttcgaatatgtgtatagagagatggctctgtctcatcactgtctagatcaaagcaaatattcatggttgctcatcaaggcatgcagagctggaaaggttcgtgtccgtgctttgccacagaaataa

SEQ ID NO: 11963 - DNA, 1949 bp, Zea Mays
cacaattccatcccggccatggcagtctcctccccgccgcctcctcgattgcacctctccctccatcttcgaaagcctatccagaactcgccgcctagcggcaaaaaggcacgccccgctccgacagccgagacgctccgccgccggttcctccgccggggcgtctcgccgacccccaagatcctccacaccctccgcaagaaggaggcgcttaaggccctccgccgcgcaaggaaggacacggccgcagccgctactgcgtcacgcaatccgtgcgacgaggaggagacccgcttccgtgcggccgccgcggagtaccacgcgctcgcgggacggccatgggacgccggcacccgcggcatggcgcccccgcgcggtttggacggggaggagggcgggctcgagggcctgagggagatgctcgcggcgaggaggggcgacgggttccgttggctactggatgacgacatcgaggctgaggcagcggagaggaagcaacagaggcgtccgggcgccggctgggatgtggggaccgaggacgaggagaggaggattcagttgctagtcagcagcctgaagatcgaatatctggtgtcgagaagggcttggctgggttacaaccaaattgcgggccaccatggaacaaaaagaggttaaacggagattacctaagttttcgtgattggaggcttactagagtgatgaaaagggctgacatcatatatagtgaagataatctactgagaatactagatgggcttgaggcacgaggaaactggaggcaggctttatctattattgagtgggtgtacaatgaaaatagctataggcatcggaaaagcaggtttgtgtatacaaaattactctcaatccttgggaaatcattaagagcaactgaagcacttcacattttcaccatcatgcggggagatgctcaaatataccctgatatgcctgcataccattgtattgctgttactcttggtcgagctggtcttctgaaggagttaatcaagattattgagtatatgagacagaagccctcaaaactagtaatgaagatgcggcgcaaggattgggatccttcattggagcctgatgtacttgtttataactcggtgctcaatgcatgtgttctgtcacagcagtggaaaggtgtattttgggtgttccagcaaatgagaattggtggtttaccacctacaggagcaacatatgggttggccatggaagttatgttgaaagccaagaagtatgactttgtccagaagttctatgagaagatgcagaaaaatggcgtaccaccaagagcaataacttacaaagtgcttgtaagatctttttgggagcaggataaaattaatgaagctgttgaagcagtcaatgacatggaacaaagaggagttgttggagcagcaagtgtttactatgaattagcttgctgtctctgcaataatggaaggtggagagatgctatgttacaggttgagaagctgaaacagcttcccctcacgaaaccactggagtacgcatttactggaatgatcttagcctcatttaatggtggatatatctatgattgcatctcaatatttgaattaatgaaggaccactgcatgccaaatattgggactgtgaatgtcatgttaaaagtttatggacattgtgatatgtttgggaaggcaaaggacttgtttgaaaccaccaaggcttgtttcttaaattctcagacatatatccacgagcattcgtcattcaaagcagacacatatacatacaactctatgcttgaagcatctgcctctgcccaacagtgggaatacttcgaatatgtgtatagagagatggctctgtctcatcactgtctagatcaaagcaaatattcatggttgctcatcaaggcatgcagagctggaaaggttcgtgtccgtgctttgccacagaaataa

SEQ ID NO: 11964 - DNA, 1877 bp, Zea Mays
cacaaatgcacaattccatcccggccatggcagtctcctccccgccgcctcctcgattgcacctctccctccatcttcgaaagcctatccagaactcgccgcctagcggcaaaaaggcacgccccgctccgacagccgagacgctccgccgccggttcctccgccggggcgtctcgccgacccccaagatcctccacaccctccgcaagaaggaggcgcttaaggccctccgccgcgcaaggaaggacacggccgcagccgctactgcgtcacgcaatccgtgcgacgaggaggagacccgcttccgtgcggccgccgcggagtaccacgcgctcgcgggacggccatgggacgccggcacccgcggcatggcgcccccgcgcggtttggacggggaggagggcgggctcgagggcctgagggagatgctcgcggcgaggaggggcgacgggttccgttggctactggatgacgacatcgaggctgaggcagcggagaggaagcaacagaggcgtccgggcgccggctgggatgtggggaccgaggacgaggagaggaggattcagttgctagtcagcaggttaaacggagattacctaagttttcgtgattggaggcttactagagtgatgaaaagggctgacatcatatatagtgaagataatctactgagaatactagatgggcttgaggcacgaggaaactggaggcaggctttatctattattgagtgggtgtacaatgaaaatagctataggcatcggaaaagcaggtttgtgtatacaaaattactctcaatccttgggaaatcattaagagcaactgaagcacttcacattttcaccatcatgcggggagatgctcaaatataccctgatatgcctgcataccattgtattgctgttactcttggtcgagctggtcttctgaaggagttaatcaagattattgagtatatgagacagaagccctcaaaactagtaatgaagatgcggcgcaaggattgggatccttcattggagcctgatgtacttgtttataactcggtgctcaatgcatgtgttctgtcacagcagtggaaaggtgtattttgggtgttccagcaaatgagaattggtggtttaccacctacaggagcaacatatgggttggccatggaagttatgttgaaagccaagaagtatgactttgtccagaagttctatgagaagatgcagaaaaatggcgtaccaccaagagcaataacttacaaagtgcttgtaagatctttttgggagcaggataaaattaatgaagctgttgaagcagtcaatgacatggaacaaagaggagttgttggagcagcaagtgtttactatgaattagcttgctgtctctgcaataatggaaggtggagagatgctatgttacaggttgagaagctgaaacagcttcccctcacgaaaccactggagtacgcatttactggaatgatcttagcctcatttaatggtggatatatctatgattgcatctcaatatttgaattaatgaaggaccactgcatgccaaatattgggactgtgaatgtcatgttaaaagtttatggacattgtgatatgtttgggaaggcaaaggacttgtttgaaaccaccaaggcttgtttcttaaattctcagacatatatccacgagcattcgtcattcaaagcagacacatatacatacaactctatgcttgaagcatctgcctctgcccaacagtgggaatacttcgaatatgtgtatagagagatggctctgtctcatcactgtctagatcaaagcaaatattcatggttgctcatcaaggcatgcagagctggaaaggttcgtgtccgtgctttgccacagaaataa

SEQ ID NO: 11965 - DNA, 5416 bp, Zea Mays
caatatataagttactgaccacctaaaaaactgctgaccatagcctccttcgtgtttgcttgaactgaacgccaactaaggacctgataagctgttgaccataaccgtatttcttcctggtttttccctgcagttcaagagaattacattgtagattgccaggtctgatatgaaatacaagaaataataagcatacgggggacatgcatatcatcgtgcaccaatagttatgatgcatgtgagcatatgggcgtgaacatttatacattgacatttcagattcctttgttttaaacaatctatcccacaaccgaaaaaggagcatatttaacttaaaatgggtttatgctttagagctgtcggtgttcttatttctaaatacgacccgaatgggcacatgaataaatcagattgttaggatcgtagatgagaaaaagagacacagagtttaacgtggaaaaaactccctcaatgtggaggagaaaaaaaccacgggaaaacagatctattatgtggtgtattgtacagggtacaagggggcctatttatataggcaaaggagatagagatagggtcatatgcaacaaatctccccttgacactaaatctataaaactgtttccccaaacaccactagggtgctaagctccacgaacacctaccaagtcaagacaatgcttgaacttggtattagataatggctttgtaagcatatctgcaggatttttatctgtatgtatcttgtgcactttaatcttgccttcagcaacaatatcacgaataaagtggtacttgatatcaatatgcttggtcttgaattggtacatatcattcttggtcaaacaaatagcactgtgactatcacaataaaccttaatgacatcctgaagaactccaagttcagaaataagacatcgcatccaaacagcttcttttaaccccttctgtagatgagacatattctgcttcagtagtagaaagagcggtaacagactgaagtgaagccctccaactcactgcagaaccgcataatgaaaaaacatagccagatatggagcgctcttatcaagatcaccagcaaagtcagaatcaacaaatccctcaacaaatcccataacatcaatttccttcactgaattcttgtcaaacaataatccaaaatgagaagtacctttcaagtagcgaagaatccactttactgcatttcaatgttctttaccaggattatgcataaatctgctaaccacactaacagcatgagccaaatcaggtcttgtacagatcatagcatacatgagattcccaacagcattagaatacggaacgtgagacatgtagtctttctcacttcagtaacaggacattgcctcgatgacaatttaaaatgtgaagcaaatggtgtagcaacagatttgcaattactgagattgtacttttcaaaaactttctcaatataacttttctgagattgaaaaagagtaccagcacgacgatcacactgaatttccatcccaagaatcttctttgttgatccaaaatctttcatatcaaattcatgactaagttgagccttcaattcaacaatcaacgacttgtcatgagaagcaatcaacataaagcagtagatacacaaaagatccattagggaactgctttaaataaatacaatgatcacaattgcttcaagaataaccatttgcaagcatgaacgagtcaaacctcttataccactgtctaggagcctgtttcaaaccataaagagatttctgtaaatgacaaactaaatgctcttgaccaggagcagaaaaaccctgaggttgtgtcatataaatatccccatctaaatctccatgaagaaatgcagttttaacatcaagttgctctaactccaaatcaaataaagcaataatagcaagcataactcgaatagaagtgtgacgaacaacaggagagaacacctcattgaaaccaataccttcactttgttgaaaacctttcacaactaaacgagctttaaatcttgcaggttcaactccagatatacattcattcttcttataaatccacttgcactttaaaggctttttacctgcagaaagctcaaccaatttccatgtagaattcttctgaaggctctcaaattcatcattcatagcaacaaaccacttggatgaattatcacaggagatagcttccgaataagaagaaggttcaaatgcaacattagtttcttgagcagcaatgagagcataatgagccatactatcagtgtcacgatatcgatgtggcaaaacaatattccttctaggtctatcttgagcaatagagtgattgttgctaacaagaggtacataaactgaaactaactgtgtaataggagtaacagaatcaatattaatagatacgtctacctcaagattctcatcagtagttttagacatagatgtggatgaggaaccactatcagaaacacctccagaggaagaaaatgtactttcatcaaaagtaatgtcggtgttttggaccgggggccctcaaccgacgagtgaattagtgctgcgtgcccctgtccggatgggttgatgcaagaagaaacacaagatttatcctggttcgggtaagagaaggccctacttccagcagaggggggatgagacttatattatcttgcacttaagtgcttgtagtagggggtacaagctgagagagggagcgggtcccaggtctcttaagagtggtggagtgttgtgctatatgggagcgctgtgactgcgtatgcatgaaagcatgaaagtgttccagcatgccttgggaaggccttgggctcctccttttataggcgcaaggagaaggcccagttgtacaaggggtgttgctaaacactgtcgtggacggcggaggcgtgtccgagccctgtagcagcatggccggcggtgcagcccttgagtccgagccctgtagcagcatggccggtggtgcagaggcgaggccgagccctgtagcggcgtggccggcgggatagccttggagtctgtgctgcgagacgtctgatccgtgcagcttatctttgaccacgcagagagccgagggtcggtcggcagtatgggctcatgtccgagctcttcattatccggggtgaagtagatttgacaccagtcttgtcgtcctgtagttatcttatgctcgacggggtttccggaagataaggcggcgccgtatttcctgccagaacagtcgtccgaggctggctcgggcgagacggatatttttttcgaggccgaggctggggtaactactgttgttagtcacacccgggtggttgacacagtggccggagtggagaaatagtgcactgtatccgcgctgggactgtcagtatgggctgtaaaagtatattggaccggggtcatgtcatactttgttgactttaccgcccgcagcgggataagcggtcgtacacccggcattaaatgcgcattggggggcggtcgacatggtcggccgaggcaggtacgcgccaaaaccctgcccaagatgccctcgggcggggcggtaagtcgttcctcgcccgagggtgacctcgggcgaggcggtaagtcgttctctgcccgagggtggcctcgggcgagacgagaaaccgcgcaggaccactgttcgtccgaggctgggctcgggcgaggcgtagtcgtgtagttggtacgtggagcctcgggcgaaccgtggttccggtcctgtgtgatttagggaaggtagtgagcacgtttgttttgtgacacaagcgttttaggtgtgattaggaatgtacccagggtacccctaattatggcacccgacagtagcccctgagcctctaagggagtgaaggcactctcttagaggttctgctggacctttgccggattaacagagaattagtagagttgttccgatgggtgcgcgcgagcgcacccgtcgggtgtagcccccgaggcctcggaggagtggtttactccttcgaggtcttaatgttttttcttgtggactcttgtcggccttattatctcttcgtgctacctggccgcagcctaggcgcatgggtagctctcgagtctttgttggtttatggacgctgtcaacaatttagccacagcctaggtgcaagagcagcccccgagcctctgcacggagcaagaggacgatcagggaccgcctcgactttttatagtacgccccttcatcgcctttccacaaggaggaaggggggaaagcgccatgctaccctcggtgggcaacgagcatgacgtttctggtgagctgttaacgggcaatccgagtggaggcctgagccccgttcgataaaggtcggctagtggtccagagacgcgccctaaaatacatgcaggtgattcgctggacccggacccattcgatagggtccgagggctcggtgcctccctctggtgggattccattacgaatcgttcccgctggtctcagaaatgtcctagggtacctcggggttgtagcccgagccttggccatgtaacggacgtacccatggtcatccctgactccgagctctggggcggttgtcgaacccttccgatgggccaaccttcgaacccctgatcagtagagggctcggagcccgagtgctctggggtggttgatgaaccctgtggggccaaccttcaaacccctgataagtatagggctcggggcccgtttcctttgctggaaaggaactccgaaatatctcctatccgactcctgcagtgagagggagagaaggagagagagagagaaagaaataaagaaatattggcacacctttttaggcactcatcatgggggagacggaacggtgcccgttgtctgcgtcagccggatgggacgcatggcctgcagcggaattaatgcgatgggacgggaagcccgcgggctatccgttgcggcgcgcgtgcgtgggagttttgagaaatggaaatccgtttcagttttgatttttgaatgcgcgggggctcggataaaatctcggtggattcaccagcgccctttatatatttgggagaggaggttgccgttggttcttaccttgctctcacattccagccttagcccccgctgcttttttcggtcgcggccaaagacagagaggagtaagaacttagcgtacctcgccgccgccgccgcccccttgcttcgccatggccgagaaagtgaccgtccttccaccgcgcaatccgtggcccttctccaccgtgactgtggaggagttggaggaacctgtcttcgaaggcctgctccgcccttgctctgccgggccacgccccgaatggattgcgcccgaggatgaggatgagccgaccctgcccgcgggctatgtggtcagcttcatcccgttccacgagcgtgggttcggggtgccggcgagccg

SEQ ID NO: 11966 - DNA, 398 bp, Zea Mays
gcggaggctccgggaccgcggtctcaccactgccagggttgtcgccgccttccaccgctggagggtgctgcctttggtggagcggcggctttggctgtatgagatgaagctggaagccgaggtagagagctcacgaatgtccttggccacccttcccaccgacgaccttctcaagcgggtcacggttacgatggggaaggctgacctcggcatcctcgcccaagcccgatgcgccccaaccaggggtatgtgtctctggtaagtcgccgagccttcttctgcctaatacttgttttttgcattttggtctgaccatccgggcttcccgcttgtcctcaggggctgaggaattacaagacctccctgcctccggccccagaggacgcggcggatcgggc

SEQ ID NO: 11967 - DNA, 618 bp, Zea Mays
cgtggagcaacccgaggccccggctgtggagcgcgctgagcctcggcttggtgaggggagcagcaccgtcgtccccacgcaccgtaaccccaccgaatggggaggcccgcggctcacatggcgggaccctgccgcctcggagcctgcattcaccctcgacgacgaggaggagatggggctgtggcaggtctttaatgagctcggccaggcggtggagaagtcgcttctaacgacgacgcacacactcacccagtacatggtcgcggtttccaaggtaaggactcctgatccttgtcctgagttgtcgggtgattgaaagtgttttggtgacgttttcttccttttttaggagctcatagcgaagaccatggctaaatccgtgtttcttcatcgtgagagcggcctctgggagtcgctgcggcgctagaagggcttgctagctcaggccaacgagcgcctcgctcagtagagcattgaggtggcagaccttcggacgttctacgcggagctgagggcggacgctgcctcagcgcgggcagaagcggctcccttggctatgagggtgcagcagctggaggaggagctcggcagggtcaccagcgagctggaccaactctg

SEQ ID NO: 11968 - DNA, 732 bp, Zea Mays
gaggcagaggtccagcggctcgaggatattgccgaggggccgggtgcgacgctggcgtcatacttcaacgaggaggtggtcccatcggtgtctccgcctggcgccggatctcacttcgaggccactcctgccagcgaggctgcctcggccgcggcgggtggagctgactccgaggacgtcgctgctcttcgccccgacgcctgagtggctggccctgcgggcctgtaaaaactttttaagtattttgtgaatggtgatgttccgagggccttgaggcccgaaacattttattgtttgtctaaaggctgtgtcttttttctcttgtttcgtgtttttagcttgtcttttcacgggatcgctgtcagaacgtgagttaccctttaggcgaaaggtggtgagtggggtatccgtatcccagaggcgtaggagttcccacggctcggccgaccttgccgttcgggatgtctcttgttcgtttaggattccgttttcgacagggccgaagacacgaaagtcgttttttcaggaaaaacttttctgagaaaaagtgacgcagagggggttccccccttctagcccccgagggaggttcggcatgctgggcagggccgagcctctcttgaaggttagactttatttatatttgaaagcagaagtacataaaagacttgaaaatctaagggtaaaatcgacgtagctgttcgatgttccaagcattgttgtagacttcac

SEQ ID NO: 11969 - DNA, 1742 bp, Zea Mays
ctcggttgtcttgccgtagacgaagtatcatgtcaccaacttggaagcatcggggtcgaactcgtcgtgcacggtagcgccgcagcgactgctggtacctggcggaatgcagcagtgctacgtcccgagcctcttccagttggtcgagtgaatcttctcggttggtttggttgctctgatcattgtatgcctttagcctcggggagccatattccaagtccgtgggtaggatggccttggccccatagaccaggaagaacgacgtgaaccccgtggctcggcttggtgttgtcctcaaactccaaaccaccaaggggagttctttgatccagcatgcagacgagaaatgtagtcgtcggggctgtagtcgttggagtcgtcggagaggtagtagtcgcatgtagacaggaaatgctgcatggccccggggtcgtggagcccggagaagtccaggccagtgcccgggtcatcttcctcctcggagcccgcgagcttcgaggttggagaagatgccagcaagtctattgtggaccgcagatggtgatctggaagatcggcatatgtacttgtgtaggcacttaccgaagaggggtagtccggaggatcgaagctgaacatgaagggaatagggtgtaacaccgttcccacctcctggaccgtgggaggaggagctggtgggcttgtcgtgggagcaacgcgtgttgcagtcgctgatgtcccgggtgcgaggttaacactagacaaatccctcgcaagggtgtctacgttgtcgacctgcccgggagtgccagttgggcgagaagcacgtgtcgccgttgttgttcctggtgcaaggcgaacggctgacaggtccctcgcaagggagcctgtgtcgtcaacctgcccagaagcgccagccgggtggaaagcaccacctgtggcacggttgcggttgttccttcttcgcctcctccggcgagaagaacgggggtggagatctgggtgtccctcctctagccaggagagcaggagcggtcgcgctccccctggctgagagaaacggtagtcgcgattggtgtggtgtcggggtggtaggagtaccatgtcgtagccgaagccaacggacatgaactcgagactcccgaaccagatcactgtgccgagctgcaaaggttgtacatgatctgccatctggaactttgacgggaatatgatgcaaacatgcagcgtgcccctacctagcgcaccaactgtcggtgttttggaccggggggccctcaaccgactagtgaattagtgatgcgtgcccctgtccggatgggttgatgcaagaagaaacacaagatttaccttggttcgggcaagagaaggccctacttccagcagaggggggataagacttatattatcttgcacctaagtgcttgtagtagggggtacaagctgagagagggagcaggtcctaggtctcttgagagtggtggagtgttgtgctatgtgggagcgttgtgactgcgtatgcgtgaaagcatgatagtgttccagcatgccttgggaaggccctgggctcctccttttataggcgcaaggagaaggcccagttgtacaaggggtgttgctacacactgtcgtggacggcggaggcgtgtccgagccctatagcagcgtggccggtggtgcaacccttgagcccgagccctgtagcagcgtggccggcggtgtggaggcgaggccgagccttgtagcggcgtggctggtgggat

SEQ ID NO: 11970 - DNA, 2701 bp, Zea Mays
ggccgaggcaggtacgcgccaaaaccctgcccgagatgccctcgggcggggcggtaagtcgttcctcgcccaagggtgacctcgggcgaggcggtaagtcattctctgctcgagggtggcctcgggcgagacaagaaatcgcgcaggaccactgttcatccgaggctgggctcgggcgaggcgtagtcgtgtagttggtacgcggagcctcgggcgaaccgtggttccggccctgtgtgatttagggaagatagtgagcacgtttgatttgtgacacaagcgttttaggtgtgattaaggatgtactcagggtacccctaattatggcacccgacaagtaactcacggctgacaatcaccttcttagaatcagcacacattaaacgatatcctttgacaccagaaccatagccaacaaaagtgcatttttgagctctaggtactaccttcccattgttaacatgagcataagcaggacaaccaaagattctaaaattagaataatcaactggttatctatccatacctcttctggaatcttaaaatcaatagctgaattcggagagcgattaatgaaataacaggcgacagatgcagcttctgcccacaaaccatgcttatcccataaaccagcattagaaagcatgcaacgaacacgctacagaatagtacgattcatcctttcagtaacaccattctgctggggagtacctggaacagtcttgtgtctagcaataccatgatcagcacaaagagaattaaactcactattgcaaaattctaattcattgtcggttctcaatttcttgatttttctgtcagtttgaatttccactaaagctttccattgtttgaatgcagtaagagcatcatttttatgcttcagaaaataaacccaaactttgcgagagaaatcatcaataaaagtgatcatataatcacaacctccaatagaagaatgaggagcccgaccccaaatatcagaatgaatataatcaagaatacctttagtgcagtgagtagataaagagaaactgactctcttctgtttgccaaatacacaatgttcataaaattccaatttaccaatatcatttaaataacctctcttgtgcaagaaatgcataccttttcactcatatgtcccaagcgcatatgccaaagcttggtatttgaagtgttggatgcaatagaaatagctgcagctgtggaaccttgcaagtaatagagattattaaaatgtttggcctttaaaacaacacggttgccttgagaaaccttaagaacaccattatcggcagaaaatttgaatctcattgcttctaaggtgcccaaagaaataagattcctctccatcttaggaacatagcgaacattagtaagggtcttgaatgtgccatcatgaactttaatttgaatagaactaattccagaaatttcaagtggagattcatcaccaataataacatcaccattatgaacatgagaataatcagaaaaccactctcgatgtgagcaaatgtgaaaagagcaagctgaatcaagaatccaagacatacgcttttcatcattagaagtgatcataagagcttctccactatcacaattttcaacaatactagcctcagcagatgatttatcagattcttttttcttttgcatttctttcttatttttcaacttaggacactgggagatcacatgattatcagctttgcaataacgacaagaagtgttggatttacgatcccttgacttagaccttgatttaggtttattagaactgcccgcttgttgagttctacctcgaacaataaaacattcatccttagactcataacgagaatcaacatcaaatttttctttggacaataaatttgacttaacattctcaaatgtcagtgaagtatgattttcataaaccataatttctttaaaatgcttaaaagaagggggcaacgagactaccaacaaaattgccttatcttcatcatctatctttacatccagactctcaaggtcgacacaaatagaattaaattcattgagatgcgattgaatggacgtaccttcagccatgcgaatagtgtaaagacgctctttcagacgaagcttattagcaagactcttggtcatatatagctcctccaatttgttccacaattctgccgcagattttgcattcattacttcacgcagaacatcaggagataaactgagctataagacggacaaagctttttcatcaagatcatcccatttatcatcagccatatcagcaggtcgcgtttgcaacgcctttcgaacacccaactgagtaagaacggccttcatctggatctgccaaatagcaaaactgattttgccatcaaacttcggaatatcaagtttaatcgatattataatccgaaataaaattccaaatgaaatagaaatctgtgtgcacaaatgggatgcaggtggccgaacagtgacgtgactttgcacaagcaaattcttggaccggatgaacttgtgcagagaagaccacggcgggcgcttcgcgaacaccagatcctgccgtctggacaggaggcgtcgaacggcgtagccgcgtagcagacagtctcccggcagcgcttggcacacccgcagcccggatgagcacgccacacgaggacgaccactgatctggagaccaatctgacgacacgaataacca

SEQ ID NO: 11971 - DNA, 831 bp, Zea Mays
cacagcaaaatcaacccgagaatctccctacacgccaactcccctaccgcccttgcccctttcgagtaaggtagatctccactagctttcctaattagtcagctaagggcgtcccattccacccttgtggtggcacgtgtttctcatgttaagctacatgttccaattaacataatagtcttatcatgaacagaaatagaataataataataaagaatgaccatgtgtaatagttatctcaacacccaaaaccatatatagcaatagcaaagactaacaaaagttcaggggtaaacaaggtgtaaagatgatcaaactagggtgatctattgggtcccatcaaaattaagcctatgcatgccaaaatgattatataggacattattgggtaaataaaagtggtcaagggcataacttgtcttcaacgagctcctgctcagaattatccacctactgaacacctgggtccttggttactggctcgtctactcgaagcaatacaaacagacatggtatatgagaaattaacatcacaccaaacatgaatacataatacataataataatctacacatcgaaacgagatcgtaggacaagaataactaaatgaaggtcgcctagagggagggaggtgaataggcaaaaactgaaatttataaacttaaacacacactaaggctagagttagcgttagaattaaattcgaggcggaagattgtttctcttaccacgaattgctcaaatgatgcgggtgacgtttgagagcaaactcaaatcaatattggcaaggaaactttagagagaggaaagagggcaaacaaatcaagcgag

SEQ ID NO: 11972 - DNA, 718 bp, Zea Mays
cccaaatgtcgcccacgaccttccccaatactagacgtccaactggaaatctacgattgcgattaagtacaacgaaggggtatgggacttctaatcgtgaccacccaatctcaatcgacgctcagtattataactcaccgagatcaaacctcagccgctggccctagatctactagccaatgcgctttctcctccccccatcaccactaggcggcgccgccgccctccctacgcgatggcgccccaccggagaagccccgccgacctctagctttcgaatatcctcttctattctggactacgccatgaagaagttaagacggacaggttacgaagttcttacctatggtggtggggtgacacgctcttaccacagggagaggaagaaccgtcgagcccaacgatctccgatgagaaattccctggactcggatgactctacgcccgattgcttgcccgagcacgatccacggtcgcaggtgaacctccacgagcactctaccgaccaccgaacgaccgcagacgtgaggtgtgtgcgcggaggcccgtttagctccaatggcatctcagcaaggcagttgttcgaacacgagaataccctgccctctctagcgaacgaaggccatgaagtcggcggttgcctcatatatccccgatgctagggcatcacgcccaactaatggcagctattccgtcgccgggagaaacggggaggcgg

SEQ ID NO: 11973 - DNA, 312 bp, Zea Mays
ctgtgagttatgacctgaggtgatgaacttgagaaaccaaatttaagtaagaaacagacaacaacacatctaataactaaggcctgacgtcatgaatcttgaaacaacaacaagagatgaatggcgcttccagaaaattatattaatcccaataaacaaactgagagctaagactaagagagcaggtaggtataaatagcacagatgactaaggaaagaatgcatgttaatgaagtactctctgattttttttttgagataggtgaaaggaagatggaacctttctagggtgatgcaaagcctgacttttac

SEQ ID NO: 11974 - DNA, 3908 bp, Zea Mays
ggaacaccaaggacaagggcgaggttgagggcttgtattctcctctcgtctcttcgtttggtatcgaatcccacacatcgaggtcgggggcgaggaagtggcggagctggcggaatcaggcgaggtcgaggtcgtgcgtgcggaagtggcggagctggcggagcggttgaggtcgtggggggggagattgaagtcgtggtgcggcgcgccgtcatggaggcagattgaggacgtgggcacatctctgcgtgcggcgcgccgtcgtggaggcagagggtttagggctgccgaagaggatgacagacgttgtaggctgggctgcacaatgggccgcaccaacggttgggccacatgaaccactgggctgcataaaccgctcggacgtaggcactgttatgggatttgtttgattagtaccataccggccactgagacagaccaaacgtggcttataaacgttggtgtggatcgtttgttgctcagactaactcctctggtgccgcactaagatgtattttttggcgcggggatgtacgtcaacggtcgggaggcagaacgggtcgggtcgccctggatgaagcgaacggtccagattcacggatggcagaacgagaaaaggcaggctacccttagagccttaataagtatctatagatatagatatagataatgttgcataattataactcttaaattataattaaatatgttttgttcacaagatgtaaatatccaaactcactttttattttgacttgcaaatcaacatctgccatgaagaccacttttgagcaacatctgtatgccttttcttttgggcagatttatcacaactcttttggaaccactaaagaatagagttgttaataaatctgcagtattttattgtaaaaccatagtactgcttgctatcaggttgataacaatggagtgtctgtaatattttggaagaacaaaaatcacgtgtgctaacactcttacttactacatgctcaaacactatcaatgtataaaccacttgatgttatatagtggggtttttttaaagagtgatatactgagtaacttttgcttaatcaccgggactattatctatcactgccaacttcgacaacaacactcttttgtaatatacatagctacatactatatattcaagtagctaccaatataaaaaccactcttttgtaatatacatagctacttactatatattcaagtaggtaccaatataatgtaagtagagggactctaactctcatcaagaggatgacactatgagttggggcaattttttgtttatttcctcaaacactacacaatgtcatacccttagaggggttggggacacatatttatagccctaggggctgcactacactacactacacactacactacacgctgcagcacacaggtgctgtcctttagaaactaaagtgcagtcaaaactgctgtgctgctactgctgtcctctgctgtgctgctactgctgtcctgcgcagtcaaaagactgcagctgcatgctgtcctgctgcaactgctgctgtcctgcagcagtcaaaaggttgctgctgctgcgcagtcaaaagactgctgctactgttcctgctgcaactgctgctgtcctgcagcagtcaaaactgcaactgctgctgaccacatgacttattccatcattctccccctaagtcttgtgcgtcgtcttgtgggaaagttgggtcatcccggacctggagcaaagctcaacaaacttgatcttcccaaggggcttggtgagcaggtctgcaagctgatccttggtgttgatgtagcgcgccttgatgctcccttctgccaagcagtctcggatgaagtggtatcttagtcggatgtgcttgctccgttcatggaacacggggttcttggccaatgccagagcggactggctgtccaccctgagttccaccgctccagtgtctctcccgaggagatcaccgagcagtcgagccagccagagcgcctgagtcgaagcagtggacgccgctatgtactcggcctcgcagctggacatggccaccacctactgcttgaccgactgccagctaatgaggcacttgccgaggaagaagaggatcccgcttgtgctcttgctagtgtcgatgtcaccggcgtggtcgctgtcgctgtacccgacaaggtgtgcctccccagggcacctcgggtagtagagaccgtggtcgagagtccccgcaacatagcggatgatcctcttcacagcctgctcatgctccgtcgtcggtcgctgcaagaaccgactaacgtagccgacggagtatgccaagtcaggtcgtgtgtggacgaggtagcgaaggctccccacaagacgctggtactgtgtagcatccacctcctccgtcgtgctgtcgcgactcagcttcagcctctcctccatcggagtgagagctgggttgcagtcggtgagcccagccagctcaacaatgcgcttggcataggcggtctggcgaagtgtgatcccggagtctccctggtgcacctcaatccccaggtagaaggagagatgccccaggtcactcatttggaaggtggccttcatctcttccttgaacgttgccacctctgcatccttggcgccggtgatcaccaagtcgtcgacgtagacacccaccagcagggcacttcctccattgccccgccgatagatggccgcctcgtgcgggcttggcgtgaaacccattcctttgagcgtggaatccagcttggcattccacgccctcggtgcctgtcgcaggccatagagagccttgcgcaggcgcaacaccttgccctccttgccagggatcgcaaaacctggcggctggtgtacgtagacctcctcctttaagtcgtcgttaagaaacgccgacttgacatccatgtgatgaacatgccagccctccagggctgccagcgcgaggagtcgcacggattccatccgtgctacaggggtgaaggcatcgtcgaagtcgatcccctcctgctgcaagaaaccgcgtgccaccaagcgagccttatgcttgacgatggcgccggcttcatccctcttcagtttgaacacccacttaagggtgatcgcgcgatgaccatgagggagatcagcgagctcccaagtgcggttcgtctcaaccgcgtccatctccgactgcatcgcggcacgccaagccgcatgtttctcggcctccgcgaaagaccgaggctcaccgtcgtcgcatgcaagatgcaactctcctgccagaatgcgagacgcagggcccggcaccgacgggtcgatgagaaggccctccacccttcgataccgcaacggctcgccgtcgtagcacgcgtcaacgcgctcctcgtcgcgggagagcggggtcacgagctccactgggtcgtgctcgacacgagctggtgtcagagaggacgttcccggagagggtaccgtcggtgcaggagtacgtggtggcgaagagctcggtgtagccggagtcgtggctggagtgcgtggtggtgaagagctcgttgtagccggagccggagagcgtggcgctggagtcggtggagacttgggggctggggtagacctgctcggagaagaattgcctactcccccagctccctcaaagtggacgtactcgatggtgaagtcgtcgtacgtcggagtcgtgccgtcgtccaccgccttgtcccacgcccatcctcgcccttcgtcgaacactacgtcgcgcgccgtgcgcacacgctgtgttcctgggtcaaggatgcggtaggccttcgagccctccgcgtagccaatgaacacccccggggtgctcctgtcgtcgagcttgccgatgtggccaagctccttggtgaacgcgaggcagccgaagacccgtaggtgagagacc

SEQ ID NO: 11975 - DNA, 1027 bp, Zea Mays
gcgtcgtcctcctggtgtggctggtgtcaccgggccacacaagtccccatgcacgagctcgagcctctccttggctcggaagctcgactgctagggaaaggggagtcgtctctgctttgtcaacacgcagacatcgcagaattgctccacatggtcaaggcacggcaggcctcgtaccatctccttggcactgagccgcttcagggcctcgaagttaaggtgcccgaagcgctcgtgccactgccatgccccgtcgtctcgacgagcagcaaggcagcaaggttgtgccaccttcacattgaggatgtatagccgatttgaactcctgcgtaccttggcaagaaggcgacgagaggggtcccagatcctcatgactccgtgctcgacctccacgcgcgaaccattctcatccagctgtcccaagctgatgatagagttcctcaacgcggggatgtagtagactccggtgagcagcctatgctcaccagatgcggcggtgaagacgactgagccggcgcccttgatctctacgccggaagcgtccccaaacttgacggagcctcggacgctagagtcaagctcggtgaagaactcccgtcggccggtcatgtgatgagtggcgctggtgtcgaggcaccacccttcgatcatgtccttgttggagccgtcgccgaggaaagcgcgtgctttcgactcatcaaggtggaggagtgccgctgcggccggtgccgctggagatatctcgatgcttgcatgtgccaggagcagggcctcctcctccgcctccgcctgtgcgacgttggcctgaccacgtcgtggctgccgacagtccctggcccagtggccaagcttgccgcagttgcggcctcgtgtcgaggaggactcccccttcttctggtcaccctggcaggcctcccactgctcccgagtgagatgtagcttcccgccaatagtgatagggccagagggagtctgtggttcgtcgccgtcgaccaccttgagacgacctatcgcctcttcgatcgtc

SEQ ID NO: 11976 - DNA, 107 bp, Zea Mays
cggctgccaaaacccagacacatgttccgaagctctttcaaagattgctgcagcttcgtattttcgacagcttcggcttcgtattttgtctgcaagctttttctctc

SEQ ID NO: 11977 - DNA, 50 bp, Zea Mays
ggcgcggcggcgctggctcaattgagctcgggggagggaagagggagtgg

SEQ ID NO: 11978 - DNA, 1624 bp, Zea Mays
gtcagcttttataaaattcgtttgagtaaaaatcattcaaaatcaacataaacacataatcggttgattcgttgcaatagtaggaatccgtcactttctaaatcctgagtcctatatatggacacctttatcttcctccgcacgtaatcctaataatactcagattctctacacagccagattctccctacagccagattctcagaaaagctggttagaaaaaagctgaaccaaacatgcccaacatcataaagtctgtcgtggactatattattcagggatctcgaagagtaatttttagcctaatcatatcggatgtttgaatactagttagaaatattaaatatagtataattataaaattattacacagataaggatcaaacggtaagacgagtctattgagcctaataaatctatgattcgctcatgtgatgatatatttactaattataaattatttagtcttaataaatccgtactgttgtttagttttatatgtaattagactatatttaatgctcataattagtgttctaagactaaactacagtgagataaacgaaatatcctgtgaccttgctttcagtcatccaatagcagcgggaagcagagtgaccttgaaggtggtgagcagaacagaaccattgtagcggaaggtgaccttgatcgagcatctggatcgccacgtcgcggcgtcgacgtctcgccgtgcctgctgtggcgcatgcatgctttcgtcggcccgggcgggcggcattgaaatccaccgtactgtacgtgcgtggctgcgattccctgctgctgcaactgtgtgcgatgcgaggctgctgcatgcatggtagtagtagctagtaggtagcctgcttgtagcctccagctgctgcctggacacagagtctgtctagggtactgtgtccagtggcgtacgttgtagccatgcagtgcaggtaaggtagagtggtgcaggacggagacgacgacgacgacatgcagcttgctggagaagtaaggctccactccagggccagggtgcacagcacagacgcttttttgacttttcatgcacccacgtgggcgccgctgcccggccagcggcggcgacatggaatggaaattaagcaagctatcctagaacactggctgccgcatgcccgcgcgctccagctagctgcatccggcttcgaactctggtggtggatgggacgagacacgcagacaagacgacgacgacgacgacacgggatggagacggtggagtactacgtactctgtctgcacccttgtctcttgtccctgcactgcactgcatgcgatccctcctccgtaccgccgcatgcattatcttgcgacgacacacacaggcacagcccacagccacgtacgtacggcaggttgtttccttgtacggcactgtaacttaacacacagcagcacatcgagcgaacaccatgcaccatcgtcgtcgtcgagttcgaaggccacgagtgaattaagcctgcggcctctggcctttttcttcttaacactgagatcgatgagatagatgatggtgctgggaacagccactggtggttggtcgggtttgcattgcagttgcaggtaccacccagctgctgctgag

SEQ ID NO: 11979 - DNA, 1182 bp, Zea Mays
gtgaaggacagccggttagttctggccgcctccggccgccgccgcgggcgcccattctgctgcaccgtcgccattattctgctcagaaaggtccccgcctctctcgtatcaggtcgcgctattatctcttatctagccgtaccgcacactgacgcagcacaacactgctggcttcggtcttttattatactccctctgtttctttttatttgtcgctggattatgtaaaattgcactatccagcgacaaataaaaagaaatggagggagtacaataataagcgaccttcgacaaaaaaaaaacaaaaacaaaaaagaactcccattatttcaatttcaaagggttacggatttttaatacatttctccatgtatgtaatcagacatcatgtatatctatgtatatagaaaaactaaaatagcttatgtaatttagaatgaaaagagtataaccatggtgagtgtatgctcttagaatagtgctcggtcaaattatttttattttttttataaatcagttcatacatataacaaaaaaattgatatttatactttgcggatatcgataaaacatcacgtagaactctatcgatacaagacacatcgataaaaaatctgttctttgcagatgcaaattgcgttaaaccataataatgaagatttgtttgggtaatcaatggttttcatgcccctaacgaacataataatgaacattttttcgcccaccttagacggaggaggaagagaaaccaataatatatactagctccatgatggatggccgatggcgtgaacgactcatgcatgcatacatgaatgagaaaatgtggggggtggccgcaggactgattatggccactgtacgaccgactgtaggggatgaaagcctcgttgggtttgttcaggtggccgttcagctgtcaattctcctcgctccatattcttccatagaaacaaccaggaaaccgagtggaggagagggagggaggatggaaggagagagagccgttgctggggcgtcaggtgaaatcgagtggcctccggttgccggggaccatgccattgccaccggcccaccagcaccagctagaagctagctcggtgcaggcaggcgctgagccagcgggagagagagatgctatccaacattccaatccatccatatccaataccgatcctattc

SEQ ID NO: 11980 - DNA, 870 bp, Zea Mays
ctagagccagtattctgttgatttatgttctggcttttgacttgtccctctggtttgtgcggggcctttactgagtgaaaggtaagcgactttaatttgatttcctagtgtactgccatttgatttccaggctttgtaacccaaattttgccacaacaacccagttcctgactgaacagctcagccactatactaaagtactccttttccttttgccttagtatgaatcagtttgttaatggtggtgataatatgtctgtgatgattttagcctttcgataaaaagggatgccggcatcagttcaatgtatgggcattcttggggccatatacacttgtcggtattatgatgccgagtgctttgagtaaagatataacctggtggggcgcccagtgttccacaaaaggattaccgggatgcgccatattcaaaggtatggtcggctcttacttatgtgcagctgctgtcaagtgctgggaacaagatctgtggtaaaatccggtgtagggcacatttgctggcctccttgctccacttctttttaccacctgtgccccactgcccccgatactgggaaagttctcttcgtactttgtttttcttttgcgtcactatataatactgtgttgtgagcctctcaattttctgggcattcattcatgctgttttagttatacaaaaaaaaaggctctatcatgctggaagctggaacacaagatgtgttgaatcattgtacactttggctgcgttcgtagatgccttttttttgcaacagaatgtgcttagatagaaatatttatgcggaaatctctttgttcttaataatatatggagaataaagcttttatttctcccctgtctttattttc

SEQ ID NO: 11981 - DNA, 222 bp, Zea Mays
gtatcctcggtgcgcgctgcggcgctggtgttccgtacgccggcacgtcctgtctgcggtctgcctcagtttctgccctgctgggacccgaacccgagctggaggtttttttgaaggcccatacgttggcgagaatctctcatggtctagcacctgctccgctcagagtctgagaccgcacaccgcaggcatagcaacaactcgcaccggaaaaccaaaaaa

SEQ ID NO: 11982 - DNA, 286 bp, Zea Mays
gcgcggtgtagcagacgagacgtgggtactagtagagaggaccagggactccggactcggcattttgcgtgtctttcggatctggtacaataataacctcgttgcaagtttttttttttttttacttctccaagtccaaaagcattgccacagttctcgatcacttctccaaaggccttcttagaatgcagcggttgttggtttgtgctgctgctgtggtgttgtactactagtgatataggccctgtttggcacagctgctgcttgttgaaaaagcagcttatct

SEQ ID NO: 11983 - DNA, 537 bp, Zea Mays
ctcagcgcttgccgctggagccacgcctgcccgtgaccccatatccacgccggggttgcgccggagacacgcctggccacggacgcgcacctacgcctcgcgctagggatcctgtcgtggacctatggttggctctctgtggtctgctcgtttgctgagtagagcttgctacctggcacccttgtcgtgtcttatgtggagcgccatgagccgccgcaggggaggagcggaggagggggagcaggagcaacatggagggcgtggcgagcggagttgactcggctgcttctccaaactattcgtgcgcagcccccgtatggccgcatgcatgagcaccatgatgaccaagctacgttcttgattgcatgccttatccaaattccaaatatcattgcttggtcgtgggttgtagttgtccatgaaataaggggtaaagaaaggtgtcggttgatttttttaaaaaagttgcccagaaagtggcaggtgtgcacttgtgactacgctaaaaaaataactctcctttttatacaatttccc

SEQ ID NO: 11984 - DNA, 293 bp, Zea Mays
ctctctctataggtttcctttctcctcctgttaatagagtttgtttatttatttgggagatgtaatatttctttagtatattaaaacctagaggagacatgaattgttgcattatgctaagtctaaactttgttttcgattgatgcacatgtttgaaatatttgaatctgaaattttggtttggttggatttgaattcaaaagataaaataaaaaagaaaagaaattataaatttaaaataaaaaagaaaaaactaaagcagcccagccaagcctccccctcggccattcggc

SEQ ID NO: 11985 - DNA, 504 bp, Zea Mays
gcaaacattccatcgacaaagcacatcatatgtcatgtgttcaaactccaggtttgtggagactgcaaacatcaaatgcaagaatctacttccttaaaacttgaagccctttcgagctctcccctcatttcatgcgctcacagccctccgcggcgcgacgcgtgcgctggtggtcggacctgaattttttctccgattcaattgagctgtgcgacatacgcggtctgtcccactaggccaccacggcaccacccatgtggtcccggatcggcctacatgttcttgacctctcaagtctcacatatataatgactcatgatacagaaacgaatgccacctctttactatacaataggagttctgtacaaaataactaaatacttacatcatacaaagacaacgatattccagcaacctgagttcactcaaagacgacatactagacctctcatgaatctcatcgcgacatccttcatgctcctcatcttgcggtacttgttcttg

SEQ ID NO: 11986 - DNA, 1248 bp, Zea Mays
cacctcctccccggggagtacccgagaaacacacagagggtggaacggggtgcaagcttgtgaggagcagtggcagcggtgttcgggtagcaagcacacccgaagacacagaggtggtcataacgcggaggggtaccgaagagtgcttggtgaggagtgggggccgggcacgcagtggaagggagacagttgaggaggtaggtagagatgtggaggccctcggcccaaaagcgtgccggtaggtgcgcctggaggagaagagtgcggatggtgtcgttggtcgtgctgatcatgcgctcagccttgtcgttctgggaggaggtatacgggcaagacatccgcaattgcatcccgtgggacagaaagaaggcgcgggaggttattgaactcccgaccattgtcacactggacggccttaatggtgaggccgaactgagtggacacccaggcgaagaagtggcggagggcggggaaagcctcagacttggcacgcaaaggaaaagtccacacataatgagaaaaatcatcaagcaccacaagatagtatttgtagcctgacatactggtaataggtgaagtccacaaatcacagtgtacaagatcaaatgcatgagtagcatgcgaggaagaagaaaaaggaagacgaacatggcggcctaactggcacgcatgacaaagatgctcatcatgtgatctagtacatgggatagtggcactacgagtaagctgcatcaaggcatcgcgtccggggtgaccaaggcgacgatgccaggtggtagaagacgtggtggcagcaaaaacaacagcagcggcaggtgacgaagacgaagacgaagaagaggtggcgtgcggaagccgaagggtgtagagggggccggtgctgtcacatctgaggaggaggcgccgagttgccgagtccttcacagtaagaccagaagagtcaaactcgacagaacaagaattatcagcagtaaaacgacgaatagaaagaagattgtggacaaaaggagcgacaagaacatcgggaatgcgaaaagagtcgggagggtcggcgacacctacagatgtgacaggaagacacgagccattcaccaccatgatggacgaagggagagaggaagaaggagggcgaacagaggtgagtataccagggtcgggagtggtgtggtaggtagcaccggtgtccgcaatccactcgggacccatcggcggagtcagagtgggagtctggaaggcagccagggcggc

SEQ ID NO: 11987 - DNA, 1520 bp, Zea Mays
actcgcaggtttctccggtaccctcctccgtccgcaccaccctgctggaccccactggcgtcgggcgatggaggagtacgcaacgctcgtcgccaaccagacgtgggatctggtgcctcatccgcccggcaccaacgtcgtcaccggcaagtggatctggacgcacaagcggcgggccgatggtaccctggagcggtacaaggctcgctgggttcttcggggcttcactcagcgccctggagtcgactacgatgagaccttcagcccggttgtgaagccggccaccgtctgcacggtgctctcgctcgctcctggccagttcaccagctcgacgtcaagaacgccttcctgcacgacgccctcatcgagaccgtctactgctgtcagccggcggggtttgtcgactcctctcgccctgacatggtctgccggctcaacaggtccctctacggcctcaatcagcccccccgggcgtggcactccagactgactacgttcctggtgacactgggcttcgtggtggccaagttagacacttctctgttcgtccaccatcatggagcagagactgcctacttgcttctctacgtggatgacattgtcctcaccgcctccagcccgtcacttcttcgccgcctcgtcgacgcacttcagcaggagtttccggtcaaggatctgggcgtgcttcaccatttcctgggggtcactgctgagcctcgcccctcaggactcctccttcaccagcgacagtacactcttgacattctggagcgggcccagatgagtgactgcaagccctgctccaccccagtcgacacgcaggccaagctctctgaggccatgggtgacccagtcgcagaccccaccggctacaggagtcttgccggtgcccttcagtacctcaccttcaccaggccagacatctcctacgccgtgcaacaggtctgtctccatatgcacgatccccaggagccccacctcgcggctctcaagcgcctcctccgctaccttcggggcaccgtcgactacgggctgctttttcatcggtctacctcctccgagctggtcgtctacaccgacgctgactgggccgggtgcccagacactcgacgctccacctccggctacgccgtcttcttaggcggcaacctagtgtcctggtcgtcaaagcgccagccggtcgtttcccgctcgagtgccgaggcggagtaccgtgccgtggccaacggcgtggcggaggctgcctggctacggcagctccttgccgagcttcacagtcccctctccaggagcacgttggtctactgcgacaacgtcagcgcggtctacctctccaccaacccagtgtagcaccagcggaccaagcatgtagagatcgatctacacttcgtctgcgattatgtcgccgtcggtgctgttcgagtcctccacgtcccgaccacctcctagtttgccgacatcttcaccaagggtcttctgtcctcgaccttcgcggagtttcgctccagcctcaacatcag

SEQ ID NO: 11988 - DNA, 368 bp, Zea Mays
ggtaactcgagttgatagccatctctccaacttgcctaaagactcagaatggtccaataaagtgaggggacaatctacccgtgactttaaatctcctcattccacgaagtggtgacaccttggggtacacatgaccaccttcctcaactcccgtggttttcttctattaccagcgtagctcttctgcctggtctgagctaccctcaaattctcccgaattatacgtacttgttcttctgcctcttgagtaagtttaggtccaaagaactgtcttcctctagtctagtccaaaaatagaggagtcctgcatttcctgtcatatatagcctcgaacgatgacatcttcagactggcctgttaactattat

SEQ ID NO: 11989 - DNA, 526 bp, Zea Mays
cctttgactatttgcaaaagactttgaaaagaatttccaaaacatttgcaaaacaaaacaagtggtgcaagcgtggtccaaaattttaaataagaagaaaaaccatccatgcatatcttatgaaatgaatattggtttaattccaagtaacctttgcacttacattatgcaaactagttcaattccgcacttttatatttgctttggtttgtgttggcatcaatcactaaaaagggggagattgaaagggaaataggcttacaccttttcctatatgatttttggtggttgaattgcccaacacaaataattgaaataactagtttgctctagactatgagttctacaggtgccaaaggttcacaacaaaccaatacaaagataaaagaaagggttcaaaacaaaggagcaaagttaaaccgaaggcagccctggtctggcgcacctgattgttcggtgtgccaccggacagtgtccggtgcaccagggaacccaactccgaacttgccaccttcgggaattctag

SEQ ID NO: 11990 - DNA, 1680 bp, Zea Mays
cgggcttgtagttgtgcttaaactttataaaatttcagatttgcctattcccccccctctaggcgactttcaggatgacctatggcggcggcataacaaaaaaagtcctcatgcagcctgtcactctggcgccagtgcacggactcctcgatcgcccggtcgcggcacatggcgaaggcaccaaaaatacccttggccagacgaatgaagagtccctggccacgaccccgtccctggccttgaccacttcctctctcgctgcggtccatcggatgtgaggcagcggcggcgcgagaggaggactcatgatgaggaagttgaggaggtggctcatcagaagaagcagggcctctagaccctgagggaccccgctttgtacgagcagctgggttgctggaatcaacccagtagggtacatagcgggagtgtttgacaggttttcgaagcgagtctgaatgaccactttgatcatcttcataataaagggtgcatggagacaccccttgagtggagaccaggaagcacggaggatctcttcccagatcatgtcaaacacgttgatgcgggcaagactatttggagcaagaagaagaaggaaaactcgactctccacaaggacattcatttgatttccgcccttcgagagaacgatcgtccgggacaatgagttaaggtacttatagtacctatgcatgttggcagtggtccaaaactcccgctccaaagagacatgaataaattcaatctcttcccgcatgggcagcctaatgtcatggactttcatgttgctgccctgaatgtatgcatcagagaagcccaagatatgggtaaaacaacggtagctaactttatgccagaccccctggataaagaagtacatgactgggtagtcatacccatcagcttcttcatcaactttctttacctagagagtggcatagaactgagccaccacttcgtcgttccagggttattccatagtcattatgttttttagcccctttctctctaagttgcggagagatgacatcatgtcaacatctcccatattctcacatccttcccagtcaataaaacgatgtctaacgactgtgtgcttcttagtcatgatgactgaattataaaaaatcagcatgaaagaggttccagaaccgagggtcctggacaccaggatgtctgggtgtgagagagggattagtgaaccttaagcgttgaagggcttccacccccttcaacgagaagtcgactgaaggttcattcggcccatgggacacagtcgccggatgcatgtggagtccgatgacgaggggagtgtcggatgacggaggttcgacctcgtcgtcaaaagctccatcctcctcctggcaaggagcgtatacagcggaggaggtgcttcgacggggacgagtggcgccaaccttttgacgcccttggcgcgcaggttgcaagggcatcgagggtccctccccttccaaacggccagagcctcgtcctcacttggagagagaacgacgaggcggaggagaaggaacacgcgattcctcctggatttcgtcggagtcactgctgaactccaccaccgaagggttgcgacgacgcaccatcttgttgagaagctccgaggagatgaacggttgaaatgtgagtgtttgaggaggctcaagaggctggaggactgag

SEQ ID NO: 11991 - DNA, 473 bp, Zea Mays
aaaaaagggaaaaccactcttgcatgttagccctcagattatcaccgaatagaaatcctcatatttaggtcctctgtcactattcatacgagtctatgacatattgtagaaaaccccctatacttctatttcttttcccccgtggtccctttattcaacaaaatagagagatggagatgtccaccggggttagggctccccgacagcggttggagtctagcgaggtgacgaggagaagcggcggttatggcatgctcgtcggcgtccttggctcggcatgaggtggatggaggcgctatgtccacgtgcgccgacgtgaaccgaagcacgacgacgtcgccgatgaggctccagcatccattgagctcggggaaaaggcatcgaggcttccatagttgatggataagacaatgcggggcttggctcaggcgaaggaagacggtagaggcgtggccacggagctctgcgacaac

SEQ ID NO: 11992 - DNA, 1189 bp, Zea Mays
atgagttagaggatcatctccaaaccatccaaactatccaagtgctccaaaatagttgtgtgcttagtatatacatcttctgagaactaaaatatcaatagagtttctagagcacttgagttgagttgtgactctgagaaaagagagaagaaaagtgatctttcttgtgttgagttgttgctctaagcgatcaagagccttcgactttgtgtgggccttgtaagagagtttgctctcaccaattgagaaagaaaggactcaagctcaaccttagtggtcgtttgagtgaggaaagggttaaaagagacacgctttttttgactccttaatggagacacagagttctttgtgaaaccaaacttaggtaaacaaatcttgagtctcttgtgcattttccttcccatttgcatttgcctttcctctcctagttaatacttgattttctcatcatttaagagtcatcacttatatcttgttgctagctttcattttcacacttaagttttactagcaacataagaaagtatttatctttttgatatcttagctatatcattctcacactgaccattaaagttagaatattcagattgctccttgtgtttggtttagaattcttagatattgcatattcacccctctaagcaacttttagtagtaccattgaggtatctaaaaatgaaaaaacttttgaagtagctaaaaaggatgcatatacttcttgcaatgatttttttattttagactcaccttcttgtgatcaagtttgttttaagattgtgattgtagaaacatgatcacaagaaatcatattagagaatgagcaacttaagcaagaagtgacatgcctcccaagaacttgactcaaatgaaggcaagacgaagccgacctaatctcatcaagatagtactggcaagggagtgaagaagcttgatagttgaaatattgtggtttggtatgtgtgccacaagtcctacgagtgcaaagtaaagaatggagaaggaataaagaaaaaacaagcaagcaagctctccaatatccttgttgtctggccctcccttcttgtccgataaaccacccttcttgtatctccaataaccccctttatcattatttctacagttttaactatcaaatatctcttatactttatcttcagcatccatccaattatcgatcatgtccgag

SEQ ID NO: 11993 - DNA, 890 bp, Zea Mays
ctcaagccaagttagtggagtagcttcaagtaccatcaataagtagatcaccttgatatcttcattccttcccatgaggctgatcgtagctaactagcatcaaatccatatatttaggttcttcttgttattggacttgctaatgttgccgtgcttaaatttctttgagtacatgatggaattaagacttctatagaagcaagggaagccgtccaccatttcttctttagcgttgtactggttcatctgagaagtctctgcatagtcgatatatcttcgcctagaatttaattgctcgtgaagatcacgactacagaggatgtcccatagatcaacatgatgatgatcgacttgaggtggactctgcctcccctagcttggttatcattccataaccttttgacattgggccctctactagatacttggcgtgtctgggtagacacttgagagcacctagaggggggtgaataggtgatcctgtaaaaacttgaaacttaatgccacaaaaacttgattaggagttagcacaataaagccaagtggctagagaggagttcttgcaagacacgataaccacaagaagatcaacacagataggcacagtggtttatcccgtggttcggccaagtccaacacttgtctactccacgttgtggcgtcccaacggacgagggttgcaatcaacccctctcaagcggtccaaaagacccacttgaataccacggtgttttgctttgtttactatattccgcttgcgaggaatctccacaacttggagtctctcgcccttacaatttgatgttcataaagaagcacagaagtaaggctgggatgagcaacgcacacaagacacaaaatcagagcacaacacgcacacaagtcacaac

SEQ ID NO: 11994 - DNA, 980 bp, Zea Mays
cgagcagcctttttggctgtacacagccaacttctccataattgtttctcctgtttctagcacttagacacaatacattagtcttcaaaacaatgtactaagtctataaacatacctttaatcttgatttgcacttcttgagtccttggcataatttaacacttaggtacttgtgttggacacttaatcaccaaaatacttagaaatggcccaaaggcacatttccctttcaatctctccctttttggtgatttatgccaacacaacaaaaagcaactaaaggaagtgcaatatcaatgcaaatgaaaacacaaatttcttttgatttctaaatttggcatatttggatcattctttgccaccacttggtttgtttttgtaaatcaaactcaatttcctatctctaagtcaaacacacttgttgagacataaagaaaggtattccaagagaaattgatcactgattcaaaaactccccctatttcccataatcaaccattctgcccacaaggggccaacttttgcaaaagagacagtaagagatttttgacaaaccaaaagcgctattctactattttcaaaattctcaagtggtagctgatccatttgttgctttggccttattttctccccctttggcatcaagcaccaaaacgggatcaatcttggcccttaaaccccattacctcaccaaaatcttcaattaagagtaaaaaggcaataagagcaagaagatgaacttggagttagttactctttcatcggagtgcagtggaagtcttgcatggtccaagtccaccttttccctttcaatcctcctttgagactaaattaagaaaactcaagcacatggttaatctcaaagggtcaagttgtagcacatctctccctagatatgtgcatcactcacacatggacttttgaggtccggggagtgtttgtacaacttgaacaccataaaacaacaaaatgcttaagga

SEQ ID NO: 11995 - DNA, 758 bp, Zea Mays
caactcattttgagctctccttaggaagtgcttgagggtcctttgggtttcagatttgtcctgcaaaaagaatacccaagtgaagcgggaaaaatcatcaactataacaagaccatacttacttcctcctatgcttagataggcgacgggtccgaagaggtccatatgaagcaactccaaaggtcttgctgtggtcatcacatttttggtatgatgagagcttcccacttgtttacctgcttgacaagctgcacaaggtctatctttttcgaaagtaacatttgttagacctatcacgtgttctccctttagaagcttgtgaaggttcttcatccccacatgtgctaaacggcgatgccacagccaacccatgctagtcttagcaattaagcatgcatctagaccggtctcctcttttgcaaaatcaactaagtagagtttgtcgtctaatacacccttaaaagctaataaaccatcactccttctaaagacagacacatctacgtttgtgaataagcaattatatctcatattacaaagctgactcacagacaacaagttatatccaagcgactcaactaaaaacacattggaaatagagtgctcggatgaaatagcaatcttccctagtcctttgaccttgccttgattcccgtcaccgaagatgattgagtcttgggagtctttgttcttgacgtaggaacagaacatcttcttctcccccgtcatgtggtttgtgcatccgctgtcgataatcc

SEQ ID NO: 11996 - DNA, 1433 bp, Zea Mays
cttgcattttgcccctaattttctagcaatcaccttcttatcctttctacaaatagcaaaggaagcatttaaagcatgataaattgtagaaggttcattacttgttttcctaggtacatgagcatttctcctaggcacatgatgaatgatatttttcctagccaaacttctattatgcataatagaagaacttgaagcaaacattgcatttgaatcataagcatgtgaaacaacatcattgcaacttctatcatgacgaacattcctagaatatctcctatcatggtataagaaagcatgattcttttgaatactatttgccataggggccttccctttctccttgatggagatgggagccttatgacttgtcaagttcttggcctccctcttgaagccaagcccatccttaattgaggggtgtctaccaatcgtgtaggcatcccttgcaaattttagtttatcaaaatcatttttgctagtcttaagttgagcattaagactagccacttcatcatttagtttagaaatgcaaactaggtgttcactacaagcatcaacattaaaatctttgcacctattgcaaatcgtaacatgttcttcactagagtttgttttactagctatttctaacttagcactcaaatcatcattaacactttttaggctagagatagattcatggcatgtagacaattcacatgaaagcatttcatttcttttaatttctaaagcaagagaattttgtgcttctacaaacttatcatgttcttcatacaaaagatcctcttgcttttctaataatctattcttatcattcaaggcatcaatcaactcattgatcttatcaatcttagttctatctaagcctttgaacaaactagcatagtctatttcatcatcgctagattcatcatcactagaagcataagtagactttcgagtgtttaccttcttctcctttgccattaggcatgtgtgatgctcgttggggaagagggacgacttgttgaaggccgaggcggcgagtccttcgttgtcggagtcagacgacgaacaatctgagtcccactccttgccaaggtgtgcctcgcccttagccttcttgtaagccttcttcttttctctcttcttttcttgttcctggtcactattattatcgggacaaatagcgataaaatgaccaatcttaccacatttgaagcatgagcgcttccccttcgtcttattcttgttgggatgctccttgcgaccctttagtgttgtcttgaatcgcttgatgatgagggccatttcttcttcgttaagcccggccgcctcaacttgcgccaccttgctaggtagcgcctccttgctcctcattgctttgagagccacggtttgaggctcgtggattgggccattcaacgcatcatcgacgtatcttgcctcct

SEQ ID NO: 11997 - DNA, 862 bp, Zea Mays
atcaaagtgaggaggtttaccaagtggaatggagagtaaatgagcatttgtactttgcgaaatacgagaataatcaaaagaaaagtttgaattgaccattttctttttctcgtagttgtcgtcgtccttttgggaagaagaggactcgtcgccgtcgtagtagtagacgatctccttgatgcgccttgttttcttcttcttcccgtcttttcttttgtggctcgagcccgagtcagtaggcttgtcatcttttggatcattgacgaaggactccttctccttatcattgaccaccatccccttgcccttaggatccatctcttcgggcgattagtcccttaggtgaagagaacgactctgataccaattgagagcacctagaggggggatgaataggtgatcctgtaaaaacttgaaacttaatgccacaaaaacttgattaggagttaacacaataaagctaagtggctagagaggagttcttgcaagacacgataaccacaagaagatcaacacagataggcacagtggtttatcccgtggttcggccaagtccaacacttgcctactccacgttgtggcgtcccaatggacgagggttgcaatcaacccctctcaagcggtccaaaagacccacttgaataccacagtgttttgctttgtttactatatcctgcttgcgaggaatctccacaacttggagcctctcgctcttacaatttgatgttcacaaagaagcacggaagtaaggctgggatgagcaacgcacacaagacacaaaatcagagcacaacacgcacacaagtcacaactcgagctcacaacacaacccgaagagttctctactcaaaatggagctcta

SEQ ID NO: 11998 - DNA, 1773 bp, Zea Mays
ctttaatcttgatttgcacttcttgagtccttggcataatttaacacttaggtacttgtgttggacacttaatcaccaaaatacttagaaatggcccaaaggcacatttccctttcaacactgcctatgatgtcatttgtcttccataagcattactgtcatagcttatagtatgaccttgtggcctttgaacttaatagttagattttcctcattcataatgcaaccacatacatgatgtttcccttaggagtgttataaactttgtggcctctaacttcttagaagttagagattgcatttcatggagttgcccatattgcgcatgttgtgttggtgatggtagaggttaaaacatttgttctcattgtggggatactattcagcctcgtactgttttagtagttcacgatgatgtctagcacagatacgacattgtgcatattgtcatattcttgaattacaaactttctttctatacatcagtctaggtattcgatgttggactagctccacatcgtcctcctatgctcctgcagtgggtgattcatcacgtcatgaagtgtgcgagcacgatgatcgacgtcaacccgacagtagtgagttggacgatcttccctagcattgaatcccataccatgcacatctctagcatctcctcccatcaagtcttctcgctcgttggctcccccatcatctcaatgctggctttgggagcgacgatgacgtacacccacatgtctctcttatgctcccacatgtcagtgaggtcaagagagatgtacaacgtccgaggctttagtcttgagcaaatctagaagtagtaaccccaaatgaattttgactactcgattattggaggatgaagaagtttcagaatattgtcatgtagggcctcatctctatggacactttgcatagataatcaaaggtcgatatgacaaggatggagttagggtgatgtgactgatccggaggccataaaactctaagatatgtaggaagaatcgcgacaaagtgaaattcaaccccaccatggtaatggagtaaaataagatgtactccccacactaccttgaggtgtccaaggtggaatcatcattgcatgcacattgtttaaggctagcgatgtggtccactctaggagttgacatgtcttccccaacccctcctagtttaggatttgtgctctcagtagcgagtccaagggagaggtatctaccatggtgccacaaaggatcacgggatgagtcaactatggttggttggcggtggcttcgaaagcgagaagagcacttgagggcaagtgaagcagattgcgcagagagtgatgaaaaaggaagatggatctgcacacctaagatttagcacgcccttgtcttcgtttttacaatcactggacaacatacaaagcgtcacatgacccttatgatttgagagtcattcagtatgactactgccttatgcaatgactgttgattagggcggtcaaagctaacaatattattagcacacatgatagacttattttatcttgcatttgcgagaacgatggtcctacatgcaggcctccttgggtctattgagggtctgggagccactatcaataatatccaggaaaaggcatattccttcgtgctagcaaaatgccatctagtactacaacaatagaaaacagacctatagaggactcaactcgatggggagagcccatgttgactagacctcgaggcattgaactaggggccttatgcaggagccctttggcactcc

SEQ ID NO: 11999 - DNA, 2042 bp, Zea Mays
aacataaggattctatcatatttaatgtgagaggcgatataatggtcaaaatatgccaccgtcgtcaagcctcagatcgcaggtcggcaggtgtatccgtgagcactatgcagtgtatgcgccttctgctgctaccataacacactcaacagcttggaaacccattcctaccaatgtggcgtgtaacgctcgctgttgttgtacttcaaaggcatgcttcacatatggtacaccaattacgaccagggacggatgcaacggtggggcgagtggggctcgagcccccctaccgatgtcgatcctatggagcccccttaagcctcccctaaaattggatcctatatttctcattatatattttatgaattttattgttcacatatttctcaatataagactactttaaactattatatttgtctattgtgagtggtttagtgagattacatcgttgtaacggtttcccctcctaaaatttttcgtggctccatccttgactatgacaaaatggaagtagttatatagggcctactctccatggatggataaagctctctcttcccttatgatatatataagagacatgtagaacaacatagaaaagggtttagtttaatgtcactttggattcacttagcttcactttagctttagtctttagttcaagataagtcaacacgtagtaagagctcgacttagcactaggtataacaagggacaattagagctcttctcactcgttaactcagatattatctgaacatataatctctgcatatacttgcatataaaaataaatataaaaaagacatgatattacgctcgggcgaccctggatgcccttattcatcggttccatgcgcaccttgctttctcttcgactttttggtatggtgtttcaatatgatgacatgggtttagttgagatgttgagctagttttagggtaaccttgtttttttaacatgctttaagggtagtcactccagatctaggagcgtaggccaagagagaagatccggaagcagatggtaaccccactcacacgccaggtaggggtgctgcattgtgttacattacatatccctcggtgctggcaaaatgatgtttcaatatgatgacgggggtttagttgagacgctgagctggtttcaaggtaatctcctgctttgagggtagtcactccaaaaaacgtaggccaagagagaagaacttgggtgccatttggttcatatattagtaacgtaatgggtaaccgataagacgataatctctactactctataagactctaatgtagaccatccgtgcaccatgttctgccattctgcctcccgtcaatcggtaacgtccgtgacatccgacggctcgcgtgcgttgaccccgccccccgttctgcccactcccgagccatcgccactccaccccgttctgcctcctcccaccgcgcccccgctctcgcaattgtcgccctcgcgtccgcaatcctcgcccccaagctcactcttccgagctcctatcggcacccatcctagccttcgacaccacgtcgtgcccaaccctaaaacccacgccgcgctggtagctccaccttctttcctcgccaccacgcccagatggaaggcgcgactgggatctcggagcacgtcttggatctcatcttccatccactctcccgcaatcctcgctccaaatgccgctgtcgctttgcccccaatctgtgcgacatcttcagatggacgctggggccatgccgagccccgacggtcgccattccaggatgccactccgtgatactcgccccctcatcatcgtcgctcgcgtggcctcccgaccgtcgtcttcacccgcaagatccacccccaccacccgattcgcccacctctctgtccaccaccgcaagatccaccgccgcacgcgcttcgccgcctcgggcgacctgcagctgcccagaaacatccacgaccacgagtgagtacacgacacgttcatggcatcgcatcatcagcatcaatccgtccgtccaggaacctgacggtgatt

SEQ ID NO: 12000 - DNA, 464 bp, Zea Mays
ctcgcccgatctccatcacgcctgtcgccaatgcgcatcccatgcgcactcgtggcaaagccggcattgcacagcccgtggatcgcatcaacctccacgctgtgcctatgtcgccactgcctcgctccgttcgtgctgctttgtcagaccccaattggcgctccgctatgcaggctgaatatgatgctctactcgccaatgacacctggagtttagtaccacggcctcctggagtcaacgtggtaactggcaagtggatttttcgccataaattgctcgccgatgggtctcttgatcgatacaaggctcgctgggtcctccgagggttcacccagcgtcccggtgtggattatgatgagactttcagtccggttgtcaagcctgcgacagttcgagttgttctctctttggctctctctcaggactggcccattcatcagctagatgtgaagaatgcattctta

SEQ ID NO: 12001 - DNA, 896 bp, Zea Mays
attcactgttcatctatcgccgtggatccgacactgcctatttgctgctatatgtggatgatattgtcctcactgcctcttctgccaagtttcttcaacacataattggtgctcttcagcgtgagtttgctatgacggacatgggccagcttcaccattttttgggcatttctgtgacacgctccgccaatggtctgtttctctctcaacgacagtacactcaggatattttggagcgcgccgggatgagtgcgtgcaagccgtgcagcacacctgttgatctccactccaaactatctgcagatggacctcccgttgatgacgctactcagtaccgcagcctggcaggtgctctacaatatctgattttcacccgtccggacatagcttttgctgttcaacagatttgtctctatatgcatgatcctcgagagccccacctcgcagccctcaagcgcatcttgcgctacctacagggcactctgtcccttggactaactatgcgccggtcttcccctacggagctcgttgtctacacggatgctgactgggctggttgccccgatactcgacggtccacctctggctacgcagtcttcctcggagacaacctggtgtcgtggtcctccaagcgccagcacacggtttcccggtccagcgccgaggccgaatatcgtgctgtggcaaatggtgttgctgaagctacttggttacgtcagctactcattgaacttcagcaaccgcctccccgtgccaccctagtctactgtgacaacatcagtgctgtatatctctccagcaatccagtgcagcatcagcggacgaaacatgttgagattgatctccattttgttcgagaaaaggtcgccctcggtcacgctcgggttcttcatgtt

SEQ ID NO: 12002 - DNA, 1463 bp, Zea Mays
tgtgcatttttttatttgaatcataggggtcgttgaaatcattagaattaaatcagagcaaaatgctctaaattgctcagaccttgtcttcttttcaaaagtttatgatttaggattattctgtagagaaaataaacctgattttgtagagaaaataatgctattttgagaatggtctcaaaagaagacaaagtttgctatagagagaaactgacgttcctactttgagagaaaagccttactttttttagaaaatgctagagagaaaccggagagtctggaaaccagcaaaagcggcatcatcaacagtgccacaatcgagcaaatccacgaccttgaggacatggtgatctgatcggtgcaggtggcagagttgcgagcaacaatgcgccacgaggtgaagggcgttgctggagatgcgctcgagaggatcagactcaatttggaagctttggaggtcctcacgccgcgcggcgatgatagcgagtgtcgcatctatgtggccacgacagccatcagcggatcagccaccacttcgcagagaccgcgcgctcgaaggcccgggacgacttttgctgcctcgtgaccgcgcacgcgtagccgacgcaggctcccacactgggaggcaagtgacgacgccagatgccacctcccagtcatagcggtgtgcgcggaggtcgagcgtgctccataggcaagatgatgagctcagcgatcgccaagcccggcacaccgaggccatactggcgtggtcgcggtagcacagccgcgcgaagagccgcaacattgtgttgccgaaagcgccctccagtcaacctcgaccgatgcatcgtcgttcctcacctgagcctcaccacaaatctgtgcaccacccagattcccacaggccgttagaaccagcagtaatgccacactgtcaggctcgatgccctccacctgcatgcttcaaaaacacctcgactgccccctggtatccggatgcctcatgtgcacgcaccccacgtccaccatcgcgtggacggcaccacatttcggtctgacatagcatcgaacagctcccgtgcgtgaaccaggtccccggccttcacatgcccgacgatcataattccttgacaaccatctcgtggaacacgctgcgtgtcggtcccatgtccccaactgcagtgcacctggacgaggctggcggagacgtgaacgtctgagaccatgtggcggatgcggatgagggagtggagctaagctcatgcgttcagctggaggcacacggaggccctgaggtatacagtgggtggggcacaaggtgaagggaggcgaggatgagcagaaagtcggcgcgggtggcgctgatcgacgcttgggacttgggaagaggaaggcgtgtgcctgtatgaggtgccacggtaggaaggagaggaggcaatgaagcataggcgacagaggcgaggactgcagcacgagggaac

SEQ ID NO: 12003 - DNA, 292 bp, Zea Mays
cgataatttcctgtgcgatgattctttcttccgcggacaagtgcgtcccgcgttttggtgtcgttgcacagctttggatccgagcgaaggggagggggggtggcccacgccacgagcgagagtcacaagcgtacctgcggaccaaccaggagaatccttgatacaaagcttatctgacggacggccggggaggttacacctaacatgaatcccggatggggggagagggaccaccagcggacgatggcgtagcccgccccctccggcctccgtccatcccggtcagtcgctc

SEQ ID NO: 12004 - DNA, 234 bp, Zea Mays
ctttggccgccccccctctctcttcctctcttccactcttgcagccgccccaatccttctccttcttccccaagtgattgcagcaccacccctcaaccctagcccccccacctcttcctctccaaggtggagcctccccgcttggtgtccgtcgtgtgggtgcgagtcttccatgggagtttggagggatgaagaaggaagaaaagaaggaggaaaggaggaacccaaggtgat

SEQ ID NO: 12005 - DNA, 262 bp, Zea Mays
gtcgactgcgttagcccgtactccaatcagtccgttgaacggtgaggtcggtacctatcaggcaattacacgtggccgattctgattgttcggttcagttgttactgatttaaactggtcggtcccgatcattttaagcgacgtgacatgtttttcaggcgtatgtcacatgggttaaccattctaaactgttcaaggtccaaaatttcaaaaaaataaaaaaaataaaaattcaagaaaaatcagagtttgatctataaat

SEQ ID NO: 12006 - DNA, 1019 bp, Zea Mays
ctgacaggctctccttcgcatttgcgcgggacagaaatgacttgccgaggatggaagcagagagacggatttggccgagcgcacagcagctcgccaaagacggcgtcgaagcagcagtgaccgcggtcgagtgagggagtcatcctggattcgcggtttatcgactcggcacgggggcaaccatggcgttgaaggtaggcaacatgaggagccatcgattgacaccggtcttcggaatcggcggatctcgacgatggtgacaaggaggaggccacgaagcgtcgtcgagcagagcgcgacaagcaaatcgagtcggccacgagcgtggatttggatctgacccccaagtttttgtatggatcctattccccaatttgtagatcttcaatttccttactttaattttccatagcacaaacgatgtttgcatgcacgattcggacaatcttgacttgttcgtccacggttggagtttagggttggaatgtgtaaaacacgtgataaactgtgtacaactcgagaactagataattcattttggattgtaatatgtgtacctcatgctatagttttggttaaatctgacgtgaatctgtttggaattgaaaaacaagtgcttccttttatacaccactatgtcgcttcaatgtttgcgaaccaaggtaaagaaatgtaaaatcttacaatttccgtgcatccgacataaatctgtggtcacatagctattgttaaacggttgcaaatcctaaggaggaccattattgtgcaacaactacatatggtagaagcgcttgttttgatgtgtgcacattttgttgctaaaaggatcacgatgcccaagaggggggtgaattgggcttttctaaaaatcaacactaattaaaacctaagcaagagcccaacttcaccccgacaactagcaataagagaatatgaaagggaaataggatcaaaccttttcctaaatgattttggtggttgaattgcccaacacaaataattggactaactagtttgct

SEQ ID NO: 12007 - DNA, 414 bp, Zea Mays
gccgacacggtggatcccaaagaccagtggtcggacccagaatggtacacgcggatggaagatgggctgcgcgggagcaaaatggaagtgggccaaattcggttgctcaggcccaattagctagttttcttttttttttctttttattttctgtttcatttcgtttttaaatctccattttgaattcaaacttgtttgtgagcttcataactgagttaagtacctaaattaaaatattagtaggaacaaaatgtattctttcatatatttattttcctctattttgtataatctctcccttctctcttttcttaattctaggattattttaggatttaaatccccatttggatatttaacatatttctttttgcattattataatattgtcacaaaaatgcacacacaaataaa

SEQ ID NO: 12008 - DNA, 265 bp, Zea Mays
gtcttaatcctccggtggcgatgctccctcctcatccgtgggtccggcttcggctccggctccggccccggccccctccgcttcctcgagagcaccttcggtgtcaacgtacttcgccaacgtcgcgagcttcttcaacatacagggcgccggccggcgtcgagaatatccggtgcttaggagcctgcgactgcgagcaatggggaggatgcggcgggcgagcagcggcaagaggagggaggacatcatcggggccagccgcgag

SEQ ID NO: 12009 - DNA, 250 bp, Zea Mays
caaacttttcctacatggcaggtgatgtggcaagtctcaggggtcggcgccatagatcttggcgccgacccctcttgacggcgaggtccggcgctgtccaacccttgggactcgccacatcgcctgccacgtaggaaaagttggtgtcactatgcgttacctcggcgccaatgatgatggcgccgagattagagtcattttttgaaataaaactgcaaagggcataattgtgaaaaaaacaaaaagagtt

SEQ ID NO: 12010 - DNA, 864 bp, Zea Mays
atttagaggtaacgactgcggatagcctaaatgtatatatatccctaagctaaagaaaactcagtcctctccctctataaagtaaaccggtatgaaagagggatgaaaaagctactcagcccacagttcccgcacacggaaggcgtagtacacgcgctacacggtgaatgacgtacctagattggtcacgtcctcaggaaaaaagaaggcgcatgcagcagatgccgtactggccctcctccggctcttctccatcacagtcccgatgattccgcgacaaaagcatgcggaggggtccgagcacagtcactgactccgaccgcgatccgcagactggagatcttgcaggagcgcgcgttctcctcctctccctgatgacgagcaagagctacctcgctcgctcgctcattcgaccgaccccagaagctagcagcacagcccagaacgcagctgcaggctgcagccttgcaccctgcgtctgcgtctgtgtcgcaccgggcgccgggccagcgaactcccgctggactcgtcgttttctctcttcaggcgcggcgtggaagcggaacgcgcgcggcctctcagcgctgccgcgcgcatgcatcgcgtctccgtcctcctgtcctgcgtgccatgtgccgccgatgtgcgccacacctgcctggccgccgcccgcctgcctccacttccactccagtcgcctgtttcgttaggtaacagcagacgtacgccggtcgagttttacagtaccgccgggcgcggcagtccgtggattgaagccatgaaggggtttaagaaggattggaggatattaaatcccctcctatttaaatttgtatagaagggaattaaatctctttcagggct

SEQ ID NO: 12011 - DNA, 396 bp, Zea Mays
ctcaaaatcactaggatcctagattctattgtacctttgtcttctttgtgtacaacctacgtacatttgttgatgcaacttttgttacctttccgatgtcctttacatcgctttatcgtccttaccgaatgatcctctacccaaacagcgccaacgtgtacagtaccaacggttagctgaaagaatagaatgatgaaggatggttggcactaggaaaacgcaaaaaaaaaaaaaaaaaaaaacggcccaatgcatgttgcacaagacgtgtcaacatgttgacaagaatgtaataattacaagtgttttcatcggagaaagttgcattgatgatggcccaatgacagtgtacgcatgattccaacttgatggagaaatgagtagcgcgtatctcgc

SEQ ID NO: 12012 - DNA, 323 bp, Zea Mays
cgtctttctccgcacgaaaagccccacgatattcatatcagaaaagctctttgggacaaacaaacaaaaatttgtaccaaacaggccagcttgcttccacgaacggaggagccggtagctcaggagcacagcgcaatgccgccgccgccgccacgcaacaagtttttgctcccaccaaacgaagtcaaaccagactgaaagtactgctcatgcatggacatggcggcggaccaccggtgatgtgtgcgctcgctcgggcgcggatcatgtatggacgtcctccagtcaaccacctcatccatccatccatccgtgcctgtttc

SEQ ID NO: 12013 - DNA, 278 bp, Zea Mays
cttatgcatcatgctggattttattttgtgtgtgcattctgtgacaacataaaataatgagagaataaattacattaatacccagatgggaaattaagatctaaaagatactctagaattggagaaagaaaacactacttatcataaaataaacactaaatttagacaaatttatccataccatgtctaagatgagtctttaatgagaggacaaattcatcatgaagtttgaaagagaattaaaaatattgaatttgaaaaggagaagggaaaagaat

SEQ ID NO: 12014 - DNA, 411 bp, Zea Mays
tgcactcaaaacaaggattaacacaatcaaacaatagatgcaaagttgaattatagtgctaaaacacgtacaaaagctgctggaaacaagtgcaaaagaagaagaggaagacagagaggaggggaaacaaaagctgttttcggattttctttttcttcttttttctgatttttttgatatttttttttctgatttttgtttttttcgaagtccttaaaactgataatatgaacacagaggatctcaaacagcaagtcaccacacacactttttctggaagggtaggggtattctggtaaaaaaagatactctctctctctagagtaaggccaacctcagaatatggtaccaaagaagagagaaaagcgggcgtgcgtgtaatgtccaggtagagtaaggtgtgggagggga

SEQ ID NO: 12015 - DNA, 103 bp, Zea Mays
aggttactgctgctgtgctgcgtaccaccgtgtgataaattcgatcgttcctcccgtgtcgacaccagtcacgtcccaggttttgttttttttttcataactg

SEQ ID NO: 12016 - DNA, 273 bp, Zea Mays
ttttttctggaagctatctggttcgttgtggcaactacaccgtccctatctgttacagacttattttgcttgccaaactttaaatttcgcaaggcaagcgcactgtacacacctgtcgtacgtgcgcctgtgtgtgtaccgtctgaaaggcaggcaaaacgtacgtctaaacagccccgcaaaaagtgctcatttgcatccacacatactggctgcatcggagccatctcaacggcgtcttgtgctcgcgtatccccatagacccgacgcgcc

SEQ ID NO: 12017 - DNA, 1193 bp, Zea Mays
cccccggcggccatgttcgctggtgcgcagccggggttcacctcgccaccagggtttgcattcgcctcctcatcaccctggacctcgcctgtcgcttcgtcatggcccacaccactgtctgctccaccgtccgggctagttggttgggacgcagccgccctggctgccttccagactcccactctgacaccgccgatgggtcctgagtggatcgcggacaccggtgctacctaccacaccactcccgaccctggtatactcacctctgttcgccctccttcctctctcccttcatccatcatggtagcgaatggctcatgtcttcctgtcacatctatgggcgccgccagctctcccggctcttttcgcattcccgatgttcttgtcgctccttctttggtccacaatcttctttctattcgtcgttttactaccgataattcttattttgtcgagtttgactcttctggtctttctgtgaaggactcggaaactcagcgccccctcctccgatgtgatagcaccggccccctatacacccttcggcttccgcacgccaccccttcttcgtcttcgacacctaccacaactgctacttttgctgccaccatgtcttctaccacctggcatcgtcgccttggtcaccccggacgcgatgccttgatgcagcttactcgtagtgccactatccaatgtactagatcaaatgatgagcatctttgtcatgcgtgccagttagaccgccatgttcgtcttcctttctgttcttcttcctcgcatgctactcatgcatttgatcttgtacactgtgatttgtggacttcacctattaccagtatgtcaggctacaaatactatcttgtggtgcttgatgatttttctcattatgtgtggacttttcctttgcgtgccaaggctaagactttccctgccctccgccacttcttcgcctgggtgtccactcagttcggcctccccattaaggtcgttcagtgtgacaatggtcgggagtttgataactccacctcccgtgacttttttctctcccacgggatgcagttgcggatgtcttgcccgtatacctcctcccaaaacggcaaggctgagcgcatgatccgcacgaccaacgacaccatccgcactcttcttctccaggcacaccttccggcacgcttctgggccgaggccctcca

SEQ ID NO: 12018 - DNA, 572 bp, Zea Mays
acctggcatcgtcgccttggtcaccccggacgcgatgccttgatgcagcttactcgtagtgccactatccaatgtactagatcaaatgatgagcatctttgtcatgcgtgccagttagaccgccatgttcgtcttcctttctgttcttcttcctcgcatgctactcatgcatttgatcttgtacactgtgatttgtggacttcacctattaccagtatgtcaggctacaaatactatcttgtggtgcttgatgatttttctcattatgtgtggacttttcctttgcgtgccaaggctaagactttccctgccctccgccacttcttcgcctgggtgtccactcagttcggcctccccattaaggtcgttcagtgtgacaatggtcgggagtttgataactccacctcccgtgacttttttctctcccacgggatgcagttgcggatgtcttgcccgtatacctcctcccaaaacggcaaggctgagcgcatgatccgcacgaccaacgacaccatccgcactcttcttctccaggcacaccttccggcacgcttctgggccgaggccctcca

SEQ ID NO: 12019 - DNA, 314 bp, Zea Mays
taatgtactcttccttttttgagtctagtctttgagtccagtctgtgaactccactgcgacggaagttcagactgcgggggggggggggtgttagagtatatatggtaggcgtagctaggtgaagtgccccaatcctctaggactcaaatgtgatacaattactagtcccaggaggctagtaaacacatttatacaacagataattttagatctgcttaaacaaaacaaacctataaaggtggcgatcaactttaaaagttggtccacaactcgggacatatcatcagagtggggctgaagcagcccgatatac

SEQ ID NO: 12020 - DNA, 2945 bp, Zea Mays
ctcaaaatcatatcatgcataaaataataggctgagggttgtggttgtaaaagcataggtaatttatgcatcaaagggatccagtgagcttgccttgcttatccggcgaagggggaagaggagctcacggaactggcttctagctctactgcctggcgtagacttgcatatctagcctccacgagacggcacgaacgctccgataactatgcaacatgaacaaacaaacatacaaaccaacaagtataccaacaaatatttagtatagtggtcagaatagcgatatatggatgggcagagtcttgagtagaatctgtgtcatgtggtgttgaggtactactagtggtggagcggaggtgcttacctggagggtggactggaggcgaagcgacactgtgcgtgtagccggcagagcggagtaactaagtgggtggggtgtttgccttggctgagggtgttgagtgtgtggagtgggagagggtagctgggtgtatttatagctgggtgtatgtggtgtagctcagtgaagttcactattggtgagaatagtgacgaaagaatcgtctgacttagcatagacaggagagttataggcagaatatgagacaaaagtattttgggagttttctggaatataaaccatgcttaagggatgacatggttggataggaaatagtttgacaagaattttaaaaacaagaatgactgaaatctgagtttggatggaggagttttggattttataatcatagggagaaaaagaaaaggaaaggaatattctagaatttgaatatttagagatatttagaaaatcaaaaatacaaatgtatatttgagcggggtgcgaggaattatttttgggcttttcttgggcagaggtttatgttggtgcaaactgttcctacctactgtgtctcatcagacaacagtaaggcgggacccaaatagcttgaatgctgtggtattctggtctgattgggctgtggtatcttgggctaggttttataggattgaagacgtatccatacaaacatggttcacctttctttttggaagtctggcttgaaaaaatcccaaagttaagcgtgctcaacttggagaaatctaggatgggtgaccagatgggaagttccctactggaagaaaaatcacagtcaccggagttcgtatgaatggaatatgggtctggctggtcttaggtggactggacagcatgacgcatgagtagttgaaatttggggtaatcagatgatcgatgaatagtaacgatgaatagtgacggtgaatagtgatggtgaatagttcgtatgaacgaacgatgaatagtgacgatgaacgaacgatgaataggaactatgaatgaacgataacgatcgaatgatcgaacgaacgaacgatcgaaatttcggcagcataacagcaggaaaaagattatttggacgaacgatcgaatgaaccatgaacgatcggacgaacgatcgaacgaacgaacgaacaaactaagaacaggtggacgaacgatcgaagaacgatcgaacgatccttgtgctagtgtgtgcttgtgtgggaagtggagtgggagtgggcgtgtgggggggagggagttgccatgaaatggcttgggtgggatgagaggaggccctttgagagcacctagagggggggtgaataggtgatcttgtgaaacttaaaacttaagccacaaaacttggttaatcgttagcacaataattgccaagtggctagagaggaatctcaacaaaacacaataaccacaagaaatcaatcacagagatggcacggtggttatcccgtggttcggccaagaccaacgcttgcctactccacgttgtggcgtcccaacggacgagagttgcaatcaacccctctcaagcggtccaaagacccacttgaataccacggtgttttgcttactttttctcaatcccgtttgcgaggaatctccacaacttggagcctctcgcccttacacttgaaattcacaagaagcacggagcaagggagggattagcaacgcactcaagacaagaaatcacagcaacaccacgcacacaagtcgcaacgagagctcacaactcaatgagttcaccactcaactagagctctaatcgctatcgcaaagaatcaaaggcgcggaatcgatgtcttggtgcttaggaatgcttaggagatgcttggtgtgctcctccatgcgcctaggggtcccttttataaccccaaggcagctaggagccgttgagagcaatctaggaaggctgatcttgccttctgtcgactggcgcaccggacagtccggtgcccgatttccttccataaatggcacagtcgaccgttggcagactgagagccgttggcgcaccggacatgtccggtgcacaccggacagaccggtgcccccttctagccgttggctcggccacgtgtcccgcgcagatcgcgcggccgaccgttggctcaccggacagtccggtgcacaccggacagtccggtgaattatagtcgtacgtcgacgatgaattcccgagagcgacgagttcgcctgtgaacggcccaccgtgcaccggacagtccggtgaattatagccgtacaccgccgtcgaagtcccgagagcagccttttccctcgagccagcctggcgcaccggacactgtccggtgcaccaccggacagtccggtgcccccagactgagcagactttggctgctcgagccatctcttctccaactcgattttttctgtttccagcacttagacacaatatattagtccataaaacaatgtactaagtctgagaaacatacctttatccttgatttgtactttgtccacctttttacaattaggcatttgtgttggacactaaatcaccaaaatacttagaaatggcccaaggacacatttctctttcaatctcccccttttt

SEQ ID NO: 12021 - DNA, 1322 bp, Zea Mays
caaataggcaataagagtataaagatgaacttggaagagttactcttttcatcggagtgcagtggaagtcttgcatggtccaagtccacctttttccctttcaatcctccttgaagactaaaacaaccaaactcaagtacatggttagtctcaaagggtcaagttgtagcacagctccccctaaatatgtgcatcacttgcaaaaaggacttgtgaggtccagggagtgtttgtacaacttgagcaccataataagcaacaaaatgcagaatgaacatgatcaaaggcataaacacatgtatgttacaattcaatccaagttccgcgaatctaagatattgagctcactacgcagcctgcaaaagatcttctcatctagaggcttggtaaagatatcggctagctggttctcggtgctaacatgaaacacttcgatatcccccttttgctggtggtctctcaaaaagtgatgtcggatgtcaatgtgctttgtgcggctgtgctcaacaggattttccgctattcggatagcactctcattgtcacataggagtgggactttgctcagattgtagccaaagtccctgagggtttgcctcatccaaagtagttgcgcgcaacactgtcatgtggcaacatactcggcctcagcggtggatagggcaacggaagtttgtttcttagaattccatgacaccagggaccttcctaagaattggcacgtccccgatgtactcttcctatcgaccttacatccagtatagtcggaatctgagtactcaatcaagtcaaagttagacccctttggataccagatcccgaagcaaggcgtagcgactaaatatcaaagaattcgcttcacagccactaagtgacactccttaggatcggattgaaatctagcacacatgcatacgctaagcataatatccggtctactagcacataaataaagcaaagaacctatcatggaccggtatgttttttgatcaacggacttacctcctttgttgaggtcggtgtgtccgtcagttcccatcggcgtctttgcgggcttggcatcattcatcccaaaccgctttagcaagtcttgcgtgtacttcgtttgggagatgaaagtgccgtccttgagttgcttcacttggaacccaaggaagtagttcaactcgcccatcatcgacatctcgaatttctgcgtcataaccttgctaaactcttcacaagacttttgattagtagaaccaaatattatgtcatcgacataaatttggcacacaaaaagatcaccatcgcacgtcttagtaaaaagagttggatcggct

SEQ ID NO: 12022 - DNA, 1078 bp, Zea Mays
aagttgttgagttcctcctgcatggccaacacctagtccggatctagcaaggcctcttctaccctgaaaggctcaatagaagagacaaaggagtaatgttcacagaaattaactaatcttgaacgagtagttactcccttgctaatatcacccaatatttggtcgacgggatgatccctttggatcgtcgctcgaacttgggttggaggtgcctgaggtgcttcttactcttcaacttgatcatcctgtgctcccccttgatcatgcgcctccacttgaggtacctgttcgtcatcttgggatgggggatgcaccatagttgaggaagacggttgatcttgctccaattgttcctgaggccgcacatctccaatcaccatggtgcgtgtcgcggccgttggaacatcttcttcatctatatcatcaagatcaacaacttgctctcttggagagccattagtctcatcaaatacaacgtcgctagagacttcaaccaaacccgatgatttgttgaagaccctatacgcctttgtatttgaatcataacctaataaaaacccttctacagccttgggagcaaatttggaattcctacccttcttcactagaatgtagcatttactcccaaatacacgaaagtacgatacattggatttgttaccagttagcagctcatatgaagtcttcttgaggaggcggtgaaggtagacccggttgatggcgtggcaagccgtgttcacggcttccgaccaaaagcgctcgggggtcttgaactctcgaagaatagtcctcgctatatcgatgagcatcctgttcttcctctctaccacaccattttgctgaggtgtgtagggagcggagaactcgtgcttaatcccctcctcctcaaggaactcctccacttgattcttgaattcgggcccgttgtcgctccttatcttcttcaccttgagctcaaactcattttaagctctccttaaaaagcgcttgagggtcccttgggtttcagacttatcctgcaaaaagaacacccaagtgaagcgggaaaagtcatcaacaataactagaccatacttac

SEQ ID NO: 12023 - DNA, 258 bp, Zea Mays
tagctaaatgctagtaggctgccagaaatgctcgtgcatttgtatagtgggcgttcgatatgcacgcacgagcgtattgttgcttccttaataagcgtaatataataatccgaactaaatatttggccgccagaaaattcacgcaaagagagagataggaaaaggattaggccggactactagaaggaacagtttgcgtcagccagtagcaacggagacttgctatttccaacccccacctaataaactttggagttt

SEQ ID NO: 12024 - DNA, 407 bp, Zea Mays
ccggcatgcatatgccacagctttagctgtcgctgcaggtccatatgcatgaatgaaaaatcaagcaagcgagcacagtcaacctcctcatggcggcggcggtgatgcgctgtggccggaggctagtcgacccggaccgcgtcgtgtggctcacgtgccatacaccgcacgtcgtcgttgcttgtgctgctcttagaccgctgctacctgcggcggaaacccagtcttctttgcgtcttctctccgcttgcatcgcctctccgtcgacgcaaacaggtcgtcgtgcacgcatcgtaggcgtgtatcctgccattgttcaaaagcaaacgaaacatgaagccatgggtcgtggttttcggttgatctgatcgctgatccgggaccgaaccaactcgagaacgctcgcg

SEQ ID NO: 12025 - DNA, 265 bp, Zea Mays
cttttttttgcgccgcgccctttcgcaggacctcaatttcagattggaatataaaaaggccaccaatactaattttttatgtggctttatttctcctgttattaatcttatgggataacactaatcggatgttactacgataaactgataccaaagagttctgattttagtattgtacatgagtatcaaattagaagagttgtttccctcacgttctccaattgttcttctgtcctacaagtttaaggattactactcgcttctc

SEQ ID NO: 12026 - DNA, 1213 bp, Zea Mays
cctgattgggttcagcaaacttctaaaaaggttcgggaaattcgtcagaatattttggcagctcagagtcgtcagaagagttatgctgatgtgaggaggcgggatctggaatttgctgtgggtgaccaagtccttctcagggtatcacccactaagggagttgttcggttcggtgtctctgggaagctcagaccgagatacattggaccgttcactatcttggcccgagtgggcagcctggcttatcgcttgctactgccggattccatggcaggggtacacccggtttttcatgtctctatgttgaggaagttcttgcgggatccggaccatcagattgagatggaaccaattgcggtgcagcaggatctgactctggagtgtcgttcggtgcgtatattggaattctcggagcgtgtgttgaggaagagatcaattaagtatgtcaaggtcttatggactaatcagtctgagcgcgaggctacgtgggaacttgaggagctgatgcggcagaagtacccggaacttttcgttgtgggtaagtgttgttgattcattaatcttttcttttgtcattccgatagaagcgtcagaattcgaggtcgaattctttttaaaaggggtagagtgtgatacccggttttgcaaagaagagaagttgggggttgttcttttgtttttttccctcatccggttgtggttttggggatttgggattttgtggaaaacattcacaactagggcagtagaattgttttggtttgatgcttgcgttggggtcgggagctgtcgcgtgggttagttgggccgcgattggtgtttcggcccattaatcctcccaaaccctagccgcctccctcctaaccccctccccccttgtgcagccgcccctcccactcctcccactccttggtcgccgcccccctgcccatctcctcctctctcaatttttgcagccacaccccataccctagccgcccccctcaatctcctcctcccaaggtgccaatccttgccgctcggatcatcgtctcgtggtgtgattctccaatcgttttggtggagggaagaagggaggaaggaaagggggagaatccaaggtgatttttgtgttcatcccttgttcttttgcgctgcgattcaattgattagatgttacgtttgcgattggatagaggggctgtccagaattttacgtggtggatgaacagcg

SEQ ID NO: 12027 - DNA, 459 bp, Zea Mays
aaaaagaaagaagttctgaaccacgtggttgtataagcacagttgatttacaatgtcctatttgttgtggttatgtttacttgctgagatgtgttatctcacatcttgcattgtttgatgcaggcacctaatttctgcttggggaatagagggatgtagcagcacggtcacttcacctttaattaaaggaacccccacttaataatgttgttaatcagagttggtcaagtccagtgaattactttgttcttggttgagcgtttgttttgggtgggctgagttccttatcccatttgttttacttcagttgggtcctaattaagttttaccacttttgcatttttgtttctactacgtgaattatatgtctttatatcttgtatgaacttcatgtttcccctcctcgttatgctagtttttaaaggaggtgctgccggatttttcttgctttatattctt

SEQ ID NO: 12028 - DNA, 4764 bp, Zea Mays
cttaaaactgaaaataaactgaaaattctaagcttaggagtcaagtagaaatgataaacttagaaaaacttgctctaggtgaaaagtatgatatgttgtcatattctcataataaattagttgatgaccatatcatgcttgatgttgctcataaggtcgtaattacgaacttaaattcatgtgaacctcattcgtgcacaagtacacatttggataatctatcaccatgtgctaacccctgtcgctcaaaaggaagcgagtgtttaaatgagcaaaaagttgtagggtcacaaaagaaattgtgtgggaacaagaagcaaagacaattaaggagaagacgcattgctcaacattctcaagatatccacgggcgcgtggtaagaagcttgagaagggaaaaactgaagcaagtgttaagctccataagaaggatgttcctaaagatgaagaaatcaacatgagcttggaaaaaggtaaagattcaattaatcatgttgtttgcactgaccatttctctatgtcatccaagaacaaaaagagaaaagggaaaagggggtgctttaagtgcaataaggcaggacacctcattgtgtcgtgtccatacaacgacaagggagaagggataaggagatgcttcagatgcaatgacaagaaccacacaatcacttcttgtcctctattgatgaatcaagcatgtgaattctccaagatgactctcaccaaggaaaatgacaaacagcaagcgtcatgtcaggttgagcgacgcttctactacaagtgtggtgagcagggtcatctatccaaggtatgtaataaaggtgaggttcctaagcaagtaaatttgtctcaatcttattcgcttaggagacccaaatcatactcttgtgctagatcaatcatgagatcacctaggactagcacaaatgctatttgggtaccaaaggcttttttggatgatcgatatggacccatcccgagatgggtaccaaactgtgctaactagaccatgcaggtgccttgagatggactggagaccatgggagagcttaatacggttaactcaaactctatgcttaagctgttaattattttggtgtttattcattgacccaaggttgaattattgtgagacactaatcccatgttcatctcaagtgaaataagttgtagaggtccttaatcatcattggtgaatcaagcaaaggaccttgattgtgcatctggctctccaaaggacggtacctgtgcttcttaagtacattatcagtactgctcttaagtctgattgttgtgctacctgtccttggagcagttatgcttttttgattgcctgtgttgagtacctctcaatcaatgattaatggtttccaaaatcgtaaccatgcgtgcttaatcatgattgtgtgctttagaggttatgtctcttgaatcatttaatgggtagtttttcattagatatatccaccacgattaactctttttgtgttcgtgaataaacatgtatccctttgtgagttattgattaacctttgtgcaaatatgacattttgtttagtttatgttcacatgattactctagtctggtattgtgtgaataccaaaatccatgttgtgcctctaatgcacccttttgagctataaggtgcataaacaaaaggagccctcaattagtgataattggtgctctcatggcaattcaggaaaaggcaaaggtatggagaatggaactatgcaatttcattgaatatcttgaagttccattgattatgatcatagctatggtcttgcctctgaattggtagtatcttggcttaagtgctccttactttaaaatgttgtttcttttagtgtacctaaggaaccttcttaattatgatgtgcttagacattgcgctttatatgcatgatcgtgttgtttttcaattggtatatgtggtgcaatgattgtcaagtatgacgcatgcctaggttgcttgtaaaatgttatacttcttaaggcatgcataattgtattaagtcaacctttcatttagtactcaattggtatcttttcgtgatgaaattgagagtatgccttgaccaagatatgttgtgatcccctctagttctgagaaagctagaatgtgcaaagtacaagttattcaaatacttgatgcacaagtttagggggagcgcacataacttgtgtcttttgagactaattgtttcttgagcgatcttgtatagtctcaaggtggaaaagagaagatgagcaagaaatggagcaatcaggacttgggtacctctgtaagtcaagaaattggtatcttaagtcgtgagtaattgcatatttttagattgctcatgctctataatatttggtgatactagatgcttatccttaaatatcatggagctatgataataaatgacctttcaattggtagctgtgatagtttgcttcaattgacatcttttgataatcactagaatagtagcttcatcttgtgccaatactataacttgctctaagcttggtgtcttagcaacaagaaaaggttaggataaaggatcaggcacaagtgtggagaagctcccgagagattaatactttcaagatgggaagtacaccacaacatggtaaaggtacaaaaggaagtattgatattttgcgtaaatgtatcctaatatctctggtgcatatgtttaatgaataagggggagttttgatagtgcgtttttcctccttaacaccctgttgtcccttgacatcatcctatgttcttgcttgagtatggtttttggtgtttgatgtcaaagggggagaagttgtgcattaaagcttatctcaaccaaagaggaaagattaccctaaggggtgatgtgttagtttgagcattgttagtgtgttattgataattcttatcatatgcttcttgcagtattatgtgtgttgcatcatatggttatatgtgttgcatcatatggactagtgcttctgttgctatgaattaattggcctctataatgtttattctggaatagatatacatgagattaatggtgctttaagcttaatggtgctctaagatttctttaaattggtatcttaatggtgaatagtggtaggttgatattcctgtgttatatccactcaacgaatggtgcttaactctgattctggcatttgtgtgttatagcatcatgatttgattcttgacacaatgcattccaaaaagtgctaaggtgtagaaatgtttcgaattgcctaagtatgtgcaaattggcgtatgtggccaaaattatgtttttgaagtaagcacatatttagggggagcattctataaacttagaattcaaaatttgtgcttcaaatcttattcttatgtaagctttaattgtgttgccatcaatcaccaaaaagggggagattgaaagatctcttgtgagttttggtgtttggatgacaacccaattaaaggactaacaagtgtgttaagtgttgaacagggattaatgtaaagctgacaaacttcaacacaaatgaacaaatgtgatggtccaagaactggattatggatagataatggacatcacaagtaagatgtatattgcaaaagtgatactcaggtgcgtagctcggagacaactgatcaagccaaggatggaggcaagaagagcttcgaggtaccaagtgcacgggagaaggtcaaagaggctgaggaacccaaagccaagggtgaagaagaaggcttgcaaagtcaagggtggtcaagttgagaacagctacggcacatcaaggatcactacataaggacatgacttacaaccaatgaggaaatgtctatagttatgtggtgtaagtcataaggttcaagagcaagctctaagtaggagatcaaggtcactagaacgagaacaaatgttaaaaacagacctggaagcagcccaaaagagctaagtgcactctgacctttagtttgggttgttcctatgtttggagatattctatgtgacctttacaagatgttggagctcagaaatgtcagtatagatcaagttaagctgacttgatgatttatgagtccaacatcaatcttaagcatgtcaaatgatagaaaggtgaaaatccaagagaaggtatgtttctagacttagtacattggtttttgtgtactaacatatttgtataagtgttagaaatagagaaaagaaaagagatgcacaaggcttggctgtgtacagccaagactcagctcagtctggcacaccggactgtccggtggtgcaccggacagtgtccggtgcgccaggctgaactctggtgaacaggtcgctctcgggagaagtcggcggcgtacggctataaatcaccggactgtccggtggtgcatcggacagtgtctagtgtgtaagctacggcgaagtcgtcgctctcgggaggagtctggagacgttcggctataattcaacggattgtccggtggtgcaccggactgtccggtgagccaacggtcggtcgcgcaatctgcgcgtgacgcgtggccgagccaacggtcagatgggggcaccggactgtccggtgtgcacccagtgtccggtgtgccaacggctccatgactgcaacggtcgactgcgctaattttggaaggaaatcgggcaccggacaatgtccggtggtgcaccggactgtccggtgcgccaaccgacagaaggcaagatttgccttcctagattgcttccaacggctcctaggccccttgtgcctataaaagggacccctag

SEQ ID NO: 12029 - DNA, 60 bp, Zea Mays
gttgtgaccagcaatgggaatattattaaaagtcacctacaatgcttcaaagttagcaaa

SEQ ID NO: 12030 - DNA, 330 bp, Zea Mays
gcaaaatctgcctttttcctttttttctttttttttcttttttttcttttttttcttttttattttatcattcacaccgtgatagggccagcctggtcacgtgtagggggcctcacggtcaagaaggtcacgacaaaaatagaaggcctaaacgaaaataggtcgtgatgaaacgacggccgggtgagagaccgtgactggatggcgcctgcgactacagtctggacggcggtcgggaggagacgtgcaatgtggacgacacttcgatagtggtcctaggctgcggctgcgatgaaagcctggacgatgaccgggaagaggcgttgtgac

SEQ ID NO: 12031 - DNA, 658 bp, Zea Mays
cttcgtacaagcagctgggttggaggaatcaacccaatagggtacgtagcgggagtgtttgacaggtttttcgaagtgagtctgggtgaccacttcgatcatcttcatgataaagggtgcatgaagacaccctttgagaggagaccagcaagcacagatgatctcttcccagatcatgtcaaacacattaatgcgggcgagactgttgggagcaaggaggagaaggaagacccgactctccccaaggacgttcatttgattcccgcccttcgggagaacggtcatcctagacaaagagttaaggtacctgtagtacctatgcatgttggcggtggtccagaactcccgatccatagagacatgaataaattcagtctcttcccgcatgggcagcctaatgtcatggactcgcatgttgctgccctgaatatcagcatcagagaagcccagaatatgggcaaaacgacggtaactaactttgtgccagttcccctggatgaagaaatacatgacagggtaatcatacccatcgacttcttcatctactttcttgacccagagggtggcataagactgagctaccacctcgttgttccaggggtattccattgtcataatattttttaacccctttctatccaagttacggagagctgac

SEQ ID NO: 12032 - DNA, 566 bp, Zea Mays
acgactaggtgtttcttggacaaaatgactaaattgtagaaatcagcctagaaaagattccagaaccgagggtcctggacaccaggatgacgaggagtgagagaagggttagtgaacctcaggcgctgaagggtgtccactcccttaagagagaagtcgacgggaggttcatttggtccgcgggtaacattcgccggatgcatgtgcaggccggtgatgtagagtgcatcagacggcggaagatcgacgaagtcgtcgaatgctccatcctcctcctggcaaggagcatatccagaggaggaagtgctgcgacgaggacgattgtcgccaactttttagcgcctccagtgagccggctgcgagggcatagaggatccctctccttccatccgaccagagccgcgtcctctcttagagagggaacgacaaggcggaggagagggaaccggagattcctcctgaatctcatccgagtcgctgctgaactctatcacggatgggttgcggcgacacaccatgtttggagaggctttggagagttggaccggttgaggtgagtgggtgag

SEQ ID NO: 12033 - DNA, 196 bp, Zea Mays
aatcgatgcagccattatatagtttcctttgttgcgattatgctgctcattaattaaagaacactatatgtcaatctgtatagtttgcattacataaattcattttatgcccagattctggaagcaaaccttctcgtaactcaaatgttacataaactgtaattctgctttcctgcatcccatatttacatatcag

SEQ ID NO: 12034 - DNA, 316 bp, Zea Mays
ccaccgtcgcggtccttctccggcgcgtccacgtcggaaggcacagcacgcaaggccgctctgctggctgctggcttccccgaccgctagggcaaggcataaattcgcggatggtggtggatgtgcatgtgcgcatcagaatgatctcccccgtcgacgtcgtcgtcgatctgttttcctcttcttggtaactggaggtatatggtaaggacatcgctgggctgggcagctaggatcactagtagtccgccgaataatgaatggcatatatatcccatataccttacccgatgtgcctacaagcaccggaattcac

SEQ ID NO: 12035 - DNA, 286 bp, Zea Mays
gagaaaggactggtcggaccacattggtatggagagctgtgctcgagcaggtttcagggggcaaagtgccagaatctcttgactccaatccaatcacccccttgattttactagtacgtactgtacttgtttggacgaatttctttttttcaaaaaataagaaatgtgttctttttcaaaaaaaaaaaaaagaaatgtgaatctttaactaggtatatgacgatggtgttagcgcgacagaaacattttaccgcaaaacgacagaaaagtacatgtgttgcaaaat

SEQ ID NO: 12036 - DNA, 2889 bp, Zea Mays
ccctgtgataggttgccaagctgccagaatggcctcccactatactgtcatgtagtgcagcaataatctttgttctgagagctgagttctgagcaacccaaatctggttcccttttctaatcacacctttctgcactgaaaacccttgttcattgggactatgaaggactaactcagctaataatctctgagcttcatcatcagtcacataagagttaagcacctcttgtacccacaaaggcttcacttcagtcaaagtctgcagtgccatcaaatgcccaactctagacaaagcatcagcagcaatattctctttaccttgcttatagacaattttgtattgcagtcccattaatcttgccatggccttcttttgcaaatccgactgcaatacttgctcatttagaaaactcaatgccttgtgatctgttcggatcacaaattcagctctctgaagatattgacgccacctttgcactgccattaaaagggccaagaattccttgtcataaatggatagcatccgatttttctcacttagagctttgctaagaaatgcaatgggtctgtttctttgcattaaaactgccccaatcccatccatgcaggcatcagtttctaccacaaatacttcttcaaaattaggcaaagctagcactggtgtctcacacatagcttgtttcaactgctggaaagatgtttccgcaccttgactccagtgaaatgccttatgtttgagaaggttggtgagaggtttagcaatgattccataatgctgcacaaatctcctataatatcctgttaaccccaaaaaacctctcaactcagtcacactggtaggtgtaggccacttcttcatgacctcagttttagaaggatcggtggatactcccttctgagaaataatatgccccagatacaacaactccacctgcccaaaaacacacttcgatttctttaaaaaaaacttgtgttccttcagcttctcaaacaccagtctcagatgttgtaaatgatcaacccaagatgcactatagatcaatatatcatcaatgaataccaggacaaatttacgaagaaagggtgctaaaattgagttcatcgcacactgaaaagttgcaggcgcattagtgagaccaaaaggcatgactctaaattggtaatgaccttgatgggttttaaatgctgtcttgaactcatctgtctcacccattcgaatctgatgatacccagctgtaagatcaagactggtaaagaattgtgtgcctgataactcatctagaatctcttcaactagtggcataggaaatctatttttgacagtcatgtcattaagtttcctgtagtcgacacaaaatctccaagatccatctttcttcttaaccaaaagcactggagaggcaaagggactcacacttggagtaatcaaaccagcttctaataaagcattcacctgcctctctatctcatctttatggagaggagaatatctataaggtttggagttcacaggtacagctcctggcactagcggaatatagtgatcatatactctggatggaggtagctgatttggaattgtgaacaattctgcaaattccatcaatacacactgaacatctgcatgttgtaggtgtgattgttggtccacattagcttctaccaacacaaaggcccacacctcatttcctttctcccatttgtgcaactgagatacagatacttgttgtaccattaatgagtcctcccgcacatctcctttaagaatcactggcacattctcatccacaaaactaatgacattagttttccaatcacactccatgggactatgatcctgtagccagtcataccccaaaattgcatcgaaagcactaatgggcaatactctcatatctgtgtgatagaagtgaccattggcccaccattccaacttcttaaccatcttgtgacagaccatagaagccccatttgctaccttcacagttacgggtgaacaaggatataccgacaatgctaatttctgaaccacctgttcactgatgaagctagtggaactccctgagtcaaccaacatcaccatgacttgcttttgcaccactgctctgatcctcatactgttcacccctgcagttccagataaggcttgtgttgagacttgacaacacaccccttgctgctcatcctcttgctccagttgttgcagcacctcatctgtcaaaaccatctccacattctcaacaatcactgtattgagctgggcaggacctcttttcgtgcacttggcaatatgtcccggctcaaatctttcaccgcaagcataacataatccatttagtctccgaaactcccttacttgtcgttctttggacagatcacctcccactggtggttgcttcccttctcctttgaaccccaccccaacttgcttgttatggaacggctgacgctgtccctttcctttggcttgctccaaaatatcatgctgagtttgagccaacacaattgcccgatcaaccgtcgtaggcatctgcattctgaccacactttgaatgtcatacttcagaccacgtacaaagtgagtcacaaagaaaatctcatcaaacacagggttgtgcactgctaccccatatcgaatccgatcaaactccttaatatactgatcaagggtatccgtttgcctcaattccaacaacttcctcaacgcatttggatacgcttcagccccaaatttctccaccactgctgcagaaaattcttgccaacttcccagcccatgacacatcttgtgaaactgccaccattgggctgcagtatgttccaaattcatcgatgccactgacacccacatcgcagtaggaacactaaaaacagagaaatactccaaac

SEQ ID NO: 12037 - DNA, 529 bp, Zea Mays
caataaagtattaattatgttgtcacacacatttttttcaatgtgcatggcatcaaaattatatcgaaatatcaagtccttccaatatggaagaaggaaccaaataggttttattttcagaaagactaatggttccccttccttccgttttttccttgttgccttaccagatgatttcttgccataaactgtttctagattttcagtgcattccaaaatttgctctcctgacagaggaagaggtgctggtctcaactcagtttgggcaccgaaggaatgagtgtcaaatctaaatggatggtctggatgcaagaacctgcggtgtcccatgtaacaagtcttgctaccatttccaagtctaagggaacagatcaaagagtggcaatcaggacacgctgcctcactagatgtaacaaacccagacacgctgcctatacccgggtaatcagtgatggtccaaagtattgcagcacgcaattgaaagtattcgccctttgaagcgtcataggttctcacgccattaacaaac

SEQ ID NO: 12038 - DNA, 452 bp, Zea Mays
ataagaggaaccaacgctggaatcggcactggggataaataacggcaaacaggagcaccggcgaagtgtgattggcgagcggcaatcaagcggcaaacaggagcaccggtgatgtgcttgagacggggaaggaaatccttgggctgcaagcctgcaacaatgcaataggcgaagaaaacccacaaaatgtcgaagttgctagtggactctatcgcaaaaaaaaaaaaaaaaatatcgaagttgctgttgggctctatcgcaaaaaatagaaataaaaaaaaataaatgcggtgaacgtggatcgaacacgtgaccttcagatcttcagtctgacgctctcccaactgagctatccccgcaatggttatatttttcaaactatcatatataaattatataattctgcataaatagcataattatttgcttactttgttgtacatcaaagtgtg

SEQ ID NO: 12039 - DNA, 1198 bp, Zea Mays
caagtttgtgttgtttaagtgttgaattttacaggatcacctatttaccctcccccctctaggtgctctcaattagccctggtagtaattttaatataagattttgaaagggaaatgtgcccttgggccatttttagtatagttttggtgattaagtgcccaacacgtattgagcgagtaatcttgtgccaaatgattgatgaagtgcaaatcaacaagaaggtatgattctagacttagtacattggtttttgtactaacctatttgtctaagtgctggaatcagagaaaagagaagaagaaaatatcttggctgaaacagccaagactcagcgcagtctggcacaccggactgtccggtggtgcaccggacagtgtccggtgcgccaggccagcctccggtgaacaggctactctcgagaactgacggcgttgtacgactataattcaccggactgtccggtggtgcaccggactgtccggtgagccgtctgcggcgaagtcgtcgctctcgggaatcgttcaacggcgtacggctaaaattcaccggacggtccggtgaggcaccggactgtccggtgagccaacggtcgactgcgccaacagtcggccgcgcaatccgcgcgtgacacgtggccgcgccaacggtcggcagggggcaccggactgtccggtgtgcaccggacagtatccggtgcgccaacggctccatttctgcaacggtcgactgttctatttttggaaggcaatatgcaccggactatgaacagtgcttgtccggtggtgcaccggactgtccgatgcaccacccaacaaaaggcaagaattgcttttctagattgcttccaacggctcctatctgccttggggctataaaagggaccccttggcgcatgaaggagtacaccaagcattctttgatcatccccaagcaccaagactctattctcgcgcatttgattctttgtaataagtgacttgagctctagttgagtagtgaactccctgcatcgtgttgtgagctcaagttgtggtttgtgtgcgtgattgtgctcgttctttgagtcttgtgtgtgttgctcttccctcccttacttccgtgcttctttgtgatcatcatttataagggcgagaggctccaagttgtggagattcctcgcgaacaggaaatagtgaaagaaaggaaaacaccgtggta

SEQ ID NO: 12040 - DNA, 404 bp, Zea Mays
ggcctagtatacaaacaggctaggtaatagcagatataggcatttttaggaaattagctaatagttagctagttatgtatcgttaactaatttcactatcaatttttatatcaattaactattagctctagtgcatttaaaagccaactacttttttttttttttttgcagtagagaaactaaaccgtgaggccgccgggcttgcttgatatgcatgcttgttggcttgttgcgggtagctagctagcacagctggggtagagatcatgcacagagtccggtagtgtttgttttttccccctatggcaaaacccatatgatgacgaccatgatgatttagcctagctaggacactttgcatgcatactttacgtcatttttaaaacaccgtagcacgtataaat

SEQ ID NO: 12041 - DNA, 634 bp, Zea Mays
atattagcagatgatgtggttttatactctcagaggtatgagggcagatgacctacacattgcattcctatgcatacattgaagtgatatctgcaggtattgttgacacagggaagggttatacaacctattgtggttgttcgaggaaatgagatggtattggttatattgggactattgagttctatatctacaagtatttctgatctcaattgggattcctttaaaatgttgtttaattcaatttgtggtttaaatatctcgtcaaaataatttgcttgctgagatgtatcatctcactcttgcattactcaatgcaggtatttgattcatgttgggaatgagggaagtagcagcacgtccaccttcactattataataacgctgcccagttggagccatgatttaattagaaactcgatgtcaaatgatgtttgtttttttctagtcgtgtgcactggttaattcagttcatgttgttatgtttaactttcctttgctagcatattaataatgcttagtatgttttttgtcatgatatatgtttatacactgttgcccctcgtttatgcaatctttcaaaggagatgctgccgaaattttatatatggatgtcagatgtgtagttcagtag

SEQ ID NO: 12042 - DNA, 1127 bp, Zea Mays
ggaagagtgacctatagtagtggccaacactctagtcagattgactttgtactcacaagagaggataaatgagcatgcttggattacaaggtgattcatggggagtgtgttgtctctcaacataagcttgtggtggtggtctttcgtttttaggtgcatgcccataggggtaaacaagccaagtttgcgagaacgaagtgttagacactgaaagaggagacgtcataagtcttcaacaaaggggctatcaaagagggcacttgaaaggaagatgacacaaacaacatgtgggagaagatgacaacttgcatttagaaggcggtcttagaggtgtggagcaaccaaagggagtataggcaaagctaaagatacttggtggtggaatgaggaagtctaaagggctatttaggataaataatactataaacgtttgtaccatgatagaagtgtgggcaatataggaaagtacaaggtagcaaagaagaccacaaaactagctataaatgtggcaaagaggaggacgtacgaggatctttaccaatgtttgagtacgatggaaggagagaagaacatatatataggatggctagggtccatgagaggaagacaagggacttcgaccaagttaagtgcattataatgaaatggaacaccttttggaatgaaatggaacaccttttggtgaaggatgatgagatcacgattttcaagtcgataagtcgagtcgagtcgacaaggtaccgacttggtgactaatcaataagtcagtcgacttgtcgtcgacttgccaatatagtggctgtttttcctatataatggcttcatatagacaatatagcatttatatatttagaaagagcatgctttacctcatttgaagcctgaaattgaacgaaactgaaataaacagcaagtcttacctcatttgaagcctcaaactgaaccaaatcagccacataagtgataagtcataaactcataagtcataacagccatatatagacatataattcaaattggaaatcaaatagcaagaaaatatagttcaaactcgaaaggaaataagctccattagatagctaagctgctgctgcagctagatagatactagataccttaaatatctc

SEQ ID NO: 12043 - DNA, 975 bp, Zea Mays
cttttctcactaactaccttctacttccttttctgtagcttcgaatgcaatgggatttcgtctttccttcgactatgcctcttagcttcgattttgttttgtcatgtttaaaactactatttccttacttcggcttttcatcagccactcatgttagctagttcgaatgctgattttatcccttggtccaaagttgttttcccatggacttcgactttgacttggccctttttctgaaaacatgtttgcacaatggttttggttaatatgaacatttagtcaaagacctccacaagaccacaacaaaagccttatgacaaactatcatggattgctatgtgcctggctttcaacaaacataaagttccaacgaagtacgttggactcattgaggacatgtacaacaatgttgtgacaagtgtttgtacaagtgatggaggcacatatgacttcttgattagaataggactacatcaagggtcaactttgagcccttatccttttgttttggtgatggatgaggtcacaagggacatacacggggatataccttggtattgtatgccttttgcgacggtatagtgctagttgatgaaagtcgaagtaaatacgaaaatggagttgtggcgggagactctaaagttcaaagtttgtagacttagtataactgaagttaaatatatgagacgtgacttcgacatagtacacatgaggaagggtatcttagtttggaagatcaagtagtgcctaggaaggatacattttggtatttaggatcaatgctagagagacgtgatattgatgaagatgttacccattaaatcaaagcggggttgataaagtggcatcaagcatctaacattctactatataaagcactgattttcaccatttttgatgtcgtcatgcgtcccacatttaaatggtaaaaaaactaaaattatgcacaaatggagatttgaaccatggttgttg

SEQ ID NO: 12044 - DNA, 234 bp, Zea Mays
ccttaatggcctccagacccaagtgcgggtggggtgaatacgacgattgcgacgctccttctctctcctcgctattccacaactctacggtggcaacgtttaccgccatggatccgtacgacagcaaggtgtctccaaccccgaacttggctaaagcgcctaacaaagtcatgaggaggatgggagatcacgggtgctcagcttataacagagcggcgtgggcacagagccgag

SEQ ID NO: 12045 - DNA, 560 bp, Zea Mays
ctgccatttttatggtgctgtagctatgctgttagaggagatcacttttcctgtatgtagtcgtttggatcaagcttttacagtatgatgataggtttcatctagcctgagataacttgtctccagcaacgtcctctatatctatcctctatatccgtcctttacagtctactctaaaagatttcatcctctatatatccttcctctccaacaacgtcctctaaatcacgtcctctatacgcaaatacatacattagagacattttttaatttttaatttttgtacatacatatttgtcatactctcaaatgtgttgtacatattttagttttgctaaatcggttgtttaaagtattcaaatggatagagtaacgtttagagaaactctatatatagaggatccaacagcgttctctaaatttagaggattgtttagaggacgttgttggagtgagtagaggacgttctgatcctctaaatttaaggtacagaaccgtttaaagttccttgttggagctagttccttgtgcctgagtatatacaaagcatcattgtttcc

SEQ ID NO: 12046 - DNA, 789 bp, Zea Mays
caactctcttcccccccacacacacacccactccatgttccacacaagcacacactagcacaaggatcgttcggtcgttcttcgatcgttcgtccccctgttcttagtttgttcgttcgttcgtccgatcgtttgatcgttcgtccgatcgttcatggttcgttcgtccgttcgtccgttcgttcgatcgttcgtccgttcgttcgtccaaataatctttttcctgccgttatgctgccgaaattccgatcgttcgttcgatcattcgatcgttcatcgttcgttcatagttcctatccatcgttcatcgttcgttcatacgactattcaccatcactatttaccgttactttttaccgttactttttaccgttactttttaccgttactatttaccgttactatttaccgttactttttaccgttactatttaccattactttttaccgttactttttaccgttactttttaccgttactttttaccgctactttttaccgttactatttatcgttactttttaccgttactttttaccgttactttttaccgttactttttaccgttactatttaccgttactttttaccgttactatttaccgttactatttaccgttactttttaccgttactatttaccgttactttttaccgttactttttaccgttactatttaccattactattcaccgttactattcatcgatcatccgatcaccccaaatttcaactactcatccatcatgctgtccagtccacctaagaccagccagacccatatccc

SEQ ID NO: 12047 - DNA, 339 bp, Zea Mays
cgacgactacaaacacatcttcgtcacgccttcgaagaagtcagcacctgtcagtcctgttcttactcccaaagatcaaaatcgagatgaagaagagctcctcctccaaacacgaaaccagaagaggaaggtcatgaaccccctaccacaagatgatctcgaccaagagatctagaatctcaaagctatccactaacaggtcgagaagcgcaaggagaaaatgcttcgagtctcagctccagaagcatatcgtcgaagcatcagagcaaccatgtcacataacagtataacacaacaaattaaacaacctgaagaaccacatcaccagagaaacctcca

SEQ ID NO: 12048 - DNA, 337 bp, Zea Mays
ctcggtgttacctctaaaacgctgacgtcgccctccagtcactcggcgttgcctctaaaacgctgatatcgtattcagtcgctcggtgttacctctaaaacgctgacgtcgccctctgacatcatctcaagtcgctcggcagttatctctaaaactccgacattgtgttcagtcactcggcagttacctctaaagcaccgacaccatctacaaagttactcggcagctatttctgaaagcatcagtttgatgcccgagttattcacttactgtctcaaaggaattagcttcacaaatgagcaggacaatcatcaaggagaagccaacatcattcttt

SEQ ID NO: 12049 - DNA, 679 bp, Zea Mays
ataaatttcatctataaatacccctacctgggtggagctcatcccatacaccattttatctcattcctctcctccaaagtcgcattttctactcatcttcacatcatgtattccttgagcacaaactcaagtgaaggagctgaaggtgctatgcattgcaggtagccatggaggaggctatgctcaagctcaatgaagagtcttcaagttagcccaagtgtcatctatgctacatcaatcatgatcgtgagtctgcccatgatcagcttcatcaggactacttcatcgatgactgtgtgtgtaccctcctaattactttcggcataggtatcacattaggcaacaactgtttttagtattatgcatagatttggtgaatacactccgtatttcacccaaatagaatatgttctaggttggctcgttctctctcccctacaaaagtgcatcgcgtctatgcgcttgttagcctatggatccgctgcaaattcgatagatgagtacttaaagctagccagatcaactgcattagagtgtctacggaagttttttgagggaaaatactgtggggaggtccccatagtaaaattaatgattaaaagagaggaagagattacttacaatgggcaggtcccaccatattaccagaacccaaaggagaacatggtttagaaatatg

SEQ ID NO: 12050 - DNA, 797 bp, Zea Mays
tttttgttgttagctcatgaatcgtgtttctccaacttacttcattattctttgtggcagctggaaaatcctccagccaaaacaggctctgtgccttcaagaaaggtatgcatgtacaatcagattcagaaactagtgtaaaacaacagttgtagaagctgctacttatcctatgtcccctctaatccaaaaggggaattgtttaaccaaacttaaccccacccaaccccaaccaaaacagagaagaaggaaattgcctcgtaggtgaagcaaaaccctagcagattagtacaaaacctaatatgcctaattgaaacaagcaagaactaaaaatggtagcagagggaacaccatcagagcatgtcctccagtaggcgagcaaagcatcccgtctccctaaggtaagcgtgagggtagagctctaggagttgtaagggtagggggccagtaccttgcgcggggcgttgcaggggcagggcgtcgatctcctggcgcggcttccgagcgcggacgtcgagcgggctcggttcgggcgctgcgcgcgggctgacagcgatgcctgggcgctcggccagatgagcaggggcgggtgtccggggtgcgtgtggagcagggcttcaggcgcgcgggcggctcgatgggcgcagggagctcggtcggtctccgggtggctgcaggcgcacatggcagggcgctggcgcgtcggtgtcgcggtcgcggggtcgcgcggtcggcacggtctgctcggctgcgcgtcggagagaggagcgagggggaggagagaggaggcgggtggg

SEQ ID NO: 12051 - DNA, 572 bp, Zea Mays
ggctatcatggagacaaaattattcctctccaagaactttgatatgaaggacttgggtgaagctgatgttataccgaacatcaagctgataaagggtgaggatgggattactttgtcacaatcccattatgtggaaaaggtcctgactcgctttggacatatggactgtaaaccagtcaccacgccctatgatccatcctacacgctcagtaaatatgaaggcgagcctgtgaaccagctactatattcgcagatcatcggatctctcatgtacctgagcagtgcaactagaccagatatctcatatgcagtatgcagactggctcgttattcggccagtccaggagatagacactgggtaaccttgtacagagtgcttcggtatttgaagggagcgatgaatcttggtattaaatataccggatttacgtcagtacttgaaggattcagtgatgcaaactggatctctgactcggatcaaatgaagtctacaagtggctatgtgttcactttagctggtggggccgtgtcatggagatcgtctaaacaatcagtgtcgacacgttccacca

SEQ ID NO: 12052 - DNA, 350 bp, Zea Mays
caaccaatatgcgatcaagagaacaacataggtaatagattttcaatcaagcttaaaaataggagaatccaataagcatgctactttagaaatgaaagcaacaatccttgatgaaagcgactttattttaacaagttggattgatgtgtagtagcatactgtatgagaaacattattctcatgcaagagactatataagaaaatactaggataaagtaatagtctcaatataatcaaaatataataatggactccccctaaagatatgcatcaagtaattgaaagaattgattttgatgcatttacttttaaggacataaaggaagactcattatacatcttgatcgagg

SEQ ID NO: 12053 - DNA, 134 bp, Zea Mays
acaaggtatgtacaaagttccttgaataacaatttaattctatttacaagagttgttacaaaattatcttgagtttttctatagcacacttctgctactcttcattaagtttcagcttcgacgacaacttcggc

SEQ ID NO: 12054 - DNA, 485 bp, Zea Mays
ccaaaacaaaaggtagcttgtaattcttcaatgataaacatatccttgggataagaacagtttttccagtttgaattcccgttattatttttgcctctaataccagatctcccaatgaagtaataattaatcttgtgccgttgcatagcccttcagattgatttagatttctaaggagcattattggaacacccttcttcaacacaagtagatgttgtggaaagttattgccttgtagtgagtttaggaactccaccggatataataaatcgtagtcatcattcgtatttggacctttgataattgtatcacaactcctgtattctttagtgtcaccagcaatcatagagactatgtagtcgttgactaagtcgaccatatcatttgtaggtgttagaattgcccttgcttttaggtagtcaggatcatcataatgttctgatatgttggggtatgtactttctatcagcatagataaattgttg

SEQ ID NO: 12055 - DNA, 415 bp, Zea Mays
gtttgggctagagttagagctagaaactagctctagctctagccgggtttgaaggatccaaacagggccaaagaaaaaaagaacgaaattcttcaggcccctcctctcttcgggagacatcacatgacctagctagtaaccggtcgccggccgcccggaagagatgaggggcacgcaccggcgagctcgtgctgctgctcggattggctttggcggtggaaccggcgtcgttttcatcagactccaccagcgggcgtttgctagctcgtccgtccctggccggccgggtcccgccgcgccgtgctgctcggattggatcgcatgcttccgatcaaagtttcgtcgtcagggcagcacagaggcaggggccctgctggaatcggaatcatgggtcggagcccggggcagggctcgg

SEQ ID NO: 12056 - DNA, 365 bp, Zea Mays
ctctgtgacgctagtttctatattatattgttgaaacatgtaaggcccactgaaatgcacccagaacatggatttgttacttggaaagccttttagtcccaagcaagttggggtaggtttgataaaaaaaacataatccaaaattgattacccactgctcgctctattccaaaatgttggtcatttttttagttttgtcctgagtcaaacttctctaaacttcgaccatgtttatagaaaatgcacgaacatctacaggatcaaattagtttcactggatccatcattccaccattaaatatgttttgatatttcatttatttgtctttgtaggtgtcactgtattttcctataaagttggtcaa

SEQ ID NO: 12057 - DNA, 259 bp, Zea Mays
ctttgatctaatcgggtactctaacaccgattatgtgggatgtaatattgatagaaagagtacattagagacttgtcagtttctagggagatccctggtgtcttaggcttcaaagaaacaaaactcagtagctctatccactatcgaagccgagtatattgctgcaggacattgttgtgcacaattactttggatgcggcaaactcttaaagactatggctacaaattgagcaaagtctctctcctatgtgacaatgag

SEQ ID NO: 12058 - DNA, 566 bp, Zea Mays
ctttaattgaaatattgcacacattggtcattttatacctatgaccacgacatgtctctttcaattggtacaaatgcatatttcttattcttcctgtgttaaagctaagactaatgtgcttccaagtgtatttctatacttagtcttagattgaaacaaaaatggagttgtaggaaaaggcatggcttccactacatcttcgtcggtaccatataccctttgccctactcatgtacttacattcatatccttcttgttacagacctctagatttcttcattttttgcgttaatgccaaagtgggagaagttaataggccaaagcaaaaggaccgcaccaccactctgttttctgaaaacttatcttccaaattggaattattgcattagcaaaaccctcttgacatctatggggagaactttttcaggggggttttatttggccaaaggaaaagcatttgaaaacgagggagaatctttcaaacttgaaaatgctattgaaaaattatatccttacaccttaggctaattgcaaaagaatttgaaaagacttttccaaaagatttg

SEQ ID NO: 12059 - DNA, 572 bp, Zea Mays
cttcttgatcatgctttcttcatctccttctaaactctcaagtgacttgtaaagctagcaagagacacctaattgtgtggtgatccttgtgaggtctaagtgaccctcgagataaagaagaagcactcagctgatataagtgaccgtttgagagagggaaatggttgaaagagacccggcctacgtggcttcctcaacggggagtaagttctttggaactaaacctcgagaaacaaattgcccttgtctttgtgctaatcttgtattgcgatttgattcttcctctcctctatctctaaagttctcttccttgcaatctctttaagttagctcccaaagttatctgcattgattgagcaacccatagcaagaactctcttccgcactctgatttcattctaactctaaccccgagcaaagttcgtgttcaaggtttataattttcaggtttcgcctatccatcccctctaggcgactttcagttgtcgtctcctagtcaactagaatcgtgtaggatcgtcgtcgtcatatgatgcatttatttgttattttgtacctaacctttattacat

SEQ ID NO: 12060 - DNA, 366 bp, Zea Mays
cgaagccagggggttgctccacgtacacctcctccttgattggcccgttgaggaaagcgctcttcacatccatttggtacaacctgaaagaatggtgagcagcatatgctagcaagatacgaattgattctagccttgccacacgagcgaatgtctcctcaaagtccaaacctgcgacttgggcataaccttttgccacaagtcgagccttgttcctcgtcaccactccgtgctcatcatgtttgttgcggaacacccacttggttcccacaacattttgcttgggacgaggcaccggcgtccaaacttcattgcgcttgaagttgttgagttcctcctgcatggccaacacccagtccggatcca

SEQ ID NO: 12061 - DNA, 259 bp, Zea Mays
ctcaaacacaagggcatatagagtctttaacaagtccactggactagttgaagtctcatgtgatgttgtgtttgatgagactaacggctctcaagtggagcaagttgatcttgatgagataggtgatgaagaggctccgtgcatcgcactaaggaacatgtccatcggggatgtgtgtcctaaggaatctgaagagcctccaaaggcacaagatcaaccgtcctcctccacgcaagcatctccaccaattcaaaatgag

SEQ ID NO: 12062 - DNA, 440 bp, Zea Mays
ttcaattggtatcccattgtgttcaaaaaaaaagggggagaaagtagtatttcaaaaatgatatatcaaaaccctcttgaacactaagaggaggatctcatttagggggagttttgtttagtcaaaggaaaagcatttgaaacagggggagaaaatttcaaatcttaaaaatgcttctcaaaatcttattcatttgcctttgactatttgcaaaagaactttgaataggatttacaaaaatagtttgcaaaaacaaaacctgtggtgcaagcgtggtccaaaatgttaaataagaaagaaatgatccatgcatatcttgtaagtatttatattggctcaattccaagcaaccattacacttacattatgcaaactagttcaattatgcacttccatatttgctttggttcgtgttggcatcaatcaccaaaaagggggag

SEQ ID NO: 12063 - DNA, 1875 bp, Zea Mays
ccctggggctaggatatcataatccactcccttagaagactgatgtcctcgtcggtcaaccccaatccattaaccttccctcttaggcacatctgtgtatctagtgtcgtcatatgccatgccatgtgaccactccgggcccacatgcgccatgcgccatatactcgaacccctaactcacacatgcccgtgaaactcgcgagggtcggctctgataccacttgtaacaccccgtccattcccggaccggtggtacttactcctgacagctctctaggatcatatattgtctccacagaccaacacgagtcttttgtgcgcactttgtcctcactcatgcgcacccgagaaaacttcctggccggtcacccatcccaaattgctctaagcccaagcacgcttaacttgaaggttgtttcgatataggcccgaaaaagaagatgcaccttgttgatgagtactctattaattctattaagccttgggccaggatatcaccatcccctagggccagaatatcacaatgacgagaccttcaaccccgtggtgaagcctggtaccatccaaactgttctgactctggctctctcacgggcctagccaatgcatcagctcgatgtcaagaatgccttcctccatggcactccgatggaaacggtgtattgcactcattcggtcggctttatggactaggcgcaccccgacatggtctgcaagctcgatcggtccctctatagcctcaagcagccgtcccgagcttggtacaatcgcttttctctcacagggcttcgtgtaggccatggcggacacctccctattcgtcttccgtcgcggcctggacatggcgtacctcctcctctacgtcgacgacatcgtcctcacgacctcctcccacgacctcctgcggcgcatcatttcctccctccagcaggagttcgcgatgaaagacctgggtgagctgcaccacttctcggggatcaccgtggagcgtcggtcccagggcctgtttctgcaccagcgccagtacaccgtcgacatcctcgagcacgctggcatggctgactgtaagccctgcatgactccaatatacacttaaggcaaggcctcctcctccgatggttcccggtggttgatcccactagctaccatagtcttgccggggcgctgcagtacctcgtcttcacacggcttgacatcgcctacgccgtccagcatgtgtgcctccatatgcatgcccagcgggagcctcatctcactgctatgaagcggatcctgtggtacctctagggctctaccgactttggcctccttcgccacttctcgaccatcgaacttgtcatctacactgactccgggtgggctggttgtcccgagtctcgacgcgctggtccacttctggctatgtcgtgttccttgcgacaaccttgtctcttggtactcgaagcggtagcctgtcgtctcccgctctagtgccgaggccgagtaccgcgttgtggctaacggcgtggctgaggcggactggcttcgttagctgctccaggaacttcacagtccgcagacgaggagcacactggtctactgcgacaacatcagcgccgtctatctctccaccagccccatccagcatcagcgcacgaagcttgttgagctcgacctccacttcgtgtgtgagtgtgtcgccgtcggagatgtgcgttttcttcatgccccgactacgtctcagttcgccgacatcttcatcaagggcctccctacatcggtgtttgaagagtttcggtccagtatcaacatttaccgtggctagagtttcgactgtgtgtgtgtgtggggggggggggtgttagatgtattgtgtgtgtactagtgtattgtgtg

SEQ ID NO: 12064 - DNA, 50 bp, Zea Mays
gcaatgattgagcgaagaccgtacactccttccacgcaaacagagcgccg

SEQ ID NO: 12065 - DNA, 506 bp, Zea Mays
ttcaaataaaaaatgtcgatatctttctactctttgagtagcttttctacatcttcgttgttaacatcattgtccatcttttgctagcgaaaaaaccaaaatagagtaaggttatatttagatttctaattagataagttgatagaggatttttttcaactaaaatctatgtttctaacaattataaaggatataagaatcatgtgtttgcaattttctctctattttctgccctcctaaaagtatacattgttctttcattgtatgatttggatattgcgagagaaagatagttatgttgaaggatgtcatcatggtataagccttttatcaatttgtaaaatgctattattatatttatgtaggtcatattgctttgatgcatgaaaaacttagaaagttttgttttattttctttccaaaatagttatttacatgtgaataagtgaacataatagtcacttacgttcaatttgcatatgaacattaccttatgccccgagagg

SEQ ID NO: 12066 - DNA, 564 bp, Zea Mays
gaagtttctataagtgcagtcttaattgagtgtgtatccatatacatgttgtctttcaaaattataccacttacattaaatatatcatatgatatatcatattgaaggtaattttttgactatatcacagttgagcttgaaattggtgatcctatcaataaaatatatgttcaattaaatcatacttaagcgcgatatgctttgagttatcccatattttggtggtcgagctcaacgttgtaaaggcagaccgacggtcgttggtgttcccttcttcatggttgctgtcgtttagtagagccaaaaggaagtgagatttcaaggagcattttatggtgaataggagggaggaacacgcaccgattgatttcatgccatgaagcacaccaccagacaagcaatcgacaaggcgatgtgtgcaatggggcaagctttcattccaactaggggaataatccaaagacgtctctccaataggaggaggtgcgattcaagctaggggaagaggccagagacgtctcttcgtgaagcagtggctgcaaagtaattttctatttactctca

SEQ ID NO: 12067 - DNA, 148 bp, Zea Mays
tcttagagcatctccggctgaaagggaagtgtgcctttggggcatttctgagttattttggtgattaactgcccaagacaccactttgatctcaccatcttggtatgagcatgagcatgagcacaagttatattaaagcaaattgaag

SEQ ID NO: 12068 - DNA, 532 bp, Zea Mays
gataagttgcacttactttatgttatgtttcttgcgatgttatttggctattaacttctttgtgcaagtaaagtggcatttggacttagtttgagtatatttataggaatcatcacaaagagagccaaaaagaagtaaagtagtttggatcaaaagagccaaagttgggtcagactcggcatcaccggacagtccggtgtgcaccgcatatgttcggtgctggcctggtcggctgaccccaactagccgctcttgggtttttcttgggcgcactggatataattcactggatagtctggtgtgcaccggacatgtccggtaggctacgcggccaacggctcttcgctcgcatcaatggtcggccgcgtgatcgacgccagccacgtcagcacgccagcggtcaggagggtcacgtacatgtttggtgtgccaccggacagtcctgtgcccacccgaaaaggaaggtggccaatcagacgattcggtggtcgttgcagacagagtgtctggtgtgccaccggacagttcggtg

SEQ ID NO: 12069 - DNA, 343 bp, Zea Mays
tgctgctgctgccaccgccgccgaccctggtgctgcccttgctgctgccgcctctggtgctgcccttgctactgctgccaccgccgccgaccctggtgctgcccttgctgctgccgcctctggtgctgcccttgctctcgtcgccgccgccgctgcccccgccgctgccgctgccgtcaccgtcgccgtcgccaccgtcgtcgtcgtcctcgtcctcgccgccgtccaagtcctcctcatccgaggagtactccgactcatccgagccctcgagcccggagcgctcgacggcccggatgtacatccagacttccgcggcaatcccctgggagtcgtctgaatc

SEQ ID NO: 12070 - DNA, 306 bp, Zea Mays
gacacacactgagactgagatggaagctgatgatgatgagccgaggtggcaagctagtgctgacaaagtgacaagcagcttcagctggccaacgtaaattcactcttcctgaaaaaaaaagatttcattgcgctatccatccccgatgatgaacgtatgcggtccgaattgtttcttggcgggggaaaacctatctatccaaggaaggaaatgggaaaaaacaaaaaaaaaacaaaaagaggagcaggattcagcaatcagcagcgccaagagaaataggaaagggaaatggatggctcgctgttc

SEQ ID NO: 12071 - DNA, 602 bp, Zea Mays
ctttgttccgctaagattcctctcctgccccctctctgttgaaatcgaaacccatcattagccagccattgcatcaccactgccccccacccccacctttgccggacgatcgtgcgcgtcggaccgggcatcggacggctccgagcaccaccacaccgcgcagagtccgccgcgagctcctttcgtcggcgtccccaccccatgcacggtgatgtaagtagggcggcctagcagcgcaggccatggcgcacacgctgccggtggaaaagcaaacctcaaaacgccgcccgtcttttcggcgcctttttttgcaaggaacaggcggacgtacgctttgcgaattcggccgggggtgcggtgcggggctttgcgtcggccacgcggctgcggccctgcgggaaagcgagggtgatttgagccttttgacctcgtcgcgtccggcggcggggtggcgacgagcgggcggagccttggagcgtgctctgaatcttggggccggccggccggagagagagagagtgtgtgtcgcgtcctcgctcaatgtgaaaacatcaaacattgcgatgtattgctcggtaatcagtagtaacaggagatgtgaa

SEQ ID NO: 12072 - DNA, 553 bp, Zea Mays
cagaatgccggcccagttagcctggcaagtggcaaccctagctctcgctgccggcgtgtccctgactccctgtccagcggccaagcggcggctgcggctctctcccagtcttcatgtccgactgtccctgttcagcagagtggcggctgtggctctctccttcgctctaatctctactccactctccacttctctagtgcaaggagcaggcagccagcagtctagcaccagcaaggcacggccggcttgccgccaggcgccagcggcaaggccgcaaggcaaccagccaaccaggcagcaagcacatcacggctggcttgcatgaggattgcttccatgtgctgctgctgtcttggactcactagcaaaagttgtgtttagtgtgttctcttgctctattattctctattacgtgttatatgtgagagcgactattgtttcactgttgaatattaaatattctaatctactactgctgaatattgtttcactgttttgggtagtttgatactacccgaacccgtacctgaaattacgggtacccgaaatttcg

SEQ ID NO: 12073 - DNA, 1125 bp, Zea Mays
cgtaaatagaatccacatgttcaggtggataaacacccataaaaagaggaattaaaccgtctgttctgatctaatcgtgctgtccgtgactaggatggaccgtctgtggcccggattttccggccacagagccgaaccgtccaatcttttactggtggtacatatggtgttcaacagccctcatcaagacttgtgtaggtaggaacaaaagaattaaatagcaaaatcacctagtcctaaacaagttctaaaataagtcctaaaagattttgtttttgcaggcgcactcgagcagcttgtgcgctttcggcaggcggcatcctccggcattcactggtccgtggccctcatcgaggacgaggagtgcgactgaacagttaacctcttcaataggcggttgtttgccgtagctttctgtctacagggaggcggagggatgacagactgatgtctgagcacgacagatgggctctcccgcctcccagcatagcccggaacctggggaacgcgctgcatatacatgcaaatgcaaccgaaaagaacagtctccatcctggatccctctggtaagtggtaacaaagaaacaagcaggagtaacgagtacacagcgacggcacgaacgatcgatcgtctgcattggccaagcgtagtacgtggttcttgtaaacttccgaagacgtgtgcgcgcgcgcgcgtgtgacgggctggagtcgatgatggtctcagaagaacagaaccgggtatggctccccgatggaacagctcgccaacccgcatcgggaggtgtacagcgaacatcgctttgtcttggctctgctttcgtctgggccacagcgttctctctcctgtggagcacgttgatgacatccatccatctttcgctctttgccagtttgcccggctggaaagctagctagtcagtgctctaacaaacctacgggcggccccatgtcctagtccctggctagtactagcctactaccacacggctgatatatgatgacctcagagctcttcatccgtacgttcacgcttcacggtcacggcaacacaaagccgggccgggagcagcatgcgtgcgtgcgtggcgcggtacgtatgagccgaaggagacgagattttcg

SEQ ID NO: 12074 - DNA, 132 bp, Zea Mays
catgcgcccacattattagtttaacatatccatgtccatgacttgtgaaatgtagtcatcaactaatacatgtgctagtcatcgactctgactagggacatcatttagaataaccatacaaataaaaaatct

SEQ ID NO: 12075 - DNA, 69 bp, Zea Mays
cggacaccgcgcgatgtgcgggtgctcttccggccgctggaccctacctccggctgaaccgattccagg

SEQ ID NO: 12076 - DNA, 305 bp, Zea Mays
ctatttttctttttctgaatggcgaagttaactccgaaagcctgtcaaaggtatgaagcgtgccaagttctcaatcaagtacacaggcagaatatgaattatgaagtgctttcagttattcagaagttgaaagcaatctctatcagctacacgtatacgtaaaatcatctgccttgctctacagggtagtaaacacctgtgggagcctggagccttgtcatcttcctgtacctgcggtggtcgcaaccacgcacaaataacaaattcacggcagctccacacgctgttaaataaaaaaaaaggac

SEQ ID NO: 12077 - DNA, 179 bp, Zea Mays
atatgtgttaggatttctaattgatgtgaccattggtattacttgtgatacatatagcacatatataccactgtagtaataagtattgtgctcagataatcattaggttaccattgtaggaaaaaagagttgtacggcttcataagaatgtgatgtattaacagtagataaaaatgaac

SEQ ID NO: 12078 - DNA, 249 bp, Zea Mays
cctcgcttcagggagcgtgacaagattgagatgcgacccctagctgctgatccccatctgctcgacctttagcattctactgcatcctaggtacgtcggttcagacacgtacctgtggagtcctggttgccaactcagagggacccgtgcagctgcgcctctcttcagtaccaagactcaggagtccttcttccgggcatagctgacagctcagatcgctttgcaaacgcaccgacttctagatttacc

SEQ ID NO: 12079 - DNA, 313 bp, Zea Mays
atcatgcactgtaggtagctgccggccggccccgtccggcgattagaggccatgctatcgcacaacttacggtgctcgagcagcagcaggatggcatgcatgttatcgcacaacttgtgtggtgtaacacacgagggcccagggcaggcagcctttatagttatcaaaataaagcataggtctacaggctacacagtacccctaccacacgtactaggcgtggccggtgctcagctcagctcagcacccggccgccagccgccgcacagctcagctcactagttcagtcaccgactcaccggtgcaaaaaaaa

SEQ ID NO: 12080 - DNA, 299 bp, Zea Mays
caacatcgggatggccgatggggaggacaccggccacgcgagacctcaacaccccatgaagcagtcacgcttcgacttcaccaaggtggatgccgcatttctccccaccatcactggtcgttcgtgggcctctcctcccccacaccgtcacttgctgtgccctccccctccaaccctggtgctatcttttggatctgaccatcggcgctggttattatccccgatagttcggccctctcctctccctctccctaacctcccatcaatccggtcccctgttaggtttgcactcatcagtc

SEQ ID NO: 12081 - DNA, 203 bp, Zea Mays
ggtgcaatctatgctcaggtaaagaacaaggcgtcgaggcggatctctaggagttccaggacgtcgatgagttcgaggattaggctagtgacctcccccagtcagctgcctgtggtgggttatttacgttggccacgtttcgattctgtgtactttgattatattatgtaaatgactctagtttgtaatattattacttactc

SEQ ID NO: 12082 - DNA, 1065 bp, Zea Mays
ggcctcctctcatcccacccaagccatttcatggcaactctcccccccacacacacccactccatgttccacacaagcacacactagcacaaggatcgtttggtcgttcttcaatcgttcgtccccctgttcttagtttgttcgttcgttcgtccgaccgttcgatcgttcgtccgatcgttcatggttcgttcgtccgatcgttcgatcgtttgtccgttcgttcgtccaaataatctttttcctgccgttatgctgccgaaattccgatcgttcgttcgttcgatcatttgatcgttcatcgttcgttcatagttcctattcatcgttcatcgttcgttcctcgtcactatttaccatcactatttaccgtcactatttatcgttactttttaccgttactttttaccgttactatttaccgtcactttttaccattactttttaccgttactatttaccgttactttttaccgttactatttaccgttactttttaccgttactatttaccgttactttttaccgttactatttaccgttactattcatcgttactattcatcgatcatctgatcaccccaaatttcaactactcatccatcatgctgtccagtccgcctaagaccagccagacccatattccagttatacaaactccggtgactgtgattttccttctagtaggaacttcccatctggtcacccatcctaggtttctccaagttgagcacgcttaacttgagattccttcgaaccaggcttccaaactcagattccaataattctcgtttctaaattcttatcgaattattccctatccaaccatgtcatcccataagcatggttcataatccagaaaactcctaaaatactcttatcccatattctgcctataatctctctattcagactaagttagacgattcattcgtcactattctcaccaacagtgaacttcactgtgctacaccacatacacctagctataaatacactcagctaccctctccctctccacacacactcaacaccctcagccaaggcaaacacccacccactcag

SEQ ID NO: 12083 - DNA, 1579 bp, Zea Mays
ctataaccaagttttgtggctatttagtgttgaattttacaggatcacctattcaccccccccctctaggtgctctcagcctcgctcgatgatttgtttggagcctttgatcatcaattcaaagctcacaaactttcctataacctcctcgggagacattagcttgtatctaggatcaccacgaattaattgaacttgtgtaggattaagaaaaacgagtcatcttagaataaccttgaccatttcatggtcatcccattttgtgctcccgaggttgcgcacttgattcaccaaggtcttgagtcggttgtacatggcttgtggctcctctccttagttaagcatgaatcgaccgagctccccctcgatcgtctcccgcttagtgatctttgtcacctcatctccttcgtgcgcggttttgagcacgtcccaaatctctttagcactcttcaacccttgcaccttattatactcctctcgacttagagaggcgaggagtatagtagtggcttgggagttgaaatgccgaatttgggcaacttcgtccgagtcatagccttcgtcccccggcgatggtacctgcgctccaaacctaacaatgtcccaaatactagcgtggagtgaggttaggtgatgcctcattttatcactccacatgttataatcttcaccctaaaaaacgggtgctttgcctagtgggacagaaagtagaggagtgcgtctagagatacggggataacgaagtggcatcttactatacttcttgtgctcatggcgcttagaagtgacggacggcgcatcggagccggaggttgatggcgacgaagaatcgatctcgtagtagaccaccttcttcatcttctttttcttttcgccgctacgaagcgacttggcatgtgaaggggatcccttcaccttgttgccggactctcccgatggagtcttcccgtggcttgtggcgggcttctcgccggtcacgacctccttcttggcgtgatctcccgacatcacttcgagcggttaggctctaatgaagtaccaggctctgatacaaattgaaagtcgcctagaggggggcgaataggcggaatctgaaaattataaacttaagcacacactacaagccagggttagcgttagaaataaaatcgagtccgaaaaagagggtgaaaacaaatcaaaagaaaatgaagcggatgacacggtgatttgttttaccgaggttcggttcttgcaaacctactcctagttgaggtggtcacaaagaccgggtctctttcaaccctttccctctctcaaacagtcacctagaccgagtgagcttttctccttaatcaaatgggtcacttagacccctacaaggaccaccacaacttggtgtctcttgctttgattacaagtgtcttgagaacaagaaagaggaagaagaaaagcaatccaagtgcaagagctcaaagaacacgagcaaaactctctcttctagtcactaattgctttgagtggaattgggaattggagaggctttgattcaatctaattatgtcttgtattgaatgcactagctcttgtattgagtgag

SEQ ID NO: 12084 - DNA, 192 bp, Zea Mays
ggaaatcttattagcaaattttacaagttacaaaatttttacattatatttatcggagtgattacagaagtataagtttgaaatatatgctagctcaagtgacaatcctcaataagaagtattgaagagttacttataagaaggccgagcccaccggcacttaacaccatcatcagcagcacaaaactagaa

SEQ ID NO: 12085 - DNA, 272 bp, Zea Mays
ggttagcccgcacttggggtcgacttggctcgtcttccgcatcacgtgattatttaccgtacctcatgagatgcatgatgcatatgtatgagcacgagtataaatagtacaagatagataatctacgctagaaaggatgaaacacttaaaactaatcgttaagcaccatggatatcacagcagggcatcgactacgtccattaaccaaattaacataatacactagaaaatctatttttattcctagctttttattaactctttaaactatg

SEQ ID NO: 12086 - DNA, 356 bp, Zea Mays
aatcaacttaccctgactaattcgacgcgatagtcacaagcacgacgacggtttccggttgacgtctttgatcacacatgtctggcgagtgatgtacatagcttcacttctcgatcagatacccatgggatttattttgtcgagctggtgacgtgtggccaacaccgagtgtcttcacgacttggggacttggcgtagacgaggatgacgctcgacgacttgttcgcgcacttggtgaataccatgctgctagcttcgtcttcactcgattcttgggatttcttgctgacgcgcagaacgacgatgagatcatgtttggagcgagctggtgggtggggattgagcaggggatgacg

SEQ ID NO: 12087 - DNA, 545 bp, Zea Mays
agtcggtcaatccccaggcagccacccggacgcctggagccagccagccacccgcgtccctacgcgccgtcatcctcatccccacgcaactgaggcaagccacccgcgccgccgccggcccgccgtgcccctggctccctgtgctgcgtcctgatcctccctggtatctgtgctgcgtcctgcgtccgccgcgccccatgcgtcccgcgtcactcgtcagcccgccctgtgcagctgcgctgagctccgccctgctctgagccgcgggagcacggcgcgtcgcccttcaggttcgcggacgtggaggagctcggtcgtgcgtgcgaggtcgtgtgctgactgctggtgcatacagcagagcaaggcgctcaggagtcagaccaaccatgggacatgtggtgcgtgtagatgctagagggatcgggatcgctggtcgtgggcaccgcgcccgtgccgaggttcctcgagcgcttgtgtgcggaggattcgtgtacatcctgaacatatccttgtaaaatttacttggagaattcacttggagcgcg

SEQ ID NO: 12088 - DNA, 1371 bp, Zea Mays
gaaggacagcagcatctgctattggtctgcagcaacagtcctttttggtctttgctttaggacagcatctccttttgtggagccgtaggacagcaggcatgagagcacctttccttactgcaattttgactgctttaaggacagcaggatgggtagaggacagcggtacattgctgcagttcttttgactagaggacaacatctttgtgtagtggttagtgcagtttgtaggaagcatatgttgcagccccttggctataaatatgcatcccaacctttagatgggtatggcattgtgtagtgttttgagaaaataaacagaaaattgtcccaactcgtagtgtcatcctctcgatgagagtaagagtctcgttgcttacacatatgagggtttttatctgtcttaagagaagtacattctggatcttcttgatcgggcctctcttactgatagcggacagttgaggctcctatggaactcaatattcatctatgtgccacggatggtgagcctcttgaagaccctaatcattattgtcacattgttgggagtcttgtttacgttggtgtgactcgtcctgatatcttttattctgtacataatctcagtcagtttgtttccgcttccactcagcttcactatagtcacttgctttgggttctacgttatcttcgtggaactatatctcgtcgtttgttctttccacgatccaactctttacagttccaagcgtactatgatactacttgggctagtgattcctcttatcgcccttctctttctgcctattgtgtttttcttggtggttcttggaagactaataaacaggcagtggtttctcgttcgagtgtagaggctgagttgcatgatatggctcttgtgactgcagaggtggttgcttgaggattttggtgtctctgtctgtatgtcgactcctcttttgtctgacagtacaggtgctattggtattgctcgtggtccaatgaagcatgagcttaccaagcatattagtgttgatgctcattatacacgagcataggttcaggatggtgttgtttctcttcgatgtgtcctcagagcttcaactggcagatttcttcaccaaggctcagcatcgagctcagcatcggttttatatctccaaactcagtgtttttgtcttcttgatccaccttgagtttgagggggtgttagagatatatgtacttgtttatatttctccattgtataaggggttttatgcatatttgtaatctcatgtacctctatatatttgggcctagagccctcataataaatatgatctctattcatatcatgtgcaacctatgtggcgccaggaatacttctcggctgatgtcatttttaag

SEQ ID NO: 12089 - DNA, 548 bp, Zea Mays
caaatttaagccaaaaggaatttaaccttcatattggcatttctttccataaaatagattattaccaattgaaaggatgccacttgaaaggaactattattggtcacataccaaatgaaatagtaaaagtctgcaaaaataaagctgaaaaggtactgcagaaaaagtgaaaaagcaattgacgcgttctgaaaaggtgacctgacgcgacaaaaaaatgacggaaaaagtgctgcaaaagttgaatgaaaaagtgctacaaaagttactgaaaaggtgctgcaaaagttgctgaaaaggtgctgctgcagactgaaaaaggcgtctgaaaaagggctgacgcagtctgaaaaaatggtcagactggccggtcaaactgtgccagaccggttcaaccggtcctggacaccggttcaaccggtttcagccagggggtttcctggtgaataccagccgaactgaagttcaactcagaagttcagctggtctccccagctgagctagaaagttcagctggtcagaccagttgagcttggaatgaaaatttt

SEQ ID NO: 12090 - DNA, 1623 bp, Zea Mays
agacatctgagctctgaagaaggactcctgaatccgtgtgctgaaaagatcacctgctgcagggtctctctgagctggtagccaagactccacgggtacgtacctgaaccgacgtacccgtgccgcagtagcacgctgaagatcaaacagacgaggatctgaaaccagaggacggacctcagtctcatcacgctcccggaatcgaggtggagggacaggaggagctgaagcgggagcgggagcaggggaagcagtggaagctggcgtagtggaggtagtgggtatgactgtggaggtggatggagcaataggagtgatgggagcaggcagagtgggtggcggagtggaagcggaggtgtgagtggaggagcgaggcccgggaggtgagacgacgaacacggaatgcaatctgatcggatggagtctgcggctgatctccaagctcggcctgcgcagcggctgctgcagctactgccgctgcacgggctgctctgtccgtacgccgcttcttgcggccttcctgctgctccaaataaacagtcttgcccttgacctgcctgaaggggcgacgaggatcctcatcatcgccaccccctagcgccgacacattcttcgtgcgcggcatcctgaactgatggctgcacatgagagagagtgactaagcacagagcaaaaatgaccgatagattgagcaaagaatgagatgactacctggaaagctcacacgagaggtgacgatccaggcaggacgggagacagcacacggtcaatcaaggtcactgaaatgacagaagaggtgagcacgtattagtcacatagtcataagcatatgaaatgtgaataaatacatacacagagagatatggcacagaaaacacgagacgatcgagaagtcaaacgacgtgaaaacgacgtttgaaggataattggtgccataggaggtttggaattcgaattgaggcacgaaacgatatgggattgagccgatacttcacgaatgggtttatataggtgaatatgagtgaagtgtgtgcttggtttgaatttaggcgaagaaaaaggaatttgggcactcggctcggaaacgatcgctctaaacgggaatttggtgaaatttaagcctggaatctcggattggcgtgaattttggcaagtaggttactggaagtgttgtaaaggtgcctgaaaaatttgggttcaattggagcatttttggctggtttggccattttaccgaacacgtgatgggcgtgatattagggtttcggagaaatggccatatgaggagtgaaaaccctcccgaaggagccaagaacctgcagggatacacactagagacaattgaacacattccaccaactggattcacaagatttgacaagaaattgagagatggacaaggggtggagacttgagtgccacactgccttccaaaccgagagcaggggtgatagagggaaggagagggggaaggactgctcaccggagagggaagggatcatggagagcaccaggtcgccggagagacgccggtggggggaagatcgccagcggagagagggagacgccagagacagtgagcacggctggtgggggagaaagactgagcctttggttcagatg

SEQ ID NO: 12091 - DNA, 530 bp, Zea Mays
cgttgatgtgcatgtacatttcatgggcattgatctttcccaaaatttgtgtaggtgtggtaactgaaagatccatttgatgtagcacagtgacaatgtatccatatttgtctattgggaggacactgagaatcttccttacaacatccggttgtgagatttgagtaagccccaatccattgacttcctctacaagaatattaagtcgtgagtacatagcgtttgcattttcattggtaagcatttcaaaagaatttaactttcgcatggctatgtgatatctttcctcacattcacttctagttccttcgtgtagagcacaaatgtccatccacaaatcatgagcatttttatgattccgtactctattgaacacatctttgcaaaggcctctaaaaaaggtgtttttggccttcgcattccatttctcataattgaactcatcacctacaagatttgtgggatctctaggtttggggaacccttgtgtggcggctttatagacaccaatgtctatagcctctaagtat

SEQ ID NO: 12092 - DNA, 1753 bp, Zea Mays
cttgtaccttcaggctattgtacgcaagactatccgcaagatcgtccttcgtcatagcgcataatccagcttcaagcttcggaaaccccatacttctagccatttcccgacagacggataattctttgttgtctgggaggcagtataggaaatcatcttcgtttgtcccattgaatactagtgcccccttcggatatttcaattctttggcataatgattagcttcaaaaacttcttcttccgataactttttccccgaagcatgtcacacgatataatcgtatattttcgaagatgcttcgggggcagcggtatcaatttcttcaaccaaagttggctctgacattttcatttttccggttgcttttgcaatttttgtttcttctgctttcaaaggtattaccttggttggttctgaatgcccggtttcaattccagtctgttgcttcggagtttcagcaacggatacttcaacaagtgcctcagaagttccagaagtcttctttggggttgtgcttggaagtttaattgtttccaaaacatctaacacattaaccattctttttctttttggggtcactgttggcccctttttaatttttgctgcttcgatttcgtctgaaggacttaaaatttctgatattttcattccctcagatgatgctttcgcttcttctgtctttggttcttccatcttttctgtcgctggcacttcggccacttctttgacttctggcagcagggttggctctttagcttcggtggccgaagaggtctcaccggcgaactcaggcaccgtggctggttcgatatagtgtggccggtgtgtgagaacctttaccctttttctcttcggcgctggctcgctaggagcagctacaacagtttctttcgcagcagttgcgccttttcttttttgcccccgcactggatagcgatagtcggggtagacgaacccgattgcatcaaacactcggttgagtcttttcttttttcggcctccgaaggccgctgacaatgcagtgtcttcggctttcgaatataccataagcagttcatcacttacagtctcaatgctctttaaccaatcatcatctggttcaacgaacttgtctccgtacttgaatgtatacttcagcctgactagcccaccttcgtcagtctctttaacagtttctttcggcatttctcaattatctgcaagtggccacactctgaaggcaatatgttcttgtattaaatctcttgtcccaataaaagagcagactatgccgaaggcccgttggcattcttcggctacttcatccatttctaccttcagtttctggagtccaaagcgctgccagatagggcacatgataatatccttaatatcttctcgaaccttcaaatcattttttacatagaaccattccttcgtccattccccgggccatctcttccggaagattggcacgggacagcttgatccagagcgagcaccgaagctgtaacagccaaagttgttatgatattgctctttgccccagggtttcgtctcatataataactcatgaatattgcaaaagcttctcgcatttggctctaggccctggctcttcacggcccagacgaagactcccattcttattattgcttcaggggtaagttgatgaagataaacctgatatattttcagaacttctaccacaaacttgcttacagggaatcgtagcccagctttaaaaaagcttcggaagataacgacttcatt

SEQ ID NO: 12093 - DNA, 437 bp, Zea Mays
attcaatgaagcccagatttttctcctcagaaaggctcagcttcatttcggcagcaatcttcttctcctcagacatcccttaagaattcctgcctctcgcttccgaagcttaaaactagggaggcaaccaaatatttgtgggcagaaagctatttgagcaggcaaaacagatggcaagagagcgtgccaaataaattgtggcgagcccctatttatacacccattatgtcgaaaactggagggtcccgcttgtcaatgactggttgctattctagcaaaggaaaggtgttttttcggaccttccggcttaaggccttcgtccatatcgcaatatgaatttttcagtacaacaaactaatattgcgaggggctactgttgggggccttcggcttccgaaggtcctcaaaaacatgatttaacaatgttttccaagtca

SEQ ID NO: 12094 - DNA, 229 bp, Zea Mays
tataaatagatgaacagtactcccgtactgttcacgctgactcggcatttgcttttggtgccatacttgtatttttactccttcaagccgaaggtacatttataatttaatattgtttgtacaaataaaataaatggaaatagattaataataatgttcacaaaagattatattattttctgtactttatatgaatgttcttcatctttcatcatgatcatgaagacat

SEQ ID NO: 12095 - DNA, 551 bp, Zea Mays
ccacgatcccatcagcggctttggaagaatccaaaggcgagcgagcggccggccgggggggcaagaaaagaatcggcgccaaatgggtaccggccaggggcaaggaaacgcgggggaaggcacttcacttcagcgcacttgggatgatttttttttttttttttgccggttctcacgacacctcgctcgtgcggcgcggagggcatggcgccgtgtccgctgtcgggcacgggcaagaaagtggccattggccagccggggggtcgttcttaaaatcttgatgtgaatgcgatacgtactgtgatcggttgttgactctgccatctcttggcgttgttttttttttctactgctcgcccagtcttgccgatcctcatctttggacagctatcaattgccacaggctctactatagctcgtggtatcgtacgtacgtactgaaggccccggcggggttcacggtttcacaccgactcgctcgacccctctcatcagcaaagtcagcagcggcgtgggtgcactgccggattctgaccactcgtaggctcgtg

SEQ ID NO: 12096 - DNA, 488 bp, Zea Mays
tttgccccttcctccactcacgctcgagttctctctgtctttgccgacgaccgccatctgtgctcctcttctcctccattctcggcgccactcatgccctcgccggcagtgcggtcctcagccgccggagtgcgacgtcaaaggtaccgccgtcgaggtcgaagatgaggacatgctgctcgatttcctgtcgagcccgcaagtgatggcggcagtggtgggctcgttgacgatgcgcatgacggtgaggccatagatgacggcgacgtccttggtagttctcagttacagatgtttctaggtttgtcggtatgatacatgcagtagattgactctggatgttcctatagatagtttactatttatctagccctaaatttggttaacaacgcgggtaataacaatggtcctatggcccgttgctctcttcttggccatgcatgtagcatgcatcactatagagtaaacaatcatctcaaacatgcttt

SEQ ID NO: 12097 - DNA, 290 bp, Zea Mays
ctgagcagaccacaatttttcagtgatgtttttttttttcaatctgagcagaccacaatttttcagtgatgttttttttttcaatctgagcagagtacaattttttagtgatgttttttggttcaatctgagcagatctcaatttctcagtgatgttttttaatctgagcagagtacaatttttcagtgatgttaccaagccagtttggaggaacatcattagatgtggcaaccctggcttgttttttcagtctgagcagagtacaattgtttctcattcaacaattttt

SEQ ID NO: 12098 - DNA, 228 bp, Zea Mays
agcctctccgcatatgtggagggaggcttgctttggtttatcccttccctaaacacactaatgtggaagcctccagccctaggtctgtactttgaagaaaaaaaatataaagatatgatatgtttaaaccgcaattgcaaaggtagtaactacaataccagccaaaatcattaccttcaccaacttggatttgattatctcatgaaaatcatgagttgcggagatgag

SEQ ID NO: 12099 - DNA, 620 bp, Zea Mays
accggggcccacaggtcagcggtacactgcgtgagggtcggtggagcgcgcgctggtgaggccctagacgtatgtcccacatggcagcgacacccacggggatgcacacccaggtttggccgacaaacatggcccaccgatcagtgtgtaggtggtgagtggcttattgcgggagaaaaactcggaaatgggccgcgcagggtttgcttctggtgggccgaaataggtatctcgagcccaatacgccatcctctcacttttcttttgtttttctttctttttcttttgttttttttttagaattcaaagttgaatttgaatttggttatgagattcacctatgagtccattatataaattcaccttattgtaggaataatatattttttttatttactcattttttttccacataatatttgctttcctctctcttctacattctagaattttcctttagatcttaaattccactttggactttaatatttttcttgtcacatttattattttattttgtcaccatgtgcacacaaaagaaaatcccagcatgatgcataattttaatggcatatattctttttattaattatttgcttttgaatatggtgttcacctgg

SEQ ID NO: 12100 - DNA, 462 bp, Zea Mays
atgaggctggggagccgcgccgccgcgacgggcatacgggccactgggacgccgagctgccgaggggccgggggggctgccggcctgtgacgagctgctggagccacgcccgcgcgcgctggggagccgctcctgcgcaccgccggggtcggggccgatcgcctggccgctaccggagggccgcgcccgcgcacaggccgggggacccgcgcccgcgccaccggggccgcggccacagccgccaccgcgcaccgcggatgcgcccgctgggccgtcgtgcccacgagccgcgcttggctgccagaagatggtcgccaacacctgtgaaagcagtggctggttagggtttcctaaccctaattgtcgcccctaatgaggccgtgcaccctgtgcttatgggctgccatccaggcccatgtgcgcccccatcggcctggccaaaatggcccacccccagcaaga

SEQ ID NO: 12101 - DNA, 344 bp, Zea Mays
agggggagtgttacaaaacattttatacatgtgatctaatccatccatatgtcgtagtgacagttatttcccaagggacacaccccttgggaactcttgtatatatacttcactactctgcaataaaggatgcccctgcgatttgtctttgtctctgttaatctccatttgccactgagcgttatgatagagttcaacaattatgtgcttcctgccaagcagcaaataaaactggacagcactacagcagtgcacaagtggtgccaccagatatggacctcgagtcctggacgggggttgtggtgatgagctgggcagtccaacacactccaagctgctgatta

SEQ ID NO: 12102 - DNA, 112 bp, Zea Mays
tgaaagggaggttcttcggaggtaccttgtgcatcgtacgtacgtctagcaggctgctaaacaacaaggtttgtttagtaggacgaacaacaataattagtgtgtggaagtg

SEQ ID NO: 12103 - DNA, 820 bp, Zea Mays
atcggaggccgtagatgtattgatctcatcaagatgattccgatcaatcactagtttgccttgtttggagtccggatgagtctttttgagtgtcggttgatctgagccattggatattaggattgtggaagttttcttctatttatacctccctaaccctagaagccacgtcctcccacccctagcagccgtcacccttttatgccttgccccaagagaagagaggaagaaaaaagaagagaagagaggggagatgagggcataccgtcgcccatcatcgtcgttcctctccaagaattggttggatttcctttcctctctctcttttatccacttgatgaatgctttcccttgttttggatgagttttaggccctgcaattagtttttttggttagattggatgggagattagattttaatctcgaaattagtttctgcagaatggcagattcaatagtttctgttcatgctagttttccgtggtcttagtgacctcaaaaaaataaaaagtctatctatgagtcgtagataatttgtagatctttctgtggccgcgaagaacacctcaatcggatatcagatctgaaagttattgcaatttgattatagcagtttttcagtctcataattctgtacagaatctgttctcttaagctttaggcaattttatcaacagaattaaactttaggattgtaaaagaagttgtagaaaatttcataagctttccagattgttaaagagcgtattcatatgaattatgaaagtccagttatgtttgttttactgtggctgttcctgtttgcctggcaaaaatgag

SEQ ID NO: 12104 - DNA, 240 bp, Zea Mays
ttttttttgcaaataaatcgatattgaatttgtctgattttccaacactggtggggcaatacgggcgcgcctggcgtccgccggccgagatgagtcagtggctgccccaccggagttgctttcaggcaggaggaggacagggatggacgagcaccggctcgccacaagcgtacagtacaggtacaaatccatatggaaagcgggaaattctgctactactgctggtggtatacgtcgttt

SEQ ID NO: 12105 - DNA, 688 bp, Zea Mays
agccagccgaggccgcgttcaacgcctcacaccagctaggcagctaggccgccttccgcccttctctgcgccggcttccgacttccgattccgagacgaccggggaaatttgatccatcgccacagcggcagcgagccaactagccaaggtttctgtgcgctcctgtcccctcccccgttaccacacgcacgatcgacgtgctcccgtggtgcacgcacacatctagagcttgttcgttctcaaaatgtcgccggcgaagagctagctagccacaaagagccggcagtgtcaataatgccagactcgtccagattgttcgaaatagctttctgaacccccatcacttccttctcttctcccatacaggtaaagacgattggaggaaaaggcgaggcgaggcatcgtgttctttcttcttcataggccagtgcgtggccacgggtggagtggaggtggaggggtcccctggctctgaatcatccatgggacggcatctcttagccagcaagcaaaatgtccacgttggctcactttcactcatcaaagttgttttgttactagctaggcgggaaagacgcctcaggtggcttcgcaaagcagttggctatatattctgaaaagaaaagaactttattttttttgccctgtagacaagtgcgtattgattgttcagagatttgtaacaga

SEQ ID NO: 12106 - DNA, 243 bp, Zea Mays
caaaaatcgtaaaaaataaatgtctactatcgaaaataatttattttaacgaaaataaattatttcgacgatttttggtacaacaacactatcctcaaacatacagaatatctgacaatgtgaccatcccaatgagcagtacaccgaccatctagtccaacacacttgattcgtcaaccatatttcctatacttggaaggaatccggctcccacgtgcgtcctgatagtcgcctagagggagg

SEQ ID NO: 12107 - DNA, 2433 bp, Zea Mays
agaaaactgcgctgagacaaatactagctgcagcggcatactttaacaactacgcccctccgtgccccgtgtacaggctgcgtctagtgcatcatctcgctattttcgccgccaccgccggggccgggagcatgctgctgttgccgtccgggacgacttcgcaggtaaggccgacttgtccccgcgcgccggttgtcgactctctgctgccgtcaacgcatggtactcgtcaccacctatctccagccagatccatgcttgttcagatcagttcctccaccctcccaagtcccaaccccagattgggggctacagcatgtgctcgctcctccgctgggccatcaagctcgaggaaggagacccagtattgccactccgccattcatctgcgctcagctcgtggaaggagagcaagacaccagagtggaaggagagcatctgcccggcctcaagcccaccgttcgagctcgccgagtgctcgttctcgagcgcatgtcccttcatgtagggccgcactcctacctagattggctaccgtcatcgatgacagtggccgatcttagtgctaacagaggcctcgtctctagcaggagccgtcatctgggctacccgttatcaccggacacgtcgtcgtcaaaagtactccctcttcagaccatattgccaatgtcatcggatgttgttgcaaagagcaagtcaaagaggagctttgacttcgagaggtgggctcggccaggtgttatcgctacctcgcacatgatcaccaagttagctcacgcaagaactttcttccgttgcattcggtgtcgctgccttggtcatcaggagcggcattgtcactttcggtcttcctctcgtgctcgtcgagttaagtcctctgtccaatgtgatcatcctgaacaatcagggacttggagtactgaggtagtggccaagtcttcgccaagtacgttgttgtcagctgacaccgtcgccaagtctcaatcacatggacatctcaatcccccgtcggcttctcaaccatcggtttccgtggtgaggacgacgatcatgtttgtcgttggtgttgtgcctctcttgcctcgacacctttgcaccttcattccttggtcacccctttggccgagtcgttgcggttagagtttcaacatatgttttcagcttgtttgaaggaagtgtttcaacctgtcaaggaggaggcttctatcatcaaggtgtggctaccatgtgtggccaactatttggatcatggggaggcgcatgagaagcatgcttctgtctctgacttgctcgagctctttggcccatgttctccagtgaagcaagattcaccatcgtctatccttgcctctctcacgttggcctgcgcgactatcgactccttggtgtgtccggacaccagtacaaacactgcagtctctgtccttggcgagatgcccactaggacctctggtacaaagattcatagagaagagattcatagagagacgaaccttaccactaatgaggtgatggaatgggcatttgaagctaattctcactgaatgatgtccaccgagtagaccattgaggtgcctttagatacattcacgttgctttaggttgtcacctctgttgaggatgttgtggtggaggatgcattagatgaggatgaagctactttggttacgcaaagttcttttttgttgtgtgctcgtggtgtcagagctgttgtgtgttcctattgctagggtgttgctgttgttggtagggttcacatagtttttgttgtagtcctctttcgagaggttgttgttgcctgatctaaaatcagggtttaggccaagaacaacaagaaggctagctagagtaactatatgacattttataatattgtggcatgaagtaagacgactaaggggctgtttggtttgctgcctaacttgccatagtttaccacgcctaaggttagacaagtttgaccaagttaggcatgtgtttggtttgaagccatagttgtggcaagatttttctcctgctacgtaggtcccactcgtcaatgactaataaaagtgtggcaagattctcttaggcgtggcaaactgtggcgcaaaatttgagtgcctaatgttgagtttgtgatccaatttctgaagaaggcggccaagttggcgagcgaagcggaggcccgtcgccgggaggcttgggccggttgatgatatgttgattgctgccaagagcatgaaggaaatcactgctttaaaggcacaacttagtagcgaatttgatatgaaggatctgggttctgcaaagaaaatccttggcatagagatagtcagggataggaagtctggactgatgtacttgagccagaagaattatattgagaaggtccttcgtcgtttcaacatgcaaaatactaaacctgtgagtactccgttggctcctcatttt

SEQ ID NO: 12108 - DNA, 228 bp, Zea Mays
gtttaatggaattgaatatgtctaatcacttattttagcaactgctaggataatgggacattgtgttgtgctacaaaatatgcactaggacatttcatcctgctgatttcatcctactgcttttcaaactccttcaacgactatagaattaccatgaaacattgcactaaactcatgaattcgtgtggacatacttgagtatcagtcaatgttgaaacttgatttttt

SEQ ID NO: 12109 - DNA, 331 bp, Zea Mays
aaaggggctggagccttgctgatggagaacggatcacatgcgcgtgttctaggtgttggtacagtcattctaaagtttaatttgggaaagacgatgctattgaagaatgtgcaacatgtcccctccatcaaaaaagattcttgttagtggctcattgctatgttgagatggttataaactcgtgttctagtctaataaatgtatactgtcaaagtatggtacatttgttagaaaaggctatgccagtgaaggcttgttccgcttatctttgcatgatgtttgtaataagtccgtaaacaatgtgatttcgatcgagtcgtatatttgacat

SEQ ID NO: 12110 - DNA, 83 bp, Zea Mays
acgagttctatcgggtaaagccaatgattagaggcattgggggcgcaacgccctcgacctattctcaaactttaaataggtag

SEQ ID NO: 12111 - DNA, 451 bp, Zea Mays
gagcggagaactcgtgcttgatccctttgtggcagaaccacctggattattccagcttaagtgcccaagtcgcacccttaatggcagcaacacacttaaacaggaataacccgtcagtccctcggatctagtccgataaagccacttatccaggatcgaataccactagctcacacgaaggtgaggcacagagaaatacaataaaacataataccacaaatttaataagtatcattagtgattatattatcggagtttcataaataataatcataaatttaaatgcagcggaaataactaatggagaaaatcgagtaacatggcgaagcctggccacgctactcctcctggtcctctcctgcggaagcagtaacccactcgaccgtctatcccggtggcagggatgaaggccaagtcacaccatcaaccaaatcaaggaggtacctgcaaa

SEQ ID NO: 12112 - DNA, 113 bp, Zea Mays
ttggacccacacgtcagcctcacaaacaccttcttcaaccttcagccagccagccaacaggcaaggaacaggcacaaaacgcagggaagaaagaaagggagggaagatccctg

SEQ ID NO: 12113 - DNA, 128 bp, Zea Mays
tacccttcgccttggacccacacgtcagcctcacaaacaccttcttcaactttcagccagccagccaacaggcaaggaacaggcacaaaacgcagggaagaaagaaagggagggaagatccctgtgcg

SEQ ID NO: 12114 - DNA, 302 bp, Zea Mays
ccggaagcagcccagccaagggggggagagtttttctttttttttcctttttctattttctatttctcatttataatttgtatttatatttctttttatctccttttcttttgaacaacaattagctaaataatcttaggtgctaaaaataatctatgtgaggtgcttctaacaatcaaagtgtatgcacatgatgagatgacctaaagggtggagtttagggagagataaaaataaggggggttaggagattagggttctgtcggcgtttcgagacaggggggtccctaagtcgacgagtg

SEQ ID NO: 12115 - DNA, 418 bp, Zea Mays
cttatctcttttgtgacttgtgtagccactaaggaaaaagaagcacttgaggatatacattagttgttgattatgaaataaacgtccaattggaagatgaatgaatattatcatatggtcaacaatccaaaattatgtgatgtattctctatctagttaatttggatttgattcttctatattagacactcaccataatatggattaagtcagccctttagacctcattgaacaaccatgcatattatccatgtcattcaaaatatattgtgcataagggctcaagggaaatttagtccatattatgaggtttctctattttagcaacacgcttgccttccacatataaagggttgctaaataagaaactagtgcttgtgctactaatgccatctcttgtgttgagtttatccataga

SEQ ID NO: 12116 - DNA, 337 bp, Zea Mays
ggccgcagcactcggagagcacgagccgcgccattgccggcagcggggcggggcggggctacgggtggatggccctggattggctcctagtctagagtccacacaccgtcgccgccgccgccgttggttggcacgggatcttctgcgttcggggggatgggatggggtttgggtgtacggtggtggccgggcttgccaggacaggctaatccaagaatatacattttataccgcggcgcgcgagccggagtggcgatggggggcgggaccgggagggacgcggtgcggtggactcggacctggaccagcactgtggtggaatgctggaatgtgggtg

SEQ ID NO: 12117 - DNA, 514 bp, Zea Mays
ctgggacatcgtggtaggactaaggaaacaggcgcaaaacagcggaaaaacacacatcaaaaggataaaattttaaatacttagtatccaccaaatccttagcatacattacaaaaatttaaaaattcccacagggatggggccatgttcatgctgtcggaggaggtcccacaggagactccgcagcggttggcgacgggggaggaggcaacacctcgacctcggagtgacgagccagcaaagtctccggcccatcgacagcatcgatcaacctctacgcctcagtagcagccaggtcgggctcatcggggagcacgtagtcgtcgcacatccactcgaggtcgatctcgtagtgtgaggcgaccatggccagggcccgcttcaccccgaggtggacggcctcgcggagctcaccccgtacgaagtcactcagggcttgcatacgaggccgaggggtccaccccgaggcacgcccaccacgtcgaggtcctagaagaggtctgccaccgcctcg

SEQ ID NO: 12118 - DNA, 324 bp, Zea Mays
cttttatgtataagggtgagacatctagttctaggcaaccaacccgtgctaagttgcctaagaagaagactcctattgcatcaaatgatcatgacatttcatttaaaactcttgatgcatcttatgttttgactaataaatccggcaaggtagttgccaaatttgttgggggcaaacacaagggctccaagacttgtgtttgggtacccaaagttcttgtgtctaatgccaaaggacccaaaactgtttgggtacctaaattcaagaactaaaattgtttttgtaggtttatgcatccaggggcacaagttggatcatcgatag

SEQ ID NO: 12119 - DNA, 450 bp, Zea Mays
atagatcaaaaccctctagaaccctaagaggaagatttcatttagggggagtattgtttagtcaaaggaaaagcatttgaaacagggggagaaaatttcaaatcttgagaatgctttgcaaaatcgtattcatttacctttgactatttgcaaaagaactttgaaaaagatttacaaaagagtttgcaaaaacaaaacatgtggtgcaagcgtggtccaaaatgttataagtaagaaacaatccatgcatatcttgtaagtatttatattggctcaattccaagcaacctttgcacttacattatgaaaactagttcaattatgcacttctatatttgctttggtttgtgttggcatcaatcaccaaaaagggggagattgaaagggaattaggcttacacctagtccctaattaattttggtggttgaattgcccaacacaaatctttg

SEQ ID NO: 12120 - DNA, 999 bp, Zea Mays
ctgcaccaaaatcagctaggtcgcaacgcaagcaaacacactaggcgatgctccgaacaagcttcgctgcgctgcgctgtcccagtctcggcagctgtctcgcttgcatgcagagcactgcaataattggcatggaacgacaaggctctgcgtgagacgcgagcatgctattttaatccagtctcggtggccatgtagtaggggagtgaggaagcaacttgcgaggcatcatcgcccatgtcgatcgttacgcagaggcaggcaaagggcaactcgctcctgcaactgttgtgtactaccagttcgttcatcctcaggcatcgcccatgctgatcgtcaggcaggctgcacccaggggggaggaatgagtgcgaggatcactgcaatgatgcggcgtgactgaaatcgcgaagcatatgaggccacacgccggggagggaggaagcgttgttgacggctggtttgataattgtaggcactgattctgttctgctgcccactagtactaatcagttgtatatctgtgtagtctatgaatgcggttgtttgccgtgcacacacaactttctttatcttttttcttttcttttttgctcggaatcaatacttagtttaaagcctttcagctcacgctatgcaggtggcagcatagtttttatatatacataccaaccacctgcatggtttttatatatacataccaatggccgaaaatgacatgaacaaaaaaaagagtagcagagtaatactggagttgtatgcagggcagtcgatgatcgtggaagagagatgaattattatggagttattaatgacatactcgagtacaactttgctggtagcaaaaatcttaaggtggtgtttttcaaatgtgattggtttgatcctaatcaagggagattcggaagatgtagtaagtcctaacaaaaggaaacggaagtcaaggaagaaaacatcgaatcgaaggaaacaatttgatcctgatttcgaatacgacta

SEQ ID NO: 12121 - DNA, 216 bp, Zea Mays
gtccaattgccccaaggacatcggataaaccacttacaaccagaaccgcgggattaagtaacacaaatcacacacacaacatttttgcagcggaaatcttattaccaaattttacaggttacaaaaattttatagtattttatcggagtgattacaaaaagtataagtttgaaatatatgctagctcaagtgatcatcctcaataagaagataaag

SEQ ID NO: 12122 - DNA, 256 bp, Zea Mays
actaaagtgagtccttacttgcaatattttaacgccagattaagtatcaatagactctgtttgcatctggtctaatttcaccatctcatcaatacaacatgatttttgctcattatgattcacatcctgacttaggttgtagggcagtgaccaagtcttcataaccgcgaaggtacggcgatccgaatcgattatactcagctgaggatcttcgatcacacgacatatatagcacttaacccttgcatatgtcaac

SEQ ID NO: 12123 - DNA, 604 bp, Zea Mays
aaaatctgcgtggactacaattcggctgagagcatgcgcagggataagaactacgggatcaaaggaaatgggattttccatttttttaataaaaactataaacgctaatggaaggggctgacgcgaggtggtgaaaggataatgggattttcttcaatttcatttctatttcaacgaggccaaatagtttggttatttaagttagagtttgctgaagtgtaaatggaccatatcacagcgctattttagccacacacatatttttttgattttttttctgttttcttttttattaagacacatatattttagatcgggatttttttagcgatgattaaagagtcgatgtgtgatacggcaattgactacgcacattttttttttttggatcccgaaacggaacatccgaggttttcgattctgactagaattcgtttagataattttcgtgactattccggctacgatgtacacggatcagatcgacacgagttcggcttcgatattttaatctgctctgcgtgattcgaccgaaattagccgaaaccagatccgctaatgtatacgcgatttcgtcgtcaaaacagcgtgcagacggataaat

SEQ ID NO: 12124 - DNA, 375 bp, Zea Mays
gccgggtactaccgcaagttcgtacacgactactgcaagattgcatcacccctcaccgcgctgatgaaggagggtttctcctggagcgacgaggcccaggcagccttccaggacctcaagatggccgtgacctcggctccggttttggcgctgccggaattcaccaaggtcttcatcgtcgagtgtgacgcatccacacacggcttcggggcggtcttactacaagaacatcatccgatcgcctacttcagcaagccagtcgccccccgtcaccgcgcgctggcagcttatgagcgggagctcatcgggctggtgcacgccgtgcgacactggcggccggatctatgggggcgcgcgttcctcgttcgcaccgac

SEQ ID NO: 12125 - DNA, 1638 bp, Zea Mays
gtcattttcacaaacaataaactgtcaggttttgatggaatttgagctaaattgtggcccagcatactctgcgattcgcgagactggcattcttccttgagtaacaaagctaatgttttagaaacttgcttgtaaaccttgaatgttttgtcattctccttatacataaatgttttagttttaaagcattctcttagtttctagactgttcacgacctgtagtgataaaaaatgttgatagagcttgtttgaatctaattctgtgccaaacaaagcaccataggaatatatattgtaatataaccatgctcacgctaagcgaaggatcaatacaggcatgtcatatatataacttatatacgccaaaacacccttgtgacatggacatataactgcaactatgatttagtcttaaatatgagtgcatgaaaaacaaccatttatgtgtctgaattttagcttgtgacttctgttgagttttaactctagactatctcaacttacttgggtctaaaagactttattgttgttatatcaaaacagcttgtctggctccttgtttcttgttttctgtcctaatttgtttggacaaacttgaatattggcttttggctttctatgaaattcaacggctcttggaccgtactatggtaagttgacaatgttttatcttaaaaagatctataaataagagacaacattactacattggatatattattgttattggaagtaatgttaagcacagctaaaaaaactatgaattaccatggtctatgtttagggacggagttttatataaactgttgctctccatattgtatccctaatccctatagttttagctaaatgtgaagatcagctatccacatatagtttatatatgtttaaaagttattcttttttcatcagctatatgatgtattggttgcatttatctcttgtaacaaaagataccttcatacctattccaagcagtcataataaagtaaaactgaaataaatacagaagacttgggctacaaaataacctacaaattattatgcatgttattaggggctaaaacacaaatttagtgaggatatcatagttacatatctacaaagcagcattgatgcaaatgatttttgaataaatgatttccatccaaattgtagtgtcttgcccatatctttgcatttatttactgttgcacatagcagcaaccattcgtagaggttgcatgatgtgtatattggagaagcaaaatatggcgtagcactagcgaagcaaatctgcagattttcttggtagcagtgcagtggagaattgatgcagatgccagaatttacaggtttgcaaagcatggcaaaaacacgattcagagttcaattttgtccaatactttttgccaaaaaaggaggattattttgtcaagaatctatgctgctgcttctttccaacaatgccattggcaattcagaagtactagcaagatataaatgtaatgtacagtttgtaggaaagcaggaaagatacgtaacaagtacccttaggcccatttgttccgttggatttgaatttcattctaataattataatttaaacaaaattaactaagttaatatatttaaatattatcttaaactataagcgag

SEQ ID NO: 12126 - DNA, 291 bp, Zea Mays
caacttcagattctcagatatacgctgatcgatacacaagcatgtttgggacaactcttatcgtcgaaaaattgatgttctgaatctagaatttatcgtgaagcggctccactagcgaacatgagatccatcataaaaccgtttgccttacatagcagatcaagatcatttttgagaagcacgaactatggctctgtaggtatcgacatcctttctcacggcggtgaagcttttagttattagtccttgccctggggggtgaataggcttttatgaaaaagtacaacctaa

SEQ ID NO: 12127 - DNA, 546 bp, Zea Mays
cttaaagtgcctaaattaacataagatacataaataatctatgcatcatgttggagatttttgcttgtgcatttaattatactaataattagatattaatgctgaaattagggtgcaacctaatttgaaatctagggattgaaaatgacatagaaaagagaagggaaataatacacattataaataaaatatatatacaaacaaatataccttttcatactggtacttttaattgagcatataatccaagtgtgaaactcaacaaaagttgaatttaaatctgaaatctaaaaataggaagaagggaaaaaagaaaagaaaaagaaaaagaaaaaggaaaagaaaaaaaaagaaaaggcgcgtttggtcgaatcttgcacggacggcccaatttctattctactgtgcaacccaactggagtttggcacgacacccgggcccctcccgtcagtcccctcatgcgtgcgctcctgtgagtctggcgctgaccggaagaccccacacgtcatactctaagccatcatgcgtgcgcgtcgtgcattcgg

SEQ ID NO: 12128 - DNA, 265 bp, Zea Mays
gtgacgcgcgtgggcaagcgcgaggcgcagtggaagcgcgagttgggccggcggggaaggaaatcggcccagctaggtggtttctcttttctttttcatttctatttttctttttcttgttttttttattttatgttttcttttatccttaattcatttgaattcaaatttttgaatttaactcaggtgctaattccaattcgtgttaaccatgcaatttggtcatacccacagatggtgaagttatttaattataatatttttt

SEQ ID NO: 12129 - DNA, 228 bp, Zea Mays
cgcgagttggggcggcggggaaggaaatcagcccaactaggtggtttctcttttctttttcatttctatttttctttttcttgtttttttattttctgttttcttttatccttaattcatttgaattcaaatttttgaatttaactcaggtgctaattccaattcgtgttaaccatgcaatttggtcatacccacagatggtgaagttatttaattataatatttttt

SEQ ID NO: 12130 - DNA, 322 bp, Zea Mays
tattgagccaggacatttggtgcttcggagagtggccaatccagatacagtgggcaagttgcagctgaaatgggacggacctttcttagtagcatcttcgtcaagacccggttcatacagattgaaggacatggacggcaacgacattcctagatcttggaatgcggatgagcttcggcgatactatgtgtaacgatgtaattttttatttttctttttttctttttttggcacccttttcctttctaaagggggagaaaggtttttaatggggccatcatatgtaatttccttttttagttctataagagcaaaatccccc

SEQ ID NO: 12131 - DNA, 383 bp, Zea Mays
tggcaggtgtctctgaatctgtgccccacagcagtggcactccattccagatggtgcggactggatctaatgtatacagtcacgacacacttctctgtgccatgctcaacgaattcacgaccatcatactccgactggctcttgattccaaggcaaactgtgcatgctcttagcaacttggggaaaccatcttcattctagcaaaagctcgttttgcagcgaacatccatctgacttctgagagaaggaaagggggaaacatttttgaaatggagggatgcgagcaagattttttttgaaaatagttttgactcaaaaacttttgggtcaagcctaagggttatgtcctgcggccaacctaacagctctgataccacctgcag

SEQ ID NO: 12132 - DNA, 817 bp, Zea Mays
ctcagccggtcgacagctacattgcggtgcagagctcaacctcagcgcgcgcacacacacacacacgctgagagacagacgacagagagatggagagaagaaaaaaggatggcttttgttttcttggtgctaagcaactagtagaacgcagtgcaagttgcaggcgacgggatgcttatccagccggtctgccttcctgcctgcgaattccaatccgcactcacggcgcgggcggggacggggagacgacgagacgactgatcggcgcgcgcaccggcgagagcgccaccggccggtcgacgtgcatgaacagtaggtccacctgaagataccatatactggggagaaagcacttaatctgaagaagcgctgtgtgctgtgctcgctggaactcgatatggcagtgggtacaaggggttcagaaagtatgaactactggaaagggactgacactaccctgcctgctgctgactctgctgccgccttgctagtttggtagcccttcaggtcttcttccagcacagcagatgcctacgcctacgcgtgatcatcgatgatcgccaaagctaattgacccctccccggtaattcagtggatataatccatgttctctctctctctctctctctctctcttgcaatgtgaaagcctttttcctgaagaaaattgttcagagttgacatgcgctgggacgaagaaataaagacccatttgatatatgtttggtttggtatgtgagtatagtggagggcgctatcagtgaaaccagtaaggtttggcagcttgatatgtttgaacaaaagagcaaaagggaag

SEQ ID NO: 12133 - DNA, 267 bp, Zea Mays
ttagaagcgagcatctcgggacatgattcagtaggacatttttttatttttttatttttttaaaggagtttaggcagagcggtgctcaagcgccaaagcggcacgctgcggttggcgagcgaggcgacacgaccccgataaaatctactagttccacacacggctgcacctcgtgcaccaataaattattagggaaagtcggagtggaggataactatgaaagagtaggacgcccgtgtcaggatgacgtggactctttcacgtcca

SEQ ID NO: 12134 - DNA, 585 bp, Zea Mays
aaaagatcgaagctctgtcgtcaaatccaaccttgttgctagggttcttcagtgcctcaacggatgacgctgacgccagccaggcggcgcaatggcgcaaaagcacgactggagacgcgcggcaccgacgaaataacagacggtcagtgtccaagtcgcttctgcgtgtgggcccctattgttctgtttactgctccacctttcaccactagtaacagttaacaccacgtccacgtgtgaaatatatatagccttgtgtgccaattattggtctacagagtggacgatgttgccagtgccgcgggactgactgcttgtcagtggttctcactcaccgatgcaaaaaaaaaaaaaaaaaactgatttaacacaactattggtcgcaacttcctttggctctataacgatgtacacgcatatagatgagtacgaatggttgagcgtcgaacagacgctaatactcgcgggccggggtgtaacaataatatgttctataacttggtccgaattttaggtcgaggcccggaaggacacgccgcagccacacccacagccccacgcactcgcgtggtggacaagcctgcc

SEQ ID NO: 12135 - DNA, 305 bp, Zea Mays
aaactccacccttaggtcatctcatcatatgcgtacacttggattgttaggaacacctcacatagattattttcaacccctaagattatttagcaaattgttgattcaaacaaaaaggaaataaaaagaaaaaaaataggaaatggaaaaatgaaatagaaaacagaaaaagaaaaaagaaaaaccctttccccctcggctgggccgattttggcccaaattgcgtcgcgcccgcgctccccccccccctctcctcccatggcccaagcggcctagctgcgtgcgcccgtgccgcgcctgacaac

SEQ ID NO: 12136 - DNA, 274 bp, Zea Mays
catatgcatacacttggattgttaggaacacctcacatagattattttccacccctaagattatttagcaaattgttgattcaaaataaaaggaaataaaaagaaacaaaaatagaaaatggagaaatgaaatagaaaacagaaaaagaaaaaaagaaaaacactttccccctcggctgggccgattttggcccaaaccgcgccgcgcccgctcttccccccccccctctcctcccacggcccaagcgacccagctgtgtgcgcctgcgccgcg

SEQ ID NO: 12137 - DNA, 278 bp, Zea Mays
ttcacttatgtataggtgttgcgaaggtgtgtaccgaagcaggcacttcgcgtcgaaggctttgatatacgaagcaaagaagaggaggtttcaaaggacttattcagcacgaaaagaggaggaaagacgatattgcccctatgatacttgtgagcacacttgtaattttatacaaagttatatcgctctcttataaatagaaaaacaatgtcatgcatagattcatctctcgagagctcagagcacaaatttactcagccttcgaagctacattcgag

SEQ ID NO: 12138 - DNA, 816 bp, Zea Mays
gccacattatgttggcaaaaattcgtgaggacgtgtaggacgagcatgcatcctgattgttgcatcatgtttatcacctatacacccaaaatgcttctctcatccttattccagtaaccagtgattgttgataatgtggtgtaatgtggtgttatgaacctcgataaaatagttgtcctctattcctcagggaatctatttaggaattatatgtgtgctcttgtattgatgtgccgataggaggttagtagtttgattgcctaaacccaaaactagatcatattcttatttagtgaaccatgccaaatttgaattgtctattattactccatgacaaagcccatacaaataaatgcgtagacaatttccttattggacataaaatgtacctaagcttaaaacaagaatctccagtcatgcctctttctagaaccattcccttgttcagttgatgcaggttgaggtccctattgtatttggcctctccttgttgatcatcttgtcgccttatcaacctaacttaggaaagtcatacctaatcattttccttcgtttgatgcctttagtttccccatctttctcgaaagcataccaacttaatccttgaccttgtgatctctgcgatgggcatagaaatatgcttggggctgaattaacagtctcccatcgtactcctttcatcaaatctaggttatggccatgccttgttcatttcattgggccatgatctatttggctctctacttgtaaccattcttacaggtggagtatctcttgtatattgtcacccttgcaaatccattggtattgcgcgag

SEQ ID NO: 12139 - DNA, 2153 bp, Zea Mays
gtcgatctcatcctcctgtgattttatcagccgctgcacagccttcatcttccttttcattttctctccagccggtatttcttcctgcgcgctccatctctcgttcgcggtgccgcgcccttgcagctcccaaccatggcggtactgctcccagccgcgggccgccgagctccttccagttctctctgctcgcgccctgtaccccgctcaagcccctccttctcccctctgttcaatggtcgccgcccttgttcctttttctgtgccgtgcgtctcctctccctctttcccgcgctcggcctagccatcttgacagcagtcgccggccgaacgtctctctgccggtgctcgccctggtcgcgcgccatcgctcagctcatccgcttggagctctgcgcgcccagccgagcgacttcgtccgcgcgagcttgccccctgctcacagttctttcgtacctatctcccttcggcacgtccctctgcccctgcacgcgctcctgtgtcaatgtcgcgtcctggttcgcccagccctgcacgctctgctcgcccatggaagttcgccgagttctatttctgctcggtcgtgcccctaccgagcctcccatggccgcgccctgggatttgccggagtctgcttccctcgtcgcgcgtctgcgcgcagctcacgccctgctagcccctgctgcgggttgtcgagctctctgcgggttgtcgagctctctgcgcacgctcagcttgctctttccttgcttgccgcgtgcacgaattttatctactcgccacagcgtgtcaagctcccacgccgaatctttttctagctcgccgcgacgtccagtgtgctgcttgctttgctcaccagcatcgtttgcttgctggtctcattctaatttgatttggaattattgcgtctcagccttgatctgtcgcggccgccgtcaaatcgtcagtcgttcaactcaccgatcgcatcttagccggtcgtcgatttcctgttcgccatggtacaacaccgctgttaaatccagtctctaacccgccatgtcgttcgtcgtcctctagtcctagttcgaccccacctcaccagctcgctccaaaaacgatctcgttgttgttctgcgagtcatctggaaatcctgagatttgggtgaagaagcgattctcgcgtagtgctcgtcaaatcttcgacgaacttcttgaacatgtgatcgtcgtcatttctgcaattccaagtcgaatttaggtaagctgcttcactatttttattagttgattaagttgatggattaaatagaattgttgaacgcgataattttcttgatttagtccacgtgggttgaagtcggcattttagatgtgatccatatgaggggtaaatggtagacatatctaaaattatgtgaccaaattaataatacaaattataggactagtgtttctaaggtctggcaggtagatgtatttcgtcgatggttggggtcgatgtcctgatatgggagctattatatgatatttagtgatcgattaggtgtcttggctaaatcgtcgagtaacgtcgacgagccgacatctgttagaaatccatgaaaaatcctgtagtagaagctgtgtaaataattttaggaaattaggttcgtgagaaaattgtttaggcgagaagtgcctcgatggatgtataggtctagtataattgaagtgattccatttacgcgatgcgagtgcattcccgtgtcagtaagtagacgcactgcaattgtgtgatggggtcagtgaatttctatagtggttgtcatgttctatgttagtgtgtttttgatgaattttgtttaataaaattagtgctatgttcaagacgtcatgatactcttctttagaaaccgattaagtgccctaaataaatatctagcattaccaaaatgagtggaagtgaataatatcgataagtttgttagaattgtacccagctaagtgaaaataatatgtctggtaggaagtcggagcctgagtcatcgttgttttgcgaaattcgtggcgggttagatctttggttgtttagaaggtcgttttgtagaactctatgatgtttgaattaaatttggttaagctagaaaggcacggctactgcacttagtcatacgtcgataactagtattttc

SEQ ID NO: 12140 - DNA, 227 bp, Zea Mays
cgcgggttgggctagattcggcctagccgaggggggaagtttctctttttctttttctgatttctatttcttttcttttccttttctatttttgtttctttttatttctttttcctttgaatcaaaaaatttctaaatgatcttgagtgataaatatagtctatgtgaggtgctcctatcatttcaagtgtatgcacatgatgaggtgatctaagggtagagttaag

SEQ ID NO: 12141 - DNA, 842 bp, Zea Mays
acttctctctctcccactcactctctcctcccaccgttctctctacaccgtgccacccagcagccagccgagcgcgccctgctccggccgctcgcgcgcacgccgagcgagccacacaccgcgcgcgcaggagccgcgttgctatgcccaacgcgccgcgcccgcccaggacacgctgccgaccggcgcgatgctgcgcaggcgaggccggtctggagcgccgtgcctgtaggtccagccgcgctgcctcccgcgcacgccgacacccgagccacgcgacaccgcgatgccgcatgcaccgaccgagcccgaccacgactcccgtcgtccgttcgtgcctgggattaattgaaaatcactgcgactgtttcttcttctccattattctctccctcgttattctctagaaactgacacagtggtggccattgaagaccacgttactccctctatcagacctttcttctccctcctgctccctataaaaagggaacaacagagcctccccattcctacctactcgagtttgtctttctctctagcactcctcgctcatcgccagtgcgttcgacgccatcgttagtgtgtcgttcgtcgccggagtgtgccgttcgtcgccggagttcgccggagccacgtactcgctgtccgtagtcgagccccgctctccgtccggccgaaacccgtcgatccatccccgtcacacgcacgaacccgaagttgatgacgacccaaatttattttatgtattttataaagtgcttttgattcgattcatgtgttgtatagtttgtttgtcgtaatatgaacacatgtgattccgatttgtgtatttgtgtgcg

SEQ ID NO: 12142 - DNA, 281 bp, Zea Mays
gcgcggcgctccagaccggcctcgcctgcgcagcatcgcgccggtcggcagcgtgtcctgggcgggcgcggcgcgtcgggcagagcaacgcggctcctgcgcgcgcggtgtgtggctcgctcggcgtgcgcgcgagcggccggagcagggcgcgctcggctggctgctgggtggcgcggtgcagagagaacggtgggaggagagagtgagtgggagagagaagtgagagagagagaagtgagggagagagagtgggagtagcagagggaggcggcggctgg

SEQ ID NO: 12143 - DNA, 295 bp, Zea Mays
cgatatttcgttcgatacatcaattcagctgagccaacacaccgttgctccagcagtccagctgcatgaaaagaagtttgatgccattgcaaagctgcgatgcatggggcatgatgccatcattattggtctcctctgccctcccacaattgccgctggtcgctggacctccaccatgcgttaatgcgtaccatcggcttggtctggattggttcggtgccctttcacactcctgctcttttctccctgcgcctttagccctttctcttttctaatgacgatgcgtttcttcaaa

SEQ ID NO: 12144 - DNA, 334 bp, Zea Mays
caaagttgcactttagggttttggaaatattatgaagaagagaaaaaaagaagatatataaaatataaaggaagtttatatatttccaaaattattaccttaaggtcacaatataactcaaagataaatttagtacaagatttgaatgtaaagttgaattcaagttggattagggattagaaaaataaaaaaaggaaaaaaataaaagaaaaaggaaaggattacctgttgggctggcggctcccatttcggcccattcttttcctgatcaacgcgcgttttccctcctgctcgctcggcccgtgcgtgcttctgctcgctgctgacgctgtgg

SEQ ID NO: 12145 - DNA, 895 bp, Zea Mays
tcgaagaccagaaaactcaggcagaagcgaaccgtacaacaactcatcaatccctagccagatctgaaaagaaccaccccgactccactgccattcaagtcgaccccaatcagcgctagcattcttattcacctgcaccgttgttcccagcaaacgcaagagctgagagcacgaattgtatcatctagaagcacatcgatcaatattcccgtaggctacacacagaattaacctacataacctaaattacacaaacttaaccataaactgcgataaaaaaatcccctctccacccagacacccacaagaacacactacacacggtaaaccctcaaatccacaaccccaggtctggtctctagcagatccaaggaatgatggaagaataaatccccacagatccaattacccaaacgaatcctgacaccaaaccaaatagcacgagatgtagcgcatgctgcgcataccacccccacgggtgattggcgaaacagggttctttcagatgaaaaaatcgggaaatgatagcgcgagaaggaaacgtctactaatcgggaagcgcgaacctgaacaagcgggaaaggaaaccgcggcggaggagggagaggacgacgggattcaggagccgagactcgagaccacgcaccttgtagagaggacgagcggcgaggggaacggcgggcagcggcggcggtttgctcgggcgagctcgtgcggttgcgccgcgcggggctattatactagcagcgacgctggggacgcggggctccgaggccgagggcggggagggacgcgtggctgtattggattggttcgattcgtagcggctcagatcgtgaaggtataccgccggggctggagaatatgctacgctgggcggctgaccaagttggac

SEQ ID NO: 12146 - DNA, 417 bp, Zea Mays
attcatcctccttttcttgatcaacttcatatcccccttgatcaattccttcttcttgaggtggctcgttgttttgaacttaatcttcttcttcttgaatcggttcctcatcttgagttggtggagatgcttgtattgaagatgatggttgatcttgtgtttgtggaggctctttgggttcttgtgggcacacatcgccaatggacatgttccttagcgtgatgcagggagtctcttcatcatctaactcatcaagatcaacttactccacttgagagccattagtctcatcaaacacaatgtcacatgaaacttcaactaatccagtgcactcgtcgaagactctatatgcccttgtgtttgagtcataaccaagtaaaaaaccttctaatgctttaggagcaaattttgaatttc

SEQ ID NO: 12147 - DNA, 263 bp, Zea Mays
cttcagaatccactttcagtctagctagcagggttctcgaggagcggcgacaacgactgacaacggacatggtggaggtgctctcatgcatcaaggactgggaactggctgaccaacacaagcaacatactgtggagaaggaaaccaaggaccttgaggcaatttttgaagctatgtatctcgatgatgagcaggaattatcacctgggagcaagagaaaggttcaagaaggaagcaaagatgagcaagggggaaggaggaag

SEQ ID NO: 12148 - DNA, 252 bp, Zea Mays
cagaagtggtatcagaggaaatgttgactgtaggacgaaacctagatagaaatggacatcccttacctacttatcttattctgattcatgctacacttaccttactctgattctttctacacttatcttgatcctgtctcaccttctactgttctactctgatcattcttaccttttctattctgatacaagatggatttcacaccttggaatcctacatttatgacctttttaagagataggatacctaaa

SEQ ID NO: 12149 - DNA, 270 bp, Zea Mays
gtgggattgggagaacgaatctttgtcccccagcacgacggacgtcctcgcggcgatggatggactatgcaattttataggatcgtgaggatgcattttgactaaacctgcactttgatttaaataagcaacattgatttggtggctaaatcaacagcacattgtttctgcacccatcatttggtggcacaattaatggttgcggatgcttcttggaaggcataaaaacaaaaatgctagactcctgctgtgggaggaagctgagaacat

SEQ ID NO: 12150 - DNA, 261 bp, Zea Mays
gagatacggcagactgacggaactctggcgtcgcttcatgccgtgttcgctaccaatcctcttcccagcgacgcaaaagcgatgtggaaaaaaatcactctggttcgatgcagcagcctggctgcacgaaaccgtagactcgccgtctctctactcgcacgtccacaccagcacgggggcgcgctcggtcgtggacctgatatgcggcggcgaggggaaagggagacggcgcgcttcttggcttgccaaagtgtcttctgc

SEQ ID NO: 12151 - DNA, 147 bp, Zea Mays
atcgatacacgagaccagcggaggatcttgttgggttagtttagttggcaagcagctcgacgattggtgcgatcttgcttgctgcagggcccagtgtttgatggcaaggcgcttgaggccgggtgtccagggggagtgcatgagcgg

SEQ ID NO: 12152 - DNA, 511 bp, Zea Mays
ccgaacttcttcgtattttagccccctttttatttcacgttcacttttttatgggactgttaccatgttgggcactttgagtgtctgcgtgatgatctaccacgcaaattttctgcttttgcttccggtggctagttttggactctgagctaatatatcatcccagccagccgtttgagatctgtggaagcccaagtactcaaatatcactcggcagtgtaggcgcttttgtgaagtgttttgcttagttagaccggtgtgtaagtgattgctctaggatatgtttagtgattagaagcgaggaataggcacctccaatcattcgtgtttgtgctcaacattggccctgattggttgttgtaccgttgaagacaggctcgtacctgaggagtcaggtttattatgcacaggctaagctcatacatatgcttttgattgattgtttgcgtcggtacattcaggatagatacaatctctgtttggttgtgtgtatcaaaacatatatatagaa

SEQ ID NO: 12153 - DNA, 276 bp, Zea Mays
ggcgattgggcatcgcgctggcacacgccaatgatactccggacgctttgtcgtgtatgttagcgaacctgttggtttcggttcaagaagggacgttcagccgaataatgaaccagcgaatcttttttttttttttgctgttcggtgcgtggcacgccatgtgccggctctgctgcaccgaaaggaaacgaacggagcagcagttttcaggtacgctcataactcacgcttgatccaaacgctaatcacaggtcttagcccggcccgagtacattc

SEQ ID NO: 12154 - DNA, 943 bp, Zea Mays
cctaagggtttgcctcatccaaagcaattgcacgcaacaatgccctgcggcaatgtactcggcttcagtggtagaaagagctacataattttgtttcttagaagcccaagacaccagggatcttcccaagaactggcaagtccctgatgtgctctttctatcaattttacaccctgcccaatcagcatctgaatatccaattaaatcaaaagtggatcccctggggtaccaaaggccaaacttaggagtataatctaaatatttcaagattcgttttacggccctaaggtgaacttccttaggaccggcttggaatcttgcacacatgcatacagaaagcataatatctggtcgagatgcacataagtaaagtaaagatcctatcatcgaccgatataccttttgatctacgaatttacctctcgggtcgaggtcgagatgcccattggttcccatgggtttcttgatgggcttggcgtccttcatcccaaacccggtgagtatgtcttgaatgtacttagtttggctgaagaaggtgccctcttggagttgcttgacttgaaatcctagaaaatacttcaactcccccatcatagacatctcgaatttttgtaccatgatcctactaaactcttcacaagtagatttgttagtaggcccaaatatgatatcatcaacataaatttggcatacaaacaaatcatttgcaattgttttagtaaagagaataggatcgacttttccgactttgaagccattagcgataaggaaatctcttaggcattcataccaagctcttggggctttcttgagcccataaagcgccttagagagtttataaacatggttagggtactcactatcttcaaagccgggaggttgctcaacatagacctcttccttgattggtccattgaggaaggcacttttcacgttcatttgg

SEQ ID NO: 12155 - DNA, 477 bp, Zea Mays
catgctcatcttgtttgttgcggaagacccacttggttcctacaacattttggttaggacgtggaactaaatgccatacctcattcctcgtgaagttgttgagttcctcttgcatcgccaacacccaatctgaatcccttaatgcgtcttccaccctatatggctcaatagaagacacaaaggagtaatgttcacaaaaatgagcaacacgagatcgagtggttacccccttttgaatatcgctgaggatggtgttcacggggtgatctcgttgtattgcttggtggattcatgggtgtggcggtctttggaccctcatcatcttccttgttttgatcattagcatctcccccttgatcattgtcctcctcttgatcttcattttcatcatcttgagcttgatcctcatcttgggttggtggagatgcttgctttgaagatgatggttgatcttgtgcttgtggaggctcttcggat

SEQ ID NO: 12156 - DNA, 827 bp, Zea Mays
acttgagagtcgttagtctcatcaaacacaatgtcacaagaaacctcaactagtctagtggacttgttaaagactctatatgcccttgtgtttgaattataaccaagtaaaaagccttctacaaccttaggagaaaattttgattttctacctcttttaacaagaataaagcatttgctaccaaagactctaaaatatgaaacattgggctttttaccagttaggagtttataggatgtcttcttgaggattcggtgaaggtagagacggttgatggcgtagcaagcgtgttgattgcttccgcccaaaaccggtccgaagtcttgtactcatcaagcatggtcctcgccatgtctagtagagttctattcttcctctccactacaccattttgttgtggcgtgtagggagaagagaactcatgcttgatgccctcatcctcaaggaagccttcaatttgagggttcttgaactccgtcccattgtcgcttctaatcttttttatccttaagccaaactcattttgagcctgtctcaagaatccctttaaggtctcttgggtttgtgattttttctgcaaaaagaacacccaagtgaagcgagaataatcatccacaattacaagacaatacttactcccgccgatgcttatgtaagctatcgggctgaataggtccatgtggagtagttcaagcggcctgtcggtcgtcatgatgttcttgtgtggatggtgaacaccaacttgcttccctgcttgacatgcgctacaaaccctatctttctcaaaattaacatttgttagtcccaaaatgtgctctccctttaga

SEQ ID NO: 12157 - DNA, 1162 bp, Zea Mays
attaaaatcaactaagtatagctgcccctctaacactcccttaaatagtactgaatcatcacttcttctaaagatagtaacacctatatccgtaaaaagacaattgtagcccattttgcataattgagaaactgaaagtaagttgtaatctaaagaatctacaagaaaaacattggaaatagaatggtcaggtgatatagcaattttaccaagtcctttgaccaaaccttgatttccatccccgaatgtgatagctctttggggataatcgtttttctcataggaggagaacattcttttctccccagtcatgtggtttgtgcacccgctatcgatgatctaacttgagcccccggatgcataaacctacaaaacaattttaggccttgttcttgggtacccaaacggtcttgggtcctttcacattagaaacaagcaccttgggtacccaaacacaagtctttgatctcttgtgtttggccccaacatatttggcaactactttgcctgatttgttagttagaacatatgatgcatcaaaagtcttaaatgaaatgttaggttcatttgatgcaataggagatttctttttaggcaatttaacatgggttgattgcctagagctagatgcctcactcttatatataaaagcatgatgagagccagagtgagacttcctagaatgaattctcctaattttgtgctcgggataactggcagggtataaaatgtaactctcgttatcctgagccatgggagccttacccttaacaaaattagacaatcttttaggggcattgagtttgacattgcctccctgttggaaaccaatgccatccttaaagccagggcgtctcccactataaagcatactgcgagcaaatttaattttttcattctctaattcatgctcgacaattttagcatctaattctgctatatgatcattttcttgtttaatcatagcaatgtgatcatgaatagcatcaatattaacatctctacatctagtgcaaatagtaacatgttcaacggtagatgtagagggtttgcaagtgtttaattcaacaatcttagcatgtaaaatagcgttttcatctctaagattggaaattgaaacattacaaacatttaaatctttagccttagcaattaatttttc

SEQ ID NO: 12158 - DNA, 487 bp, Zea Mays
tttaataaggaagtactcttggctatccaagagttcatccttctcatgaatggcgctaatcaattcatttaatttttccttttgtttcatgtttaagttggcaaaaagggtgagcaagttatcctcattatcactagaattttcctcatcactagaagttgcatacttagtggaggatctagtttttaccttcttcttcttgctgtcctttgccatgaggcacttgtggccgacgttggtgaagaggagacccttgttgacggtgatgtttgcggcgtcctcgtcggtgaagctctcgtcggagtcccactctcggcaaacatgggcatcgtcgcccttcttcttgtagtacctcttcttctccttcttcttccccctcttgtcgtcgcccctgtcactgtcactagaaataggacattttgctataaagtgaccgggcttaccacacttgtagcatactttcttggaacggggcttgtaatccttc

SEQ ID NO: 12159 - DNA, 1075 bp, Zea Mays
agtttatatctgggatcaccacgagttaattgaacttgagtaggattaagaaatacaagtgatcttagaataaccttgaccattttatggtcatcccatttggtgctcccgaggttgcgcacttagttcaccatggtcttgagccggttgtacatcgcttgtggctcctccccttagtgaagcatgaatcgaccgagctccccctcaatcgtctctctcttggtgatccttgtgacctcatctccttcgtgcgcggtcttgagcacgtcccaaatatatttggcggactctaacccatgcactttgttatactcctctcgacttaaagaggcgaggagtatagttgttgcttgggagttaaagtgtcgtatttggtcggcctcatccgagtcatagtctttatcccccacctgtggtacctgcgctccatactcaacaacttcccatatgcttttgtggagtgaggttagatgatctttcattctagcactccacatagaataatcttcaccctcaaagacgggtggtttgcctaatggaacggagagtaacggagtatgtttaggaatgggaggatagcgtaggggaatcttactaaacttcttgtgctcatggcgcttagaagtgacggacggcgcgtcggagccggatgtagaaggtgatgaagaattggtctcgtagtagaccatcttcttcattttctttttcttctcgccgctccgatgcgacttggtgtgtgaaggggatcccttcaccttgttgccggactctctcgatggagccttcccgtggcttgtggtgggcttctcgccggtcaccatctccttcttggcgtgatctcccgacattacttcgagcggttaggctctaatgaagtaaccggctccgataccaattgaaagtcgcctagaggggggtgaataggcggaatctgaaatttacaaacttaagcatacactacaagccggggttagcgttagaattaaattcgagttcgaaagagagggaaaagcaaatcaacaaagaaataaagcggatgaatacagtgatttgttttaccgaggttcggttcttg

SEQ ID NO: 12160 - DNA, 161 bp, Zea Mays
ttacaagtgagttggaaacaagaatagaggaagaagaaaatcaatccaagcgcaagagctcaaaggaacataaaagtctctctctctagtcactaatttgtttggagtgattccggacttgggagaggatttgatctctttgtttgtgtcttggaatgaag

SEQ ID NO: 12161 - DNA, 781 bp, Zea Mays
cgaccgtagaccacccggaacggggtgtcgcgtagggatgactggtaggccgtgttgtagacgtactccgcccagggaagccagcgaagccactggcgaggacgatcccccgtgaggcagtgtaggtacatgacgatgacacggttggccgcctccgtctggccatccgtctgcaggtggaacgccgatgacatgaggagcttggtgcccatgaggcgcatcagctcgctccagaacaacgaggtaaacagcgggtcgcggtcggagacgatggactgcggtatcccgtggaggcggacgatgtcggtgaagaaagcctgtgccacagactccgccgtgtacgggtgcgctaggggatgaaatggcagtatttgctgaagcgggcgacgacggagaggatgaccgtttttccgtgcacccggggtagcgcttcgacgaagtccatcgcaatgtccgcccagaccgtcgagggcaccggcagcggctgcagcaagccagctggatgtagatgttccgacttgaaccgctggcacgtcgtacacgcccgtactaagtcctgcaccaggcatctcatgttggggaagtggaagtcccggcgcaggcggtgaagggtgcggtggacgccctcatgcccatcgtcatgcacggcggccacgatctcctgcagcaggggcgacgccggcggaatgtacaggcgcccatcgtaggtgaccatgccgtcagccaccgcctagggtgcatcgcgggtgctggcgctgactccttcatggatggctgctag

SEQ ID NO: 12162 - DNA, 327 bp, Zea Mays
aaggttggcgcccagaaacacggtgtagccagaggtggatcaacgcgtgtcaggcaaccgactcaatcaacgtctgtgtagacgatcggctcagaagtcgaagagggccgaataagaagaccataatcgaggataccgtggaggtagcgaagaatccacttcgcagcggtgaggtggggctcccgcgaggtgtgcatgtgaaggcacccgtgctagactgcgtaggggatgtcgggtcgagtgaaggtgagatactgtagagcctcggcgaggctccggtatatcgtcatgtcaccgactggggaggcgtcgttgtcgaagttgctt

SEQ ID NO: 12163 - DNA, 448 bp, Zea Mays
  misc_feature (1)..(1): n is a, c, g, or t
natatcatgggatgcattattgtgactttggcataaatatgggtgctgacaccgactagagttgcatatcaagatggaactccttagacttgcattttgcttattttctggttatctaagtgaaatctgtgtatattctacttatgtggacacaatataaactcagggtgaaggacctgggactgacccagagaaatgggaggagctattcagatctgttcaatcagactagtggcattcttcaaagggtacatcatagtgtaatgtaatctgtagaaacagcacaatttaacagtcatagtcattgaacagtaatcatgtacagtaatttaggtaccacttgcgaaaaagaatgtttagtttgtgtacataatatgtgaatattgagatatgactattacctcctaaaagtgatatttttgttggaaaataaaatgttcgttatcct

SEQ ID NO: 12164 - DNA, 365 bp, Zea Mays
cctccgccctcctccatctgctcacggcgtcgtctgccctccgccctctgaccacgccgccatgccactgccgtccgccctctgccccacgtcgcttggctctgtcctttgccgcacctccgccaccgtgcctccaccgtctgtccacattgtcgctcctccacgctgtgccctccgccgcactctgtcctccgctggtgagtcccaacgtcgtgcctccgcgagccctaactggctaactaggacatttgctcgtaattttacaaacattagtgaatgtatatttttatagtctataagttcatgttttcaagtagacaaggaaggtgtattatgagatattcttagtggcagcaggatttttt

SEQ ID NO: 12165 - DNA, 997 bp, Zea Mays
gacggatttgggtgctgagccgcttctccgccgccgttgaaaaccagaaaatcggctcaagatctactccaagtgtttggacaccaaaagccgcttatagcggccagaatcaggtgaaaagtcgaaccaaacacggcatgatttctgaatagggttgtggcggccagattcttattggctttatgtctcaacaagcctatattatgctgggtcgggccacttattcataagcaattttattctatcaaatagtactttgatctttttctcattatttttattatttttcttttttttcttatctgtttggaccatactacccttgctttcgtctcgcctcctccagccaagtccatctgtcgtttcacctctgcggctataaagttgctgcggctgccatgctccgtacatacacacgatgaagcgaacaggcaggagcaaagcagtaaccatcgatatggattagcatccgccccattactagctccagaatggagcatgcacacgtcatgaaaatgggggaggtaagacgacagatggactcggctggaggaggcgagacggcagatgcaagagcaagggcagtatgctccggtaaacagataaggaaaaaaagaaaaataatagaagcactatttggaagaataaaatttcttatgaatactattacagagaagataatgttgtaagtactagaagagagaagcccagcaaaacgaatagcagtaatgtaaataaaagtactagtctcgttcgtatacttaggctgtccgcactcagcgcctgtatgctctacgctatcatggagtagcgttgaaatctggtgcagcggcggactggatacctcacgctattgtccagtagagcagctgaaacgctgaaccaagcgttgtacgatctcaaccctatctgctatcgcacgtccttacatgctcaaataaaagaacaacacacggtagttgaagacggttgataaaaataaataatagaatatgtg

SEQ ID NO: 12166 - DNA, 854 bp, Zea Mays
ccatgttgtaggctttggttttccacacatgataatcctttaattcctacaactgcaatatcctgcttgagatgatatgagttgtagatataataactcaaaaataactttgggtcaatcttagggatatagatcattgtaagattgatagcttgagttaatattaatttaattgatcctctcaagcacttccaaagcttcatatcatctccttcccctgcaaagcttttcatgcatattttggtccccatctcttgatgggtccatcaaggttagtcaacaaagatctaggaacccagatgtcctttgtgctatcacttggtaaactcattacctttctagcacaagttgcaattttggattgtctagttacatatgaatcaattgacaagttaggggcgggatagttaccaataggacaatccttacattgatgtcctttctttcggcatatgtagcaaaggcgatcttcatgtcttgaagatttcttctttccttgtttctttcttgctacatggttagtaaatattttcttttctaaaactatgcctttttgttttacatagggacatgacttaactaaatgtcccttcttagagcatctaaaacaatgtttatcatccttgttaataatcaagccattttctttaatatagggacatgacctaatcaagtgcccatttcaaagcattcactacacttcttactttgcttagtgtgaagtgtggcttgatcattaccttggatcttaccttgcatggaggcatggttgaggcttttggcagaggtattgattttcttcttttgttcctttcccttgacaatcctcaagaccttgactttttcttcaaggg

SEQ ID NO: 12167 - DNA, 818 bp, Zea Mays
ctttctttgttgattcctggtcgaaatggacctggtagtgacatggatgtctattttcaaccccttgttgatgatctgcaagatatgttcgtcaatggagctagaacttatgatgcttcaaagggtgaattcttcaagttgcgagctgcactattatggactattactgatttcccaggtctaggatacacatctggatctgtcacatctggtgaagcagcatgtcctgattgcaactaccacacttgttcacttagacttagtaatggcagcaagaattgctatatggatcatcgtagattcttgcttgatgaccatccatttaggtttgacattgatagatttggtaaaactgagtttaggccagcacctactccactttctggagaacaaattttagagtgcactaaagatcttaatcaaacttttggcaaggatccatctagaaagaaaccgacaaacaagagacgcaggaaaggggaaccattagtcattctcaaaaggagatctatttggtttaaactaccatactggaaagatttattgttgagacataattttgacatcatgcacatagggaaaaatgtgagtgaaagcttacttaatacattcctgggcacagatgggaaatcaaaggataacttgaattctcggttggaccttcaggccctaggtattagaagtgatcttcaccctattgaagtagaagaccaactttatttaccaccagcaccttactcaatgagtcctgccgagaggaaattattttgccaagtactaaaaggggtgaagtttcttgatggttatgcagctgatat

SEQ ID NO: 12168 - DNA, 274 bp, Zea Mays
atttcttagaacaattaaatcttatatatcgatgtagtttttgatagcatccacaaatgttcatgttgctaccagatcaggcatcataccagcaagcaactcggtgtgtaagctgcggtgccgaaaccaggatcaaaaataaaaaaaaaataaaacgcacataagtttaaaggtgagtattttttgaaaaaaaaaactaaaaaattctgtacaactgctggagggtgcggaacgacagggcggacctgtggaacatgtacggaagagtccttcc

SEQ ID NO: 12169 - DNA, 333 bp, Zea Mays
gaaaaatccctggtgggctgaatgaattcggcccaagtgcacggctgcacttcctctttttttttctttttttttgtttcctttacttccttactattctgaatttaaatttgaatttttgaatgcaaatttcaccatttagtcaggtatacaaattcaagcttctagtggatgaataatatacttttatttacttttcttaatacacaaaattcttaatttcttcccatgttataaaaccctaattttaatttagggtttggtttaacttctagcgtttattatcttattatccttattatttttatttaatgcacaaacatgtaaaactcc

SEQ ID NO: 12170 - DNA, 333 bp, Zea Mays
gaaaaatccctggtgggctgaatgaattcggcccaagtgcacggctgcacttcctcttttttttcttttttttttgtttcctttacttccttactattctgaatttaaatttgaatttttgaatgcaaatttcaccatttagtcaggtatacaaattcaagcttctagtggatgaataatatacttttatttacttttcttaatacacaaaattcttaatttcttcccatgttataaaaccctaattttaatttagggtttggtttaacttctagcgtttattatcttattatccttattatttttatttaatgcacaaacatgtaaaactcc

SEQ ID NO: 12171 - DNA, 281 bp, Zea Mays
cacaaagcgaactattctttcgccttttactaaagaataccgtgtgtccgctgcaataagcagcatacgccaacaagtcaatttaggttttgtttgaattaaatttgtgttacgtttaaatcaaacgttgatcagaaatattttcatatggtttgtttaaaggttaacataaaagtgttgtttgaattaaatttgagttatgtttaaatcaaacgttgatcagaaagattttcatatggtttgtttaaaggttaacattaaagtgttttggctttaatcag

SEQ ID NO: 12172 - DNA, 625 bp, Zea Mays
tttttgttcatgtagagtgtgtgcccttcgatggcgaaggtgaaacatttcttcagtgatagatttcatgtcaccctcccagtccagcttgctgagctccagttccatatcgtctgcgctccgaggccatatattaacagaactgctttcttcagtcttcaaattctcatctggtgatcaggagctagctcccagtacggtgggtggctgggaagctgtaagcagtcgccgaaaggtcttggtctagcagatatcatcatgttccctcggtcactacactatggaatgctcaagagtgatccggcacaggccatgttccaagtgatgccattcctcctcttgctgatccactaggcgctagggtttccttttggcatagtttgtgtcccaagttttttttcagtcttccttttattctgtgttcattatgtatgtacttgtgttggcctgtgcgcaggtagctgcagcggttgttttctttgtttttagtgttcttatgagtatgtacactagacgttgggctaatttcttccgagagcatgtacctggcgttgtggacgtaataatgtagtatgccatcgatcgtacaaacatatatacgtaacaaacactctttacatattgt

SEQ ID NO: 12173 - DNA, 3081 bp, Zea Mays
attaacaaatgttcattttgagaaagacaggatttgtagcgcatgccaagcaggaaagcaagttggtgctcatcatccacacaagaacatcatgacgactgacaggccactggagctcctacacatggacctattcggcccgattgcttacataagcatcagcgggagtaagtactatctagttattgtggatgattattctcgcttcacttgggtattctttttgcaggaaaaatctcatacccaagagaccttaaagggattcttgagacggactcaaaatgagttcggcttaaggatcaaaaagattagaagtgacaatgggacggagttcaagaactctaaaattgaaggcttccttgaggaggagggcatcaagcatgagttctcttctccctacacgccacaacaaaatggtgtagtggagaggaagaatagaactctattggacatggcaaggaccatgcttgatgagtacaagacttcagatcggttttgggccaaggcggtcaacaccgcttgctacgccatcaaccggttatatctacaccgaatcctcaagaagacatcatatgaactcctaaccggtaaaaagcccaatatttcatattttagggtctttggtagcaaatgctttattcttgctaaaagaggtagaaaatctaaatttgctcctaagactgtagaaggctttttactaggatatgattcaaacacaagggcatatagagtctttaacaagtcctctagacaagttgaagtttcttatgacgttgtgtttgatgagattaatggctctcaagtagagcaagttgatcttgatgagataggtgatgaagaggccccgtgcatcgcgcttaggaacatgtccattggggatgcgtgtcctatggaatccgaagagcctccaaatgcacaagataaaccatcctcctccatgcaagcatctccaccaactcaaaatgaggatgaggctcaaattgatgaaggagaagatcaaagagatgagccacctcaaaatgacggcaatgatcaagggggagatgcaaatgatcaagacaaggaggatgaggaaccaagaccgccacacccaagagtccaccaagcaatccaacgagatcaccccgtcgacaccatcctcggcgacatccataagggggtaaccactagatctcgtgttgctcatttttgtgaacattactcttttgtttcctctattgagccagatagggtagaggaagcacttcaagattcggattgggtggtggcgatgcaagaggagctcaacaacttcactaggaatgaggtatgacatttggttccacgtcctaatcaaaatgttgtaggaaccaagtgggtcttccgcaacaaacaagatgagcatggtgtggtgacaaggaacaaagcccgacttgtggccaagggatattcacaagtcgaaggtttggattttggtgaaacctatgcacccgtagctaggcttgagtcaattcgtatattattggcctatgctacttaccatggcttcaagctttaccaaatggacgtgaagagtgccttcctcaatggaccaatcaaggaagaggtctatgttgagcaacctcccggctttgaagatagtgagtaccctaaccatgtttataaactctctaaggcgctttatgggctcaagcaagccccaagagcatggtatgaataccttagagattttcttatcactaatggattcaaagtcggaaaggccgatcctacactctttaccaaaacacttgaaaatgatttgttcgtatgccaaatttatgttgatgatattatatttaggtctactaacgaatctacatgtgaagagtttagtaggatcatgacacaaaaattcgagatgtcgatgatgggggagttgaagtatttcttgggatttcaagtaaagcaactccaagagggcaccttcatcagccaaacgaagtatattcaagacattctaaccaagtttgggatgaaggatgccaaacccatcaagacacccatgggaaccaatgggcatctcgacctcgacacggaaggtaaatccgtcgatcaaaaggtataccagtcgatgataggctctttactctatttatgtgtatctcgaccggatattatgctttctgtatgcatgtgtgcaagattccaagccgaccctaagaaagctcaccttacggtcgtaaaacgaatcttgagatatttagtttatactcctaagtttgggctttggtatcctaggggatccacatttgatttaattggttattcggatgccgattgggcgggtgtaaaatcaatagaaagagcacatcggggacttgccagttcttgggaagatccttggtgtcttgggcttcaaagaagcaaaattccgtagctctttctaccgccgaagccgagtacattgccgcaggccattgttgcgcgcaactactttggatgaggcaaacccttagggactatggttataaattaaccaaagttcctcttctatgtgataatgagagtgcaatccgcatggcggataatcccattgagcatagtcgcactaaacacatagccattcggtatcatttcttaagggatcaccaacaaaagggagatatcgagattgcatacattaatactaaagatcaattagccgatatctttaccaagccacttgatgaacaaacctttaacaaacttaggcatgagctaaatattcttgattctaggaatttcttttgatgtcttgcatgcatagctcataaatatacctttgatcatatctcttttatatgctatgactaatgtgtcttcaagtgaatttcaaaccaagtcataggtgtattgaaagggaattggagtcttcagcgaagacaaaggcttccactccgtaactcatctttcgccgtcgctccgagcatctctctggctttggtataatcttcactcgtgtcttatttgccaaaggggagaaagtagttaaaagggcttatatttcactcaaagtatccgttttggcgattcatgccaaagggggagaaagtattagcccaaagcaaaaggaccgcacca

SEQ ID NO: 12174 - DNA, 1099 bp, Zea Mays
gaaagggttgaaagagacccggtctttgtgaccacctcaacggggagtaggtttgcgagaaccgaacctcggtaaaacaaatccgcgtgtcatactatttattcgcttgcgatttgttttgcaccctctctcgcggactcgttttatatttctaacgctaacccggcttttagttgtgattaagtttgtaaatttcagattcgccctattcaccccccctctaggcgactttcaacagtgaacgcgacagaagtcagagaagttggtcagaaggtgcaccggacactgtccggtggcacaccagtctgtccggtgccacatgaggacaaagcctccaacggtcgaccagctccaagccctaacgagaggatgacgtggcggtgcaccggacactgtccggtggcgcaccggactgtccggtgcgcccatcgtcagcagccttctccaacggctacaatttggttggtggttacaaataccaccccaaccggccacttcaaggtgtgggagcccaagcaacattccaagtcatctagttgacatactcaagccctcccaaccacatctattcattgatccatcctatacacaagacttagaccactacaaccaacataagtgccacaaaagagaaagcaagcaagagagagctactcatttgagtttagcactagtgcattgtaagattcattgagagatagtgtgtgctacatctttgtgttcatttgcgcgtggagtattgactcccattgaacttcctccaaagttttggaggcttgtaaagctagcaagagacaccaaagagtgtggtggtccttgcggggtcttaagtgatccttgagaagaagaagagctctccggtcttgagtgatcgttggagagagggaaagggttgaaaaagacccgtccttagtggactcctcaacggggactaggccttcgagggccaaacctcggtaacacaaatcacccgtgtcttatgcgcttattgcttgtgatttgtttgttctttccctttctaagttctcttgcgctattccttgccaactgtcggcgtttcgagaccggggggtccctgggccgacgagtgaaatgtcgc

SEQ ID NO: 12175 - DNA, 2381 bp, Zea Mays
cttagcccgagtccgagccctgggtcgggcggagcggagttcgtcgtcttccggggcttggcccgagtttgagccctgggtcgggcgaagcggagttcgccgtcttccggggcttagcccgagtctgagccctgggtcgggcggagcggagcttcctatggtgcctgaggccgggcctgactgcctgtcatcctcactctgtcaagtggcactgcagtcggagcggcgcaggcggcgcagtctttctgtcaggccggtcagtggagcggcgaagtgacggcggtcacttcggctctgtcgactgaagggcgtgcgtcaggataaaggtgtcaggccacctttgcattaaatgctcctgcgatttggtcggttggcgcggcgatttggtcagggttgcttcttggcgaagacagggcctcgggcgagccggaaatatattcgtcactggaggggggcctcgggtgagacggagatcctccggggtcggctgcccttgtccgaggctaggctcgggcgaggcgtgatcgagtccctcgaatggaccgatccctgacttaatcgcacccatcaggcctttgcagctttgtgctgatgggggttactagctgagaattaggagtcttgagggtacccctaattatggtccccgacaccaacattattttgtgttgcttcaagttaaattctcatttagagaagcaacaccttgcaagaaagaacttgtgttatcgctcttcttatctaagccctcttgatttattcatagacttattagttgtattgatttatcaattctgcattatttaaaagcaatactctttacaagcaaggacttagtttctacttcgataattgtatatcttgttctaaccactaatcaagggatctagttgggggataaagttttaattttcaggtttcgcctatccaccccccctttaggcgactttcaattggtatcaaaactaggaatttcacattgagtctaacaactcgaagtgatggctcgaagaagatcccaaaagaacaagaagaccaaggagaacaaggaggtaactcttgagatattactttccgattgttctaattataattcatggtctactagggtgataaatgcttttaggacaatagatcctcaattagaacaaattttagacaagagtatcattccttttaactatgctagggaaaatgcctctgaagaagatttaagatgtatacgcttaaactatttagcttatgacatcttaagtaaatcccttagcaaagaaggttatcatgccttcataataaaatatgataaacctatttgtgatgtgcatgatatttggactagaattaaaagcaaatttgatgagtccaaacatgatagttctttttgtgcttctacttccttttgtttttgtgatactaacccttgcaaggaagaagaagaaaatgaccgatggagaccaaacgatgaatccacctctccaagaggtctgtcttcccatttcgattcccacatatgttgtgtggctaatgaaaatgatagcggaagcacaaacgaggatgaggaggaagaaagaagcttcatgcaactctacgctcgcctaagccaagaagataaggcgatcatgctcaaacttctagaaagagcgagagagcaaagcgaagctcgtcaaaagctagaaaatgttctcttcatgaaaatgctacactttgacgagttgactaaagaacatgaggagctaaagtgctctcatgttgatttggtccaaaggtatgaaactatttcaattgagcaagataacgctttacattgtattgcacaattagtaaataggaatgccttgcttaaggaccaagtagaaaagctaaaatatgaaaatctagcttttcaagaaaaatatgatatgctcctgttgggggccttcggcttacgaaggtcctcaaaaataggatttaacaatatttctggagtataatgtgtgaacaggtatcttcggactcgagtcggtatcacagtaggagaagcccgaaataatacgaaggttgatacagcgccgaagatgtgagcgggaaagcttcggcgtggtagcagaaaatgaaaccgacttaaagatgaaaaggctattcagacctcggtggattactatagaattattaccaaatgtaaagggcatgaatgtaattttgtatgggctgtgttccgtgcctataaataggtgaacagtacccccgtactattcacgctgatttggcatttgcttttgcgtcacacctgtactttcatctccttccaagctgaaggtacatttgtaatccaatgtcatttctgtttcttcataataataatgcaaaaataagttgataataatatataattgtctatgtta

SEQ ID NO: 12176 - DNA, 436 bp, Zea Mays
cgctcctcgtcgatccggtgatccgagagagccgggtaaagaaggtgctagtggacggggggagcagcatcaacgtcaccttcccccgtacgctccaaggcttgggagttcacctcaaagagctccacgagtcagacactcctttcttcggcatcgtgccgacggaaggggaatacccgctgggccacatctacatgccggtcaccttcgggactccggagaactacagaaccgagttcctgaggttcgaggtggcgaacttcgactgcgggtacaacgccatcatcgggaggccggggctggccaaattcatggccattccgcactatacatacatgatactgaagatgccaggaccgcaaggaatcataactgtgcgcgccgacttccaaggcgccgcagaatgtttccgagtggccatccaagcagccctcac

SEQ ID NO: 12177 - DNA, 1546 bp, Zea Mays
tatacatcacagatatcatcagaggcataaatatccaacacaaacattaatatacaagttctcaacacaaacagtatcaacacaagttcagaagtatcaacacaagttcagaagtatcaacacataagtctcaagctctgacataagtattcaacataagttttgtagtctaaacactaaaaacataactctcattgaggtgggcggttggactggtgctgcgttgggctgcgcgtttcatgagggttgttggatgccgccccaagattggccctgcacagagaagagattgcatgtgttataccagatgcattaccaacatctaactacaattttgatactcacaggagtatggaatagagcagggtccattgtagggaacaatggaggtggcggagcgaaaccctgtgcggcgccaaggctctgcatgtattgaaacatcttcgccatcctctgctgatctgctaggccttccctcctctcttcttctagctgggtctgtaatattacaagccaacgttatagtaactcaaagagaaggtatataactcaaagaatgacgagttacagaagcactaacctcgagttgctgtatgcgaagctgtgagctgttgtaccgaggtcatatggctggactcgagcccgtgctccttgcccgcacatgagacagagtgggagtggaggacgagtcgattgccccatcggcaatccagtaccacccatgtctcttgcctcctccgaccctcatgagcacatcgaggtcgatttgctcggtgctaggatcatattctgtgccatggacctcctgcgccatggcggtgtagtcatgaaggcaggggttgctgtaggtctcgggcccgtcatccgggttgtaggtgacgtcggacgtcaccttgcccttatgggccatagcataggccgagaagatggagcaagcccgaccaccatgtgatgccgactgcatgaaaaccaacgagatagttagaaataatatctaatccaatgctatatacctaaataaaaaagagggcttacccatgcttctacatattggcctaggctgcggctaccttggtggtgggatgtcacacccggttccaggggggtagaaccgagcgcataccatatgtgtgtaatatatccaaagaacaatgcataaaagcgtaaataacgatttcattaacatattacactttgaacaggcataatgtcttaacctttattcatcaaagtacagcgaaacaaggacatccatccacaggaagatgaccgagggtatcactagactagcatccatggagttcagcatcatatcttcatctgcaacttctgatcaaaattaagcaagggtgagctcacttatggtcggggctcagcaagtgggggaaaaactaatgcaaggtaacaaggtgaggttaaggttgagcagtaagcattttagttggtcaacattttattaacaacacttgattactaataaatgtgaatcccaagtattcccattaaacaaaggtataagagtatatcaaaaacacttaagtgaaac

SEQ ID NO: 12178 - DNA, 1361 bp, Zea Mays
atttcttctatttcttcatgcaaataagtttatacttaacatactactaacaattatcgttccacccacaaaagcgaaaacaaatccgtaaatcattctagtatgaaaatcactgaagtagtgaatagtgatcgtgtttatttttagaattataaaatcctacgcatattaaaagtgttgtcgcggggttcaactttggctacacgtaaacatcgcatctctagaaatcatacgcgtgaatcgccaaatcgcatcaatattacaacaataattcataagatcaataaagtaattcaaacacgatttagaaaatatattaacgggttggggttgttttcaaccttgagatgaacggacacggtcgtcggtgagtgttcggatggcgaggtacgacggcgagcggcgtggatgaactccggcgagtctccacggatggcaggcgattgtcgaacggcgtggtcacagccacgggatgctgcgcgaacggcgaagctccggtggggaacgtggacggtaactacggccgaaggcgagtgacagtaacagagaacatcacacaaggcaggggaccgggcaggaaacaatttgggcgagattgacgcggtgccagagaatagagcagcaaggcacgatgacgccgccgagcagagatgaggggcgagggaggagaggctcagcgcgggctccatttataggcgatggaggagagggaatcactgtagaattggtgccgattgaattcgtcgacgactaaaaacataccattaatggtgattgaatgggaagggagaaacggcagccgttaatggctcggcatcaatgggcggaaacggtcgagttaacgaaggatgaacggactgagcgcgacgtttcggtttcctggcagcgggtcgcgcgggtcctggccgagtgcgcggggtcggaccttggccggtcagggtcgcgcttggtcgcgggacacggcgcgcgggatcttcgtcggggcggcctcgcttgggcgcgcggggtctggcgctgcttggcgagtcggcggctcggcttcctgggttgcgcgcctgggcgcgggatggcgcggggtcgcgcggctgcgggcgtcgcgcctgcttcgcgccgtctcctggcgtgggcgctcgacgcgcggtgctccgcggggctgctcggcgccggttgagcgatcggctgcggccaggctgggcgcgcggccggctggaggcggacgtcgggcggcctggcgtcgcgcggggtggccggagcggcactgggtcagggaagagagcaggggaggcgagagaaacgggagaggagagggagagagaagtagaggcggcggctagcagtgagatgcagggagtggcggctag

SEQ ID NO: 12179 - DNA, 413 bp, Zea Mays
tctcagagaaaatgggatttttcttgttcgtacagctctcgtccagctagttggaacagcgactccgtcgccgccgagcgatttcgcaccaacagagattcaaagccctgccgtcgaccttctccacgtcgcggccgacgagcgaatctgcagcagagaacttccgcgcgtactccccggccgagatccacatcaccgccgccgcagccgacgagcgaatctgcagcactgcagcagagcgcctccgcgcgtactccccgaccgagatccacactgccgccgtcgtcgagcgagtctgcgccaccgcaacaaagcgcctatctctggtggtcgtcctctccagcggagctcctctacgtagctgagcttctctgagccgtcgccggaaaatcctgcaaaatacgacttaaaac

SEQ ID NO: 12180 - DNA, 1000 bp, Zea Mays
gaaatgtgtagaagatgctcatgctcatgcatatgcatcgaattgttttgtaaagtcatcttaatgctcaaacagtttttttatctgccccagctgtacactgctttctgaattatgtcatttaggcttagctgtccgagataatttcatttgtgatgaaggtaaccggagcatctgtccttttgttttaaacataaatattttgatagcttaacttgtgcgtcattttatcatgtactaacatggtatatagatggcacttagcagtaacattcctgacttatgtgattgtcctgttagaatgcttctgcaatataatgggcttatgctaatctgtttggaatcccatgatgaataacaattatggatgttgggcattttgtatttttatgatgtaggcttaacatattttcttctctgctcagccctgccggtggagacctctatttatagctataatccagccatatctagtgaactaacagatctattcctatctctagtgcttatccccttaacagatttattttcctatctctatttctttgatgttacttgctgcaggtgctatcccccactgatgcattatatgacaatcactcgaagaatcagatgctaattaattgttttatacttgaccattgctaattaagtactccattttttatactaatggtatacagacacattctaggtagctgtttatttacaacattctgatcaaggtcaagtactctattttattagcaaaataattgaattgtcttggaacatacattgtattctaatccaaggagtttattgcattacattttggtgtaatgtttcatgtttgtaacttatgcaaaattgacaatagtgcttccagatatctagttattggttattagagatcatgttgctggtgaatccagtgtttcttttgacactccgaagcccgaagcaactgtctctgttaagcggagaagggtgaagcgagaacttgaagtaaatgggcaac

SEQ ID NO: 12181 - DNA, 451 bp, Zea Mays
gggagagctggcgagatccgaactcttcggaggatcccgacgacacggaccgcagaggaatccgctgcgtcagatgctgtggagaagaatatcctgacgaaaggggcccaccagtcagcgactcaatgcattttccagccagagagtgtgcggatgggggtgttgggccgtgcggcaatgggccagcgcaggggagattcggcccagacgacgatttttctttttctctttttttttctgtttccaatttcttttctctatttttattttctgtttttgttttccttttgagtttgaaattcaaaattcaaaattctaatttactctgtggtaaagcttcctcagattaatagtataattttgcacatactattatttcctttatttataatatttattttgtatacacattttcttttctttctccacttctaaattctagattttcttt

SEQ ID NO: 12182 - DNA, 966 bp, Zea Mays
ggcatacaccgtcctgactggctagatacgataattttgagcgtatgggtggatgcagtttagtaacatcaaaatggcttattttgcatccacctatgcaggccgtgactcacacatacaaacaaccaaacataatcttaagtaaaatcaacaaatgcggtgatataagatgagatggtgcgggtaatcgatcatacggatagtgtattaaaagccatgcatgcatgccatacgagaggagtatttaggactaggagatgcatatgtgacagtgtgacaccaataatcaaagcgtgggccgccggccttgtatcttcttgtacatgtagagatcctagatcccttaaaccctagctagtagctagatatatagaacagaactgaatcagcagtagtagtagtgctttgattcttgagagagagagagagagaagtagtatcagcggcaggcagaagacaaagaagaatccaagctagctaaatagagtagagagacggagacgacggagtaagtagtcgtgggaaatggtaggcaaaacgaatataaagcgcagagtgttgagccttgacacgcgcgcaaatccatggtacgtacgtacgggtccgcacgtgcccggaggcctaaactaataaaccagcaagcccagaggattaaagaactactaagctagctttcaaggtaacggtctcatgaatcgccccactgctgctagtgctagctagcgctagcgtttcagtttctctcgcggccggccggatcgagcgagaaccaccaaccagagctagcgcaactggtaatttcaatttcgttatcctcaattcgtcatcctttgtttgtgcagtctgcacgtacgcatgcgattgcattttcagtacagagagagaaagggaagcgcatctgactcagcagcaaggaacatatagagaacgtatcttgtgcgcaaggagcgttggtgctcccatgag

SEQ ID NO: 12183 - DNA, 745 bp, Zea Mays
agagacgaccttgcgaataaccttgatgtgtgtgcatcacgctcatctgtatagtttaacgagcgcagctgctgggtatgtcacgtacgtcaccgagaatgacacgcatgcaccaaacgaaacttatacatgtgtatcgtacgtggtcaataacaaagcgtacgtcttatatatactaggctaacaaagcgtttggtttatcagtagcggcattaaacacgcctagagctagctagacctagacctagacgactcgttcgtctcacaccaaacacacacacacgtatactgcgatgtttacatatccatgagaagcatatgagaaattacttaaaccagctcatccactgcatgcatgcatgagtaacgccgggcgcgtggtgatcggtatgaactctgccaccccccgcgcgccggcagcaggttggctttgacgacggccgatcaatctcggtcgagtccagtgctgatggcgtcagtgtagtggatgcgtggaaccaacatatatatatataccatatgcgcagctagcacgcgctgaacctgtcaaccgtgtgtgtgaaacaatgcggccgcgttctgctacacacataccggctgggagagagggtacatcacacggtttattaacatcagcatgacatatctatgctgtcattaattggggcgtgctaacctctaattttttttgttttgattttcacatgttgatttcttcatcgcctttcccttagtttatcctatg

SEQ ID NO: 12184 - DNA, 519 bp, Zea Mays
gaggcctacggaggccaaagccgaggagcacactgccacgacccccaaggattaagtagagaacactatattcgtagtccttacatctcaccacgcataagagacttgggagctcctccctctctcgcccgcttgtaacccctactacgagcattgagcaacaaggtgctagtagagtaagccgccaaagactgtatgtaaggacgttcaccagtataaatcttgcgcccactgagcgcaccatccgtatccagaacgtgcacaaacaaatttacttgtcagagctggttcaaaacaccgacaacatgatactatactgaaagggaaatgtgcccttgagccatttctaagtattttggtgattgagtgtcaacacaagtgcttaaatgtgaaaatatgcccatagatgaacaatgtgcaaatcataagtaaaggtatgtttctaagccttagtacattggttttgtgtactaatatcttgtccaagtgttagaaacaggaagaagatgaaaagaaagg

SEQ ID NO: 12185 - DNA, 270 bp, Zea Mays
catccacttatatgggcttttgagattttcctgggatttattagaaattcttaattgggccaagcccataaatcctaacaatcccccactagatctcaaatgcccatctgcagttttcgccactgttcactactgtttaatatactagtttttcagcagagactgttaagttgaacttccgcctagaactccaagttacaccaacccacaacttggacaatggactatgccttgaattgcaagttttgcgtgaatgggtttcacttgaag

SEQ ID NO: 12186 - DNA, 1041 bp, Zea Mays
cttgtacttttcaattgtaccatcaggcttgagcttctttttaaacacccacttacaacccacgggtttgcatccatagggtcgatcagtgacttcccacgtaccatttgaaagaatagagtccatctcattatgaactgcttctttccaatcatctgcatctggagatgcaaatgcttctgcaatggtagtaggagtatcgtccacaaggtacacaatgaaatcattaccaaaggatttttcaaccctttgtctcttgctccttttaggagcatcattgtcatcctcctctaggacaatttcatgtggctgttcaaaactctcaataggtgtattatgttcaggaattatctcagaagagtatctagaattgctatgaatgtctttcattggaaatatatgctcaaagaaagtagcatcacgtgattccataatagtatcaacatacacatcaggaacttcagatttaactactaaaaatctataagctatgctacacgaagcatatccaagaaagacacaatccactgtccttggaccaagattgcgctttttattaattggtacattgactttcgccatgcacccccaagtgcgcaagtatgaaagtgatggttttctcccaacccacttctcataaggggttttctcttctttgcccataggaattctattcagaacatgacatgaagtcaggactgcctccccccaccatgccttagataaaccacaagtgtctaacatggcattcaccaggtcagtcaacgtacggtttttcctttcagcaatcccgtttgactcgggtgaatagggaggagtcctctcatgaataatgtcatgttctgcacagaaatcatcaaagactttgggaaagaactcgccaccacgatctgatctaagacgtttgatctttctctctagttggttttcaacctcagccttatagattttaaagtagtctaaagcctcatctttagttttaagcaagtatacatagcaaaatctagacgcatcatcaatcaatgtcatgaagtatctctt

SEQ ID NO: 12187 - DNA, 185 bp, Zea Mays
gactgcacacaactatggcacttagaacctttgactatggtgatattcggaattaaactcatggttgcaagccgagacatagagccaaaattaatatgacacaaacaagaatgccaaatactcgcaagatcatcaatattagcacaaatatggttcacagacttattattgaaatctaacaaaga

SEQ ID NO: 12188 - DNA, 92 bp, Zea Mays
tgatgcgtactgattagacttactgattgttggtgcgcgccaggatcagatgggttgacgaggtcagcagatcacgagcagtcgcgtgaaga

SEQ ID NO: 12189 - DNA, 544 bp, Zea Mays
agttgatagctcacaatttaaatttgcaaatgtttcaaatttttctagcaaacctttataatcattttgtgagttgatcaacttattttttaaggttttaagttgagccttttgcttagtgcaaacatcctggaaaaatttaacggcatccgcaagctcatctacggagggctttccctcaccttcatcatcactactgctatcatcactagacgatggaatactcattttacatcttgccataaggcacttgcgtgatgaccatgatgatcgtgatgaggatcagcggttgcgcgtctttggaggttcatcttcgcttgaagagtcatcccaagttttaacacttgtaagcgccttgcctttgctcctccccattgtgggttcagccatatttggacaactgtccctgaagtggcccttctccctacatgcgaagcatcctctctttctttgctttttcctgtcaatgttaaacagaagatcctcaacctgcagaggcacacccattagattaatcttgcggatcatcctcattacctttctg

SEQ ID NO: 12190 - DNA, 3715 bp, Zea Mays
ggaatctccacaacttggagcctctctcccttacaaatgatgatcacaaagaagcacatatgtaagggagggaaaagcaacacacacaagtctcaaaagcaacagctcaaacacgcacactagtcacaacttgagctctaagttcacacacggagttctcaactcgagaggagctcaaattgctatcacaaagaatcaaatgcgctagaatgaagacttggtgcttagagatgatcaaaggatgcttgttgtactccttcatgcgcctaggggtcccttttatagtcccaaggcagctaggagccgctgagagcaatctaggaaggcaattcttgccttctgtcgactggtgcaccggacagtccggttcaccaccggacactatccggtgcagatctctttcctattctggcgcagccgactgttgacgatttggagccgttagcgcaccggacactgtccggtgcacaccggacagtccggtgcccccttctgaccgttggttcggccacgcatcacgcgcggattgcgcgaccgaccgttggctcaccggacagtccggtgatttttagccgtacaccgccgttcagttcccgagagcggccagttgatcagcgccagcctggcgcaccggacactgtctggtgcaccaccggacagtacgatgcacccagactgagcagcgccttggctgctcgagccaagtcttttctatttgtcttttctctgattctagcacttagacaaatatgttagtacacaaaaaccaatgtactaagtctagaatcatacctttgtattgatttgcactttgtccaccatttgacatagttaacacataaccatttgtgttggacacttaatcaccaaaatacttagaaatggcccaagggcacatttccctttcaatctccccctttttggtgatttatgccaacacaacaaaaagcaacatatagaagtgcaacatcaatgcaaatgagaacaagaatttattttgattcaaatttggcatatttggatcatcctttgccaccacttggtttgtttttgcaaatcacactcaattttctatctctaagtcaaattcacttgttgaggcatagagaaaggttttcaagagaaattgatcaaatattcaaaaactcccccttttcccataatcaaacattctccccacaagagaccaatttttgacaataagagaccataagagtattttgacaaaacaaaaactccaactctactattttaaaaattctcaagtggtagctgatccatttcttgctttggccttattttctccccctttggcatcaagcaccaaaacaggatcaatcttggcccttaaaccccattacctcaccaaaatcttcaacttagagtaaagaggtaataagagcatggaaatgaacttggagtttgttaccctctcatcggagtgcagtggaagtctttcatggtccaagtccatctttccctttcaatccaccttcgagactaaatcacgcaagctcaaacacatggttagtctcaaagggtcaagttgtagcacatctccccctaaatatgtgcatcacttgtaaatggacttgtgaggtccggggagtgcttgtacaacttgagcaccataaataaacaacaaaatgcataaggaacatgatcaaggcataaaacacatgtatgttataaatcaatccaagttccgcgaatctaagacatttaactcactacgcagcctgcaaaaggtcttctcatctaaaggcttggtaaagatatcgactagctggtcctcggtgctaacataaaatactttgatatctcccttttgctggtggtctcttaaaaagtgatgccggatgtctatgtgctttgtgcggctgtgttcaacaagattatccgccatgcggatagcactctcattatcacataggagtgggactgttgggaccatgcttcgtcgccgaaggtcctgcaagaagaaacaactttggctaaagctgcttatacatgatgaccgaagctaccactcatgaagcttcggtgttatagcatgtccgaagacgaaggatcgaaccgacttaaagatagaatgaccttttagcccataagggtctgagtcattgttgtaaacttttataaggggcattattgtaatttcttacaggctgtgtcctgtgtctataaatagtgaacagtattcctttactgttcacgcattcctgtaattgcaaacgcattgctcgggaattattatctgtcaaggcaaaggtacaaatgtacttaaacactatgttctgacattttagattcatataataaaatatgtgaataatgttacctatttatgatacatctatctttaatgtttcatgttttatatattatttcatattattttgtaagtctaatcacgaaggtacgaccttcgtgatattctactcatggtcttcgttcgaagttcattaaatccttgtggagataatgcttcagcggacgaagggcattaatatttaacattttatgttgccttgttcttaattcatagcatttgagaacaagtccccaacattggcacccacctccggtgaactcacttccactttcctgagacaatggcttcgttcaagaaccaagctggaactgcttcggctccgaagctgattctcccgataacaggcggtccatgctcagagccggctaacaagaaacagaagaaggaggcacagagaagagtacaacatgtaggggtacaaggacccttcatcaagtcaagatggtctcacattccaattaccttctctcaagaggatcttcaactcaaggattacccacacaatgatgctatggttatctcttgtgtgatcaaaggatttctggtccataatgttttggttgatacaggcagtgcagctgatatcatatttgctaaggccttcagacagatgcaagagcccgaagacaagatccatgatgccatacatcccctttgtggcttcggaggaaggcagattgtagcacctggaaaaatcacaatgccagtaactgtggcagaacctcccaagttattgggcccacatgcacctgttcttgtctcaaagacctcagactgctatgcatgtgcatcagataacttaacaggatccgtccgattgcctcaaggacatcggataaaccacgaacaaccagaaccgcgggattaagtaacacaaatcacatacaccaacctttttgcagcggaattcttactaccaaattttacaagttacaaaaattttacattattttatcggagtggttacaaaagtataagtttgaaatatatgctagctcaaatgaccatcctcaataagaagtatagaagggttacttagacttataagaaggccgagcccaccggcacttaacaccatcacaacagcacaaggttagacctgaaaaacaacagggaaataaaccctgagtatggaattactcagcaagtcttacccgactaaagaaaagactctcaagggtatgttggttatatgggagtcaaggtaaggcttttcaataatcaaagactctgttttgcagaaatgcttactaaagtggatccttaaaatccagttttatttgtcaagttacgtacaattacctgcaactagagttctttctaccctagttcaatcactggtcctgcactagccaatttcttaacaaaaacccatcatct

SEQ ID NO: 12191 - DNA, 228 bp, Zea Mays
gaaaaactagagctacatagagatagacgccgagctcagcagggacccaggcgcgcacccagaagagcagagtcgcgcgcagagagcacggcggccgagcttggggaagaagacgcaggacgcgcaggaccctgacaagggcgcgcgcgcggcaccagaggcctgcggccatggagattcgagctgggactcgcggcaagacgggaggccgagcgcggtgaactgcgg

SEQ ID NO: 12192 - DNA, 62 bp, Zea Mays
gatttatgcattttcaaactaaattttacaacacttcttgttgtgttttatgcttccattaa

SEQ ID NO: 12193 - DNA, 343 bp, Zea Mays
tggcacccggggcccagctgtcggcgcggaagggcagaagttgggctgcacgttgatcaggaaaagaatgggccgaaatgggagccgccagcccaacaggtaatcctttcctttttcttttatttttttccttttttttattttctaatccctaatccaacttgaattcaactttacattcaaatcttgtactaaatttatctttgagttatattgtgaccttaaggtaataattttggaaatatataaacttcctttatattttatatatcttctctttttttctcttcttcataatatttccaaaaccctaaagtgcaactttgggtttaattcaaatatc

SEQ ID NO: 12194 - DNA, 401 bp, Zea Mays
cgcgcgttgaccgggctgctccacatgcgcgtggcgacgggcgcggaaggagaggctggcacccggggcccagctgtcggcgcggaagggcagaagttgggctgcgcgttgatcacgaaaagaatgggccgaaatgggagccgccagcccaacaggtaatcctttcctttttcttttatttttttttccttttttttattttctaatccctaatccaacttgaattcaactttacattcaaatcttgtactaaatttatctttgagttatattgtgaccttaaggtaataattttggaaatatataaacttcctttatattttatatatcttctctttttttctcttcttcataatatttccaaaaccctaaagtgcaactttgggtttaattcaaatatc

SEQ ID NO: 12195 - DNA, 204 bp, Zea Mays
cacccggggcccagctgtcggcgcggaagggcagaagttgggctgctcgttgatcaggaaaagaatgggccgaaatgggagccgccagcccaacaggtaatcctttcctttttcttttatttttttcctttttttattttctaatccctaatccaacttgaattcaactttacattcaaatcttgtactaaatttatctttgag

SEQ ID NO: 12196 - DNA, 1786 bp, Zea Mays
gttcaatgctacctaatgatttcagacaatgttttaaagtgtacagttcagatacatgcttctttcctggaatgtgtgtgtgtgtgttttttttagtcacaaatccacacacatgtttgagtgagggcctgaggggcctgtagacgagctgaagttcagaatgaaaactaaaccccatcaaaattcagccattttctagcactaacataggagtatacagtaaacctttgtaaagtaagtggcacgaacactctattctagcactaacatatcagtacagtttaatatataattatatatacacaaaagccactagaactacattactgtggttccattccatcgttacactacaccactaagagcaataaggtataagtaaaaatgcatttgtttgtagatcatcctggcaatttaagactacaagaagtgtggtgcttacaattaaggtaccgcaggtgctttgaatcaagaaaaaaactgcatacttctttttttcaccatattgctgttttattgacttaaagctaaattaactgaaaggaggctctgcacttttttctctcttcatccaagcaacagccaacttgatcagtcccttcacttgtgagcagtcgaattcaccacccaatctaaaaatctacaaactctgctatccagaaaagttgatccccgtccaatctgtaagaaatcatcttgatgagcgtcttcagcgtcacatgcaaccctctcatcttcacgtttgaccaaatcgaaaagccgtgttcctgacactagttcaagaggctttgcgcctccgtctaggcgcgccgcacgacctaactccccgccgtgaagaaaggagaaacttcaaacaaggccactcgtgtttttgattcgggtggaaacaaacatctcgtggagaaacagctgaaccactcgtaacattccacctgcaacgagaccaggatttgtagcatagaatggttatatggtgtggggttttgcaggaacacttgtggggctcctgtcagtcctcaccaggtaataatttctcatgaatgaacttcttgactgagtttttttagttttcttccctttcttgaccacactgttgttcatcataacaaaacaaaccagtcacggccagttcctctgaatcatcatgatgtggacatatgtcgacaacactgcttatgacttgtagatttcatggtcttgggcaggactaattggcttggatcaggtaacacgtccacacaggtctagatgcgatgcccaattgtgtctcctacatgacaatcgaatattccaaatccagtctggttaggtgctgcctccaggttgtgttgtgtacatactacattctgggcgaattggggctttgagcatccataggtcactatcaccagacatctcgaaaggaaaccaaatgtgaatttcaatccctagatttctgctgttcaacgtggtgggactggaaacgaagatgcaaccgaattccatcgaaagactcttgtgggaaaacagaaaaaaccatgtacacgcgcacccgcgtggattctgtatggggcgagggaggatttctgggagcaagagagtagcaggcagagcagaggcttaggagagttatggagataaccgtagtttgctgctgcggaccttgaagcgcaccgcagcagcaagccgtcgttgctgctcaccgccgagcgccgacaggcgcgctgcagctgctcctgtcccaggccactcaagcgagtgctcggttagtcggttgtgagttgtcgtccagacggcgacgacgggc

SEQ ID NO: 12197 - DNA, 350 bp, Zea Mays
cccccctctaggtgctctgtaacatcccaatttttgatcccaaggttagaaaccctaaactcctaccccctctttaattctcttaagacctcatgtcatgagcatttcattcaccatacatacatcacgacttctagtagcacttcacatataatatttcattttggcacctagaaagcataaatgaatatttgtataaaagagaaaaggaattaaggaaaaaggaaaagagaaaaaaaagaaaaaaaaggaaaaccctctccccctcctcggctcgaccaattccgacccaccccctcccctccctctcgcgcccatgtctccccctccgctcacagcccagctcggcc

SEQ ID NO: 12198 - DNA, 234 bp, Zea Mays
ggaaaaatgtagttcccaaactagctcttagtaagaggattttagcccttcaattctctccgatattattgttcccaaacaagtattttgagtaggttctgcaacaagtataatttgactgttgactaggaatgtaattttgagatcaggttgcaaaacagtagcctcaaaagtcaaaacacgtcagatacacttctgcaaaccacgaaagcttaagtagagatgtgagatcac

SEQ ID NO: 12199 - DNA, 380 bp, Zea Mays
ccaaatgagccatttgctgagtacgttaatgtgtattcaccctttccttcacacaaaacaccaggttgtccccactgcaaccaatgctcaggagaatatgaatgcaatgaggtggatttctaggacttccaggacttcgaggagttctagacttagattagctcaatccccagtcagttgcctgtggaaggcctttatcttagctacattctgtttctagcactttgatacatgttaagtcaatgactatgtggacgtctttgacatatggttgtaataagtttaatactctttatgttattattcgagcactgcacaatgatgttcatttatataatcactgtgtacgtgagttctaatcctggaacgtacatggtttg

SEQ ID NO: 12200 - DNA, 103 bp, Zea Mays
gaaacttttaatggcgcagcgcaggcgcagcgagcaaagggagaggagcacagcatggatggcacagttcgctgaggcaaaggagtgcacaggcatagtagcc

SEQ ID NO: 12201 - DNA, 377 bp, Zea Mays
cataataacagagtgcatagagataaatgtcataaatatcataaatgtatttattacatagcggaagtcttacaaaaataaatgataaaataaaacgaactaattattattccctggtgccataaagctgactgggagacgccacctagatcaagtcgaatgcctcagtgttaggcagctcctcttcgaccacctgctcttctcctgtggggggtgtgagacagcaagagtgagctcacatacgttcataactcaacaagtcgtggggaataacgtgcatgaactcaacaaaggtgggagttaatgtgaagtgtaaggctgatcaacaaaatagaggctgaagctgagcattgcttttataagtcggtcaaaatttt

SEQ ID NO: 12202 - DNA, 1753 bp, Zea Mays
ctgggttcttttatatgccgtgtcttcttccctgcgctcgtcgcggtaggctccagctccttctgccggccgctcgttccacctccctgcaccgcgccgtgaaggtctgtgtctccctgctcggtttccggcccccgtcagcagctcctcaaatccctgctccgtttcagctttgccgcgcccctggacgcctgcttcttctctgctcggcgcccctgcgcttgctcgctcggttcctcccatggccagctcgccgaggatgccctgccccagccgcctctagctccctctccctgagctccttccaagccgcaccctctctctctcgtctttgtgctgcacgtcctggcgtcctctgctcgccatggccgtgtgagctccagcgccgtgctctgctcgcggagctcctccagctcgccggagctctctgccgcgctccatctcctcccagtgcacgcgctctgcttcttcctctccagctccagctcgctgcgcgtcctgcttcctgttgtcgcgagctccagcccagatttcgccttgtcgcccagctcgactctgccctctgctctagctcgccgtcgcctcttcgtgctggccgactagtctgccatggtcgtgtacagttccctgctcggccaggatggtcgcgccgtcgatcccgcttgagccccttcgcgttcgtggaagtggctcgactctgcccagttcgcgttctgctcgcctttgcgtcgcgcgcgtagcgttccgttgttcttgcgcgtgctgccgcgaagctccctgttcagttcgcctccatcgcgttgtcgtgcgcgcgaaactgctcccagtcgatatcaagtcggtgacgctcgtgttgggcatggtaaaacgctgcgtgtgctggtgtccgaactcgtcctagtcatggcgcttgataccgtgtcgtgctgtttctctgcgcacgtcctcctgttcgctgtcgcgactgccgtcaaatcatcggagtcgctcaactcaccaatcgtatcttggtcggtcatcgatttcatattcgtcatggtcctcacgtcagcagtccctatccgaacttgccagctcgccgactgaccgtagtgttccttgaattccctcgtcggccgacctcgcgacttagtttgtccgttgtgctggtcgctgtcccatactgtacctattagcttggatcctgcccagctcgtcgtcgcgtcgttcacagtcgagtcgtcgaacccgtcatcccctgctcaatccccacttcaccagctcgctccagacttcaattgaaggtcgtcgttgatccgtgcgtcatcaagaaattccaagagtcaagtgaagacggagccagcaacgtgatattcaccaagtgcacgacaaaaagctcgaacatcctgcgcgactcaagttcggttcgtcaaaattattcagtcgaggaaaagatcttcagcaattgattaccgaagaaaagaaggcccctggatgacgtcaaccggaaatcgtcgttgtgcttgcgactattgtgtccaattagtctaggtaagttgattcgtattccagtcaactaggtctataaatagattaaatagaattgtgtctcaaaaaatgttattcatttagcatgcgtatattgtgatgatcgatttagataaatcggtaaatcaagttaattaagatacatagttaaagagttaataaaaagctagaaataaaaatagatgttctagtgttattatatcaatttggttaatggatgtagtcg

SEQ ID NO: 12203 - DNA, 219 bp, Zea Mays
cgaaaataaaacttgatggtggatccatcacggtcgtgatgggttcaacatcggaaaagatgtacctctgccaggtaccagactttgggttgaaattaataaagctgagaccggacggttgacttgcacgagaagggagtctcggtgtagtgtctccgtctgagtcgattaaggaccgtctcgatgtaggcttgctgatttaggaccctttaactggtc

SEQ ID NO: 12204 - DNA, 406 bp, Zea Mays
cctgcctctgctctcctccgccttttttcctctgccccttaggaaggccctggacatccccttttatagatacaaggagatggcccagctgtacaatgggggtgtagctatgtgctaacgtggccatcggagaagtgcctgagccctgtatatgtgctaacgtggatgtcggagaagtgcttgagccctgtagaagcgtagctgatggggcggcctggggtcctgctgacgtttctttgctttcgtagaggcttgagaacaatccgacgtcatggacgcacgcggggaaccatcattacctgttaccggagtaatctagatgggacaccggtcttgttccttggtagcctgaggcagctagctaggggtagggtaatgatgtatatgtatcccctgtggcgcggtc

SEQ ID NO: 12205 - DNA, 182 bp, Zea Mays
tttttctctctctctctgcgactgccggtggccccctctgccaggtcgtcgtccccaacagaacgcgcgcctggcgggcgaaatcccctccctgcgtcctgttccgttcattgaaatcacgagatggccgccggattttcttcatcagggctataaatctctttctccccagtgccttggcc

SEQ ID NO: 12206 - DNA, 237 bp, Zea Mays
tacaaagtacactttacattccagaactcaagttttacattgtagaatgagatgtatttattacaagtcctgatagtactcaaagtgcataacttattacaataattggaagggtgaagcctttccataagatatatacataaacattctaagcttcaagtcatccacatgaagtaactaacccaaagataagggaataaaccttctcctacaaaaacaacaagggataaaaccctg

SEQ ID NO: 12207 - DNA, 1128 bp, Zea Mays
ttcatgcatcgtaaagaattaaatcataaaaaacaagtttattacattcaggcttacaaggtattacacatattacatttcagaagtttttacagtagcacctagtcttccctaagtactacttctgcagcttcgttcaagagttgattgacaacttgatccatgatagcttcagccatctttttaatttcatcgtcatctttcgggggagggcccggggacgctttagtaggatctgaggaaggacaggacacagctacattgctattacaaattgcgaacgaagtttaaaattaaaaattacaactcaataaaaaccactagttaatacctatttgcccttcgggctccacgcttttctcagcagcctctgctacttttctagcatcatggatgcccttttcgcttttttggataatttctcgggccatttctcggccaccattgtcccagacatcggtaaaaaattttccaccaaccatgctagcttcggctgaaggatcctttgcatcttcgaagggcaaggtagcttcggattgcgctaaaatctttacatgctcacagccctttttctccaaaatggtggcaattcctctggcacccgaaaaagcacatatatctccgcggctatttaaaatttcttcgaaggcctcagcttcgtggctaatccattcaatggggccttcggggttgcctcttgtaaagttttcttcactcgaaaatgcgccaacgctggcgaagctagttttcattttcttaacacattctatagatttgttatagcatctcttcttggacgcacgaagctcttcaacagttccttctaaatgatttgcccattggtcgctaagttctcgctttgtttcttcaagtatacattcttctctagctctggttagttgttttcgaagatcttcaatttcacgcttctgagcctcagcttgacctttaaaagtagcttcgtcctcttttattctacttatcaatgaatgcaatattttgtctttttcgagaccttccttccgtagttcaattacttcggaacgaaggttgctcagggccatcacacatccttcatcttcggcatctttttgggccctgagggcattgctaagtataaggccctgc

SEQ ID NO: 12208 - DNA, 215 bp, Zea Mays
atctcattcttttgaacctcagcttgagccttgaagatagcgtcgtcttcttttattttgtttatcaatgaaattaatatcttgtctttttcaaggccttcgttccttagttcaatcacctctgaacgaaggttgttcagagccattgtataccctttatcttcaatgtttttctgtgctctaagggcattgctaaggattaggccctgcaagag

SEQ ID NO: 12209 - DNA, 345 bp, Zea Mays
ggttacaactgtctttttacagatttaggtgttactgtctttagaagaagtgatgattcagtagcatttaagggagtattagagggtgagctatacttagttgattttaatagagctgaactcgatacttgcttaattgctaagactaacatgggttgactctggcattgccgactagcccacgttgggatgaagaatcttcataagctgataaagggagaacacattttgggactaacaaatgttcattttgagaaagacaggatttgtagcgcatgtcaagcagggaagcaagttggtgttcatcatccatgcaagaacatcatgacgactaacaggctgctt

SEQ ID NO: 12210 - DNA, 80 bp, Zea Mays
ttgaagcagcatcaacaggtgaagctgcctggcttagagctgctctggaggagatgaaaggggagcttgctcatctaaag

SEQ ID NO: 12211 - DNA, 188 bp, Zea Mays
gccaccctcccccctttttcccttggttggccgccccctctcctcccatggcagccacccaccattttttcctcctccctagatcttcccctcccccacgcagcaaggatcgagaagaggaggagcaagatggattgaagaggaagagaggatcaaggagatgttctaccccccatctattgcagatt

SEQ ID NO: 12212 - DNA, 853 bp, Zea Mays
aactttctagattattaaagagtgcattcatatgattcgtgaaactctagttatgtttgttttactgtggctgttcctgtttgcctgataaaaatgagcgggtctgttcactggtaggttttatcaggtaaatggccgaattggctcttccaactctggtgacttctgtagagggataaaagttcttactgccagtagaattccatgatttttggttgagtagtttgtgagatatcgaattttgaagttaactacgctgttgtctgaaacagattcagtcagttatcttgtcagaggttttagaacttgtagatggcagaatttaattatccattgaataccgaagttgtagagtattttgtgtagatactcctagattatttatttgatatcaccactgttgggggccttcgtcctctgaaggtcctcaaaaacgtgatttaacaatatcttccaagtgtgacatgcaaataggtatcttcggactcgagctaaaagcatctacgatgtagaaagcatgatcgtgacgaaggtggagttgctccgaagctacgtgcagaggagcttcggctaaatggcgggaaaaggaaccgacttaaaggggaaaaggctatctagtcctcatagaattgtctataaattaataataaatgtaaagggcatgaatgtaaattcacacaggctgcgccctgtgtctataaatagatgaacagtatccccgtactgttcacgctttcgcatccaacttttgcgcttgccttctgtcgcgctcaaggtacaaatgtaacttgatattgttttcatgtattcatgattgtttaataataaacatttatattatgttgtcatataa

SEQ ID NO: 12213 - DNA, 701 bp, Zea Mays
gttttattgtggctgttcctgtttgcctgacaaaaatgagcgggtctgttcaattcactggtaggttttatcaggtaaatggccgaattggctcttccaactctggagaggacatatgcattgcattcatatgcattcattgaagtggtatttgcagatggtgtggttttatactctaagaggtatgaaggcagaggacttacacattgcattactatgcatacattgaagtgatatttacaggtattgttgacgcatgaaagtgttatacaacctattgtggttgttcgaggaaatgagatggcattggttattttgggactattgagttctatatctacaagtatttctgatctcaattgtgatccctttaaaatgttgattaattcaattttttggtttaaatatctcgtcgaaacaattcacttgctgagatgtttcatctcactcttgcattactcaatgcaggtacttgattcatgttgggaatgaggggagtagcaacacgtccaccttcactctcataataacggtgcccaggcacagccatgatttaattagaaacttcttgtcaaatgatgtttttaactagtcgtgcacactagttaattcagttcatgtcgttatggttatcttcccattgctagcagattattaatgtctagtatgttttcttatcatgatatctgtttatactctat

SEQ ID NO: 12214 - DNA, 426 bp, Zea Mays
cgggattgtatcgtttgccatttttgtgccatgtcatctgtttcgcggattcctcggtcatgtatagccgctggatcctaggtatgaacggaaggtgccgtaggattttcatggggatgtcaagctgcctcttctggccatcagtagagtctacctccatgaacctagaggatttacactttggacagtactttgcttcctagtattcttttctaaataggatgcaccccttcgaacaagcatgtatctgctcatatggcatcttgattgcacgaagaagtttttgtgcctcgtacatgctctttggtagaacatgaccctctggaagcaagctaccgataactgtcaacataccatcgaagctgtctcaactcaggctatactgcaactttaacgccattatgcgtccaatggcatccaattgag

SEQ ID NO: 12215 - DNA, 267 bp, Zea Mays
caaatttaagaagtattagtagtgattacattatcggagtttcaaaaatagtaaccataatttttaatgcagcggaaataactaatggagaaaactgagtaacatggtgaagcctggccacgctactcctcctggtcctctcctgcgaaagcagtaacccacttgaccatctatcccggtggcagggatgaaggccaagtcacaccatcaaccaaatcaaggaggtacctgcaaaaattataccacaagcaaggctgagtatactaa

SEQ ID NO: 12216 - DNA, 223 bp, Zea Mays
ggtgatgaaacaactgagttctgctgtttttgctcaaaggtggtgcccaagcaggaggaagaacactaaacttatttggggaggatgttttgcctcctgttaatgtaataatcagttgcgcactcgaacacccggttatgtaataagtactctttctatatttttatgtgaatgtaaattatattattgtaatcctttccgctcattctctactccgattatg

SEQ ID NO: 12217 - DNA, 150 bp, Zea Mays
tattaggcttggtttgggtactctaggaatgagacggattgaagtggattgagatgtattgggagagtttttgatctattggggatttaaacactcttcaatctctccaaaccacttcaatccaagagtacccaaactaggccttacacg

SEQ ID NO: 12218 - DNA, 502 bp, Zea Mays
gccgccgcaaaacccggggcgcgagcccgggcggagcggccgtcggtgcagatcttggtggtagtagcaaatattcaaatgagaactttgaaggccgaagaggagaaaggttccatgtgaacggcacttgcacatgggtaagccgatcctaagggacgggggaaacccggcagatagcgcgatcacgcgcgtcacccgaaagggaatcgggttaagatttcccgagccgggacgtggcggcagacggcgacgttaggaagtccggagacgccggcgggggcctcgggaagagttatcttttctgcttaacggcccgccaatcctggaatcggttcagccggaggtagggtccagcggccggaagagcaccgcacatcgcgcggtgtccggtgcgcccccggcggcccttgaaaatccggaggaccgaattccgtccacgcccggtcgtactcataaccgcatcaggtctccaaggtgaacagcctctggccaatggaacaat

SEQ ID NO: 12219 - DNA, 237 bp, Zea Mays
aaaaattcacataattgatatgataattattagtctcaaaataaatatcttatttatgaatagggttggttgaatattatgaatttttatggttatttaaataggtatttcgaaattttaaaaaaaagaaaagaaaaagaaaaaaaacacaaaacctaatctatctaaccctagccggtccgtttggcccagcggccggccgcctcctctccttccctaagccgcgccctgctccct

SEQ ID NO: 12220 - DNA, 245 bp, Zea Mays
taaaaattcacataattgatatgataattattagtctcaaaataaatatcttatttatgaatagggttggttgaatattatgaatttttatggttatttaaataggtatttcgaaatttttaaaaaaaaaaagaaaagaaaaagaaaaaaaacacaaaacctaatctatctaaccctagccggcccgtttggcccagcggccggccgcctcctctccttccctaagccgcgccctgctccctctg

SEQ ID NO: 12221 - DNA, 5467 bp, Zea Mays
ggacttgttctcaaatgctatgaattaagaacaagacaacacagaaaatgtcaattggtaaagcccttcgtccttcgaagcattatctcccttaggatataatgatttttggacgaaggttatgaaggacgtaccttcataaacataacgtatgatgacgaagaacaaatcataaagaatatgaaggattacatagataattatatcttattatcaatttattattattgcagagaaacagaaatagtatcgaattacagatgtaccttcagcttggaagggaatgaaagtacaagcgtgacgcaaaagtaaatgccaaatcagcgtgccaagtacggggctactgttcacctatttataggcacgggacacagcccatacaaaattacattcatgccctttacatttgacaataattctatagtaatccaccgaggtctgaatagccttttcatctttaagtcggtttcattttctgctaccacgccgaagctttcccgctcatatcttcggcgctgtatgaaccttcgtattgttttgggtttctcctactgtgataccgactcgagtccgaagatacctgttcacacattatactccagaaattttgttaaatcctgtttttgaggaccttcgtaagccgaaggtccccaacaaatctcaaccccgagattaagaggaactaggaaagaggtgggaaaattctactcgtagctctgcttctctctcccaagtagcttcagcttcactatgatgacctcattgcactttgcacatcttaatcactttattcctcgtaacacgagttaaattatcaaggatcttgatagggtactccatataagtcagatcatcttgaacactcagctcttccataggtagttgctcttctggtaccctaaggtacttcttccactggtatacgtggaagacatcatgtacatccataagatggtcgggtagttccagttggtaggcaacttcccccacgcgctttaggatcttgaagggtccaataaagcgaaggaacaacatcccttttactttaaacctcctcataccctggatcggtgacaacttcagatacatgtgatcaccctcaaattctaactgccttttctgggtatttgcataccttttctgcctagactacatagttctcaaattctaccttatcaactggacttgttcttctgcctcttgtataatctctggcccaatgaactgcctttcaccagtttgatcccaatatagaggacttctacactttctgccatataaagcttcaaacggggacattttcaaactggcccggtaactgttattgtaagagaactccgcatagggtaaaatcttatcccaactgccatcatgtttaagagcacaagctcttaacatatcttctagtacttggttggttctctcggtctgcccatcagtttgaggacggtaggctgagctaaaattcaactttgagtccaagcactcatgcaacttctgccaaaaccaagaagtgaactgggatccccagtctgacacgatcttcttaggcactctgtgtagacaaactatccgggccatatacaactcatctagcttggcctccgtgtaattagtccttacaggaatgaagtgagccacttttgttagtctgtccacgatcacccaaatagagtcatacccagcagaagtgtggggtagagcaacaatgaagtccataccaatttcttcccacttccactcgcgtaccttcagtgggtgaagtaatccagtggatctctgattttcagcttttaccctctagcaaacatcacatactgccacatgtgaagcaacatccctttttaggccataccaccgatacttttgtttcagatcttgatacatcttggtactgccaggatgaatggagtaggctgagtcatgtgcttccttcaatatggtttcacgaagactatcaatctcagggacacaaatcctgttctagaaccagatcgtgccctgctcatcttccatgcatgaagtctggacctctaccttctgccatcagatctctgatctcttgaatcttggtatcaccaacctgacctttacgtatttcttattctaaggtaggttccacttctatggtaatcccttcagtatgagcaactattcttagattgagcttctcaaaatcttctactaaatcatcaggtaactgggcgacaatagttgcatgaacatgctcctttcgactcaaggcatccacaacaaggttcgccttgcctggatgataatggttagtggatttcgaagtcataatctttgatgagctccaaccaacggcgttgcctaaggttgagatctttctgagtgaagatatactttaagatcttatgattagtatagacttggcacttagttcccataatataatgcctctaaatcttgagagcatgcactacggctgccaattctaagtcatgagtggggtagttcaactcatgtttccgcaactggcgagacgcgtaggcaatgacatgtgcttcttgcataagaaaacatcccaagccttggccgcacacatcacaatatatgtcaaatcccttctgcagatctagaataaccaacactgggggtgacatcaatataaactttagttgattgaaactctattgacattcatgagtccacttaaactcctttcctttttctagtagtgaggtcataggcttcgctatcttggagaatccctcaataaattatcgataataacctgcgagtcctaggaaattgtggatttcagtgaccgagttttgtatcttccatcccactatctctctcactttagccggatccactgatattcgtccattagagatgttgtgcccaagaaatggtatctcatcaagccagaactcacacttgctatattttgcatagagttgattatcccttaacttctatagtaccaatcacagatgttcctcatggtcactatcattcttggaataaatcagaatgtcgtcaatgaataccacgacgaacttatcaagatactccatgaacaccttgttcatcagattcatgaagtaggttggtgcactagttaagccaaatgacatgaccgtgaacttatagagaccatatcgggtagagaaagccgtctttgcaatatcagaatgcctaatttttatttaatgataacccgatctgagatcaatcttagagaataccctagcacctctcatctgatcaaataaatcttcaatatgaggtaaaggatacttattcttaattgtgtcatcactaagtgatctataatcaacacacatcctctgtgaaccatccttcatctgtacaaatagaaccgatgctccctaggaactcagacgaatgtaccccgcctcctgtaactttgttacttgtttcttaagttctttgaattcttctactaacatcctatatggccttttagaaataggagcggttctaggtaagagatcaataacaaactcaacttccctatctggtggcatcccgggtaactcctctggaaagacatctaggaactctctaaccacacggatgtttctgcccacaaatttaccgtcaactatttatatggcgagtctggtggagggggttatggtaatcatgacttcaaatctttctccttctggactggtgagtcccacggttccgctagcacaatgtataactaactgcctttgctttacttaaccatgacataccaagaatcagatctatactgctctcttctaaagtataggcatagaccagaattcccttcccatgattgtcaacgttaatcggttggtcatataatttgcttcaataggccctttaggggtaaaatactatcaggggtttttacatagtttgaagtggtaactcatttctattgacatatcgagcagaaatgaacgaatgcattgctccataatcaaataatatagctgcaagaactgaattaatataaaacgtaccgatagcaatatcagcgtcgtgagcagtagcattagcactgacttggttgactctagcaatactaaaccccttgccggaagccggactctgttgcttgccctgaatattgcttcaagcgggtgtgttggggttcctcttcgtacaagcattggcatagtgcccaacctcaccacacttgaagcaagtggtgattgtactctgtccagcaggtctcgccggggtgccagtgggggcagcctgacgagtatgtggagtctgcggagtcgcctgtggtgtctaatgagcaggtcgttggtaggactgttgccctcctctaggacgagctggtgtaccctggggtggaacatagcaaggacggatgctactgctcccctgtccctaggtagccttcctcttcatctcgcccagctgaacacatttgtgaaaaataaatgataacaataaagcgaactaataattattccttgacgccataaagatgactggtagacgccacctagattaactcatactcctcgttgtagacatcctcttggaccacctgttcttcgtttgtgtggggagaggggttatatatcgcaagggtgagctcacaaaagatcacatctcaacaagttgtggggaataatgtgcatgaactcaccaaaggtgggagttcatgtgaagtgtaacactgatcaacaaataatgattaaagctgagcattgcttttaataagttggccaaattttattagcagttactaaatgtaagtatataccaaaccatagtaataatagatcaaaattaatattaaaccacaatgcgatgcaaatgaccaattaaatttatttccaaaagttactcatgtgagggtccgagccgctcatgaccgtgagcacggctgatataccagttttacactctgcagaggttgcacatctttaccctcaagtcgtattacccatctgccatgggctcatgaatcccatacacctataccaaggaagcgaggcaggctaacactacgaggcctctacaaagttccactagcttcagaaaacccgctacattttctagggagcgcaacataggaatcccccatctgaaaagctattgcagcaaaatgaacctgagaacctccctattccgaccactcccctactacccttgcccctttcgggtgaggtagtcctccactagctttcctaattagttagccaagggcgtcccataccacccttgtggtagcactattttccctggtggttctccatgttccaattaacataatgatcttgtcatgaacagtaaataacacatttgtaataaaacatgatcatgaataatgtgtatcttaacacccaaaaccacctaaagcaatagcaagtactacccaaaagttcagtggtaaacaaggtataaagatagccaaactggggtgacctattgggtcccataaaaattaacctatgcagatcataatgattaatag

SEQ ID NO: 12222 - DNA, 344 bp, Zea Mays
gaggggaaaagagggctgcaccgagcggtcccacctgtcggcaccatttctcaagccgggctgtcgcgaggtgaggtgggccgagcggtgaaggttttggcccagccaacatttgactatttctttttttttatttctattttcttttcttttataatttttgttgtttttttttcaatttcaaattttcaaactcaaatctatatcatccatttgaattcaaatgcatcaatacaataacgccaacatgatatgcacatctctacatttatttattcatcatttggctaattcagttcctttagttgaatatgaaaaacggaaaaattaagtgatcaaccaat

SEQ ID NO: 12223 - DNA, 1308 bp, Zea Mays
cctccacttagtgttcaagagggttttatatattaattttgaagagggtataccaatttgaaattatatcaaaaataagataccaattgaaaaaaaattcttaacccaaatttgaaagactacatttttgaaattggtggtggtgcggtccttttgctttgggctaatactttctccccctttggcatgaatcgccaaaaacggatacttgtgagtgaaatatatgtggcggaaccgcccgaattattccaacttaagtgcccaagtcgcacccttaagtgcagcaacacacttaaacaggaataacccgtcagtccctcggatctagtccgataaagccacttaccaggatcgaataccactagctcacacgaaggtgaggcacagagaaatacaataaaacataataccacaaatttaataagtatcattagtgattacattatcggagtttcaaaaataataaccaaaatttttagtgcagcggaaataactaacggagaagaaccgagcaacatggcgaagcctagccacgctactcctcttggtcgtctcctgcggaagcaataacccacttgaccgtccatcccggtggcagggacgaaggccaagtcacaccatcaaccaattcaaggaggtacctgcaaaaattgtgccacaagcaaggctgagtatactaatactcagctagacttacccggtgtgaggagtctactcctctacctctagacatgcagctgtttggctgtggggtttggttgccaaaagtactagctgagtttctaaatcaagttttaactttgtcaagtttaagtgtgactctcttaaggctaaatgtgtactatctactcatacatggtatcaaacatatttagcaatcaacaacttgtgtcaactcatcatatttccacttgttactcaatgtagcagcatggatcaagcagtctcattagctgcgagaagcagacgattcgaatcgagtttttatccttgcaaggtaaacctaaacacacgacgtggcgaggcactccgtccccacacacatcaaccgtccccatcgattccccgtcagcagatcagggctcaccgccttggcgtacaatgcctcactgaccccgactggccgtcgtgcagtgaccgcacttgtacccaccataaccggaatgggagaccacgtctcaggtcgcgtgaggggatatgtccactgccgggttcactcaggtactaggcttaccgatttaccatatttctcggcatatgtttagtacgttcaaacgcttgactcacggtaccacaccttaatcctta

SEQ ID NO: 12224 - DNA, 3087 bp, Zea Mays
ccacgtcgtgtgtttaggtttaccttgcaaggataaaaactcgattcgaatcgtctgcttctcgcagctaatgagactgcttgatccatgctgctacattgagtaacaagtggaaatatgatgagttgacacaagttattgattgctaaatatgtttgataccatgtatgagtagatagtacacatttagccttaagagagtcacacttaaacttgacaaagttaaaacttgatttagaaactcagctagtacttttggcaaccaaaccccacagccaaacagctgcatgtctagaggtagaggagtagactcctcacaccggataagtctagctgagtattagtatactcagccttgcttgtggcacaatttttgcaggtacctccttgaattggttgatggtgtgacttggccttcgtccctgccaccgggatggacggtcaagtgggttattgcttccgcaggagacgaccaagaggagtagcgtggctaggcttcgccatgttgctcggttcttctccgttagttatttccgctgcactaaaaattttggttattatttttgaaactccgataatgtaatcactaatgatacttattaaatttgtggtattatgttttattgtatttctctgtgcctcaccttcgtgtgagctagtggtattcgatcctggtaagtggctttatcggactagatccgagggactgacgggttattcctgtttaagtgtgttgctgcccttaagggtgcgacttgggcacttaagctggaataattcgggcggttccgccacagctggtatcggagcgaataccatcacagagaagtcaataagtcatgattccaaccttttctaaagtaaaatttgcttagaaacaaatattggatagatcgtcaggacgatcaggatagccctagaacgtgaagccctaggaatagatgggtagctaggtggctatttatataggccataaaggctactactactattaaataggatgctgtagaagcacccgaagaattagttaggtctgagaagacgactagaatgagcatgcatcatgattgtcgcattataattttctcttatgcgtcaacatgcttctctcacctttattccaataataagaacttgtgaataatgtgatgtactgttatgttaggaactataagaaatgttttaccttgtgccagatggtaagtcttgactaggtcgtgttatgtgtttctcttgccttgctttctaggaggtacggtaactatttagtccattttgcctctaaccaataaaaattgttgcctgtttttcccataaaagaccccccattttaaacaaccttgagtttagcaagtgaaacctcaaaaaaaataatcattcttgtgttggtgttttctagcccttgtgtgttgcactattggtgatgcacctgcacaacgtgtaacccccatagcttgaccgctagaccaacccaagtctccttgtgcacttgttgtgtcaaaaaaaaattgttgttggtgtctagttgcgcaaaccctatcaagaccatgtttctttccataagtccttgcccctaaaaaaaacttcatagcatttttgttgatcatccgagcagatcttgttttcctacctctccttgttccgaaattggtaatcattttccttgtgaatcctgttgtgaccttatcatccaaatctccggatcctttaatgattctgccctattatctggttatctgttataacctgttcttaagtatcggatgatgatctgcctaaatctctcatttctggtcattctcatacccccttctccgaggatcatgacgcttgtgttatcaacttatctctaaatggcatatccatgtgggttaatggatttcgctgttgtccttggttctctcatgtctctaaaagctcaacaatctattttgatctcatggtcggttcatcctcatatcaaatctcgtgctaatatctgatctgataatctccatgttgatcataaactagttttctgagttgaagaaaattctcatgtgatgctcttttgccaaaaatctatgtttcaactcttgtcatgatcttatttttctgagccatactctcatgggctccatctatttatgctatgtggaattctcattggttacgtttggtaatggtgttatagctaacgactgatggtgccgcgacgagaccgagagcctactatggtgcacacatggttgagctgctcggcacgcgctggtatcgtggttaatagttgtgatccattacgaaaccatactgatgtgctatcttttgtggacattctctcaaagtgatcgctgcattttgtctcaacatgccgcgatattctccccaaatctatctccagtatcttgtcagatcacatctcataatttccatctatctctggcctgggagttacatgcttctccacccttgaagatcctcattcgaatctcgggacgagattctttttaaggggggaaggctgtgacaccccaggtgtcagtttcgtgttatgtcgggagatttgtccctaacttgaatgctccgtaaaaatttcctatttctcgatcgtgtctatctctgttatcaggctttctcatggaagttcaccaaattcggagttaattgatcgcgagaaacaaccaaattttggaacgtgttaaaacttctatttctcggaacgaatgcatactcgaagatcattctcggattataaacctcatctgaagctctttaaatcaaactctcgacgattgttatttgatttgagcccgagtctaattcctcgaaccccgatcgatgtccgactattttgatccgagtccgtactctcacacggaatactcagtacgtcgttctctaattatttcttactcgacgcggccgaatatctctatgtccaaaccgaattcagaaccccgtatcaaccgcgattttaaaatatcacgattcgccttctccgactaaaaatccaaattcgatcaaatctcaggacgatttattttcgaatcacgcgtaggtaattattttcgagcgaaatcaaattagactctcggccgaattaattgc

SEQ ID NO: 12225 - DNA, 2319 bp, Zea Mays
gaacaattaaatatgttgttattattgaatcatttctatttttattactatgaagaaatagaaatgatatcctgttacaagtgtaccttcggcttgagggaaggtaaagagtacaagcgtgatgcgaaagcaaatgccaagtcagcgtgaacagtacaggagtattgttcatctatttataggcacgggtcgcagcccatgtaaaattacatctaggccctttgcatttgataataactctatagtaattcatcggggtctagatagccttttcctctttaagtcggtttcctttttcctgtcatcatgccgaagcttccctccgcacatcttcggctccgttccatccttcgttctccttgtgtttctccatgcagtgattttgactcaagtccgaagggtccatgtcctgtaacaccccgggatccacaaacaccccagaatgctactaaactacacctctaacattcgtatataaaattttgacagcatctcctttgaaaattgtatagactgggaagcaacaaagtataaatagatatcatgataagaaaacataatcgacattaataatctgctagcaatgggaagacaaccataacggcatgaactaaattaactagtgcgcacaactagttagaaacaaacatcctttgtcaaaaagcttctaattaaatcatgactgcgcctaagcagcgttattatgagagtgaaggtggatgtgctgctacttcccacttccctggacgagcaacaagcacctgcattgagtaatgcaagagtgagatgaaacatctcagcaagcgaattgttttgacaagatatttaaaccacaaattgaattaatcaacattttaaaagaatcacaattaagatcagaaatacttgtagatatagaacttagtagtcccaatataaccaatatcatctcatttcctcgaacaaccacaataggttctataacacttccctgcgtcaacaatacctgcaaatatcacttcactgtatgcataggaatgcaatgtgtaggtactctgtctttatacctctgagggtataaaaccacatcatctgcaaatatcacttcaatgaatgcatatgaatgcaatgcatatgtcctctgccttcatacctctaagggtatgaagccgcatcgtacccctcctcgggcaacgtacgatgctaaattgtaccggtacggtcggaccataggtcacgacaaaacttcagatgcaaatgagtcatgcaatgtatatggcatgctacatttatcaataaacttcacttccttcagatacaacacaaacctcaaataatacttcatttaccttcagatacaatgccaacctcaaataatacttcatttaccttcaggggtgtgaattaatctcatgagtcatactcgaatcataatcatcatcaatatatgattgagcatcagtacaatgcaagcaagtaaagcatcaccatagagtccaattatgaaagaatccaatacttctgaatattagattgtagacaatagaaataacaggtccaaacggaagcaaccaccgctacattcacttgccttcaacgaagaagaagaaatgtactaggcatgatctggagtatagccacctgctagcgggcataaaacttagtataaatatttcacaaacatttgccaacaatcaataaatcgctcctacacttgaaaccaagacctggtggtaagcctcccaccctgaaccacatgccatacagtagtagcgctgtttgttaattttgtatctttaaaattataacagtggtgatatcaaacaaataatctaggagtatctacacaaaataccctacaactttggtattcaatgaataattaaattttgccatctataagttctaaaacatctgacaagataactgactgaatctgcttcagacagcagcgtagttaacttgaaaattcgatatctcacaaaccactgaaccaaaaatcgtgaaattctactggaagtaagaaattttatccctctacagaagtctccatagttggaattgccaattcggccatttatctgatgaaacctaccagtgaacagacccgctcattttggtcaggcaaacagaaacagccacagtaaaacaaacataactggagtttcataattcatatgaatgcactttttaacaatctggaaagcttatgaaattatctacaacttttcttacaaacccaaggttgaattctgttgataaaagtgcctaaatcttaagagaacagattctgcacagaattatgagacagaaaaactgctataataaaactgcaataac

SEQ ID NO: 12226 - DNA, 194 bp, Zea Mays
taatcctttaatccccatgatccacaacctccaaaagcacataattacagagaggaacaaggatttcaacatacctagggttttccccaagaaaatcttcaagaagagatggggaagaacatctccttgatcctatcttcctcttcaattcaacgtgcccctcctcttctcgatccttgctgcgcgggggggga

SEQ ID NO: 12227 - DNA, 217 bp, Zea Mays
gaaccttctaccatttatcatgcttgcaatacttcatttgtactttcatgtaagaacacaaaagtagttgctaagaagttgggatccaaatgcaagggagacaagacttgtatttgggttccaaaagttattgtgactaaccttgtaggacccaacaagagttgggtacctaaaacccaagcttaaattccttgcaggtttatgcatccgagggctc

SEQ ID NO: 12228 - DNA, 1868 bp, Zea Mays
gacagtccggtacgccagccacgtcaccaggccgttgggttccaaccgttggagctctgtgatgtgggcccgcctagctgtccggtggtgcaccggacaagtcctgtagactttccggtgtgccacccgcgcgtgctatgctcctctgcgcgcgctggcgcgcatttaatgcgttgcagtcgaccgttggcgcgaagtagccgttgctccgctggctcaccggacatgtccggtgaattatagcggagcagattcccgaagctggcgagttcagagttgctcttccctagggcaccggacactgtccggtggtgcaccggacagtccggtgaattatagtggagccctctgaaaattcccgaaggtgaagagttgggcgtcgagttccctggtgcaccggacactgtccggtggcacaccggacagtccggtgcgccagaccagggcagccttcggttatccctttgctctctttgttgaacccttttcttgttctttttattggcttagtgtgaacctttggcacctgtataacttatagactagagcaaactagttagtccaattatttgtgttgggcaattcaaccaccaaaatcaattagagaataggtgtaagcctaattccctttcaatctccccctttttggtgattgatgccaacacaaaccaaagcaagtatagaagtgcataattgaactagtttgcataattgtaagtgcaaaggttacttagaattgagccaatataactactcataggataggcatggattgtttctttgatttttgacattttggaccacgcttgcaccacatgttttgttttgcaaattcttttgtaagttcttttcgaagttcttttgcaaatagtcaaaggtaaatgaataaggttttgcgaagcattttcaagatttgaaattttctccccctgtttcaaatgcttttcctttgactaatcaaaacttccccttaatgaaatctcctcttagtgttcaagagggttttaagatatcgattttgagaatactactttctgtcccttttgaacacaataagatactatttgaaatttaccaattgaaaatcattagttttgaaaatcattagtttttaaaactaggtggtggtgcggtccttttgctttgggctaatactttctccccctttggcatgaatcgccaaaaacggatacttcgagtgagatataagccctttactaactactttctcccctttggcaaataagacacgagtgaagattataccaaagatagagatgctcggagcaacgacgaaggatgagttacggagtggaagcctttgtcttcgccgaagactccaattcactttcaatacacctatgacttggtttgaaatatacttgaaaacacattagtcatagcacatgaaagagatatgatcacatgtatatttatgagctatgtatgcaagcatcaaaagaaattcctagaatcaagaatatttagctcatgcctaagtttgttaaaggattgttcatcaagtggcttggtaaagatatcggttatatgatctttagtattaatgtatgcaatctcaatatctcccttttgttggtgatcccttaagaaatgataccgaatggctatgtgtttagtgcggctatgttcaacgggattatccaccatgcggattgcactctcattatcacatagaagaggaactttggttaatttgtaaccatagtccctaagggtttgcctcatccaaagcaattgcgcgcagcaatggcctgcggcaatatactcggcttcagcggtagaaagagctacggaattttgcttctttgaagcccaagacaccaaggatcttcccaagaactggcaag

SEQ ID NO: 12229 - DNA, 346 bp, Zea Mays
catcgccaccacccaatccgaatcttgaagtgcttcctctaccctgtgtggctcaatagaggaaacaaaagagtaatgctcataaaaatgtgcaacacgagatctagtggttacccccttatgaatgtcgcctaggatggtgtcgacggggtgatctcgttggattgcttggtggactcttgggtgtggcggccttggttcttcatcctccttatcatgatcatttgcatctcccccttgatcattgccgtcatcttgaggtggctcatttgcttgatcttctcctttatcaacttgagcctcatcctcattttgagttggtggagatgcttgcgtggaggaggat

SEQ ID NO: 12230 - DNA, 458 bp, Zea Mays
aaaaattcccagaaactgctaatactactgctgttcatccacctgaaaaatctgtttttttggacagcaacatacccggattcaaacaacgatatctcctaaattataactccgaatcgagcgcataagtactcgttggaaaggtatgacaaagctctacatgattatcccactgattcccactaattaccccacgaaaattctcagaaatccctagaactactgctgttcacccactcacaaaattcctggacagcacctctaccaattcgcaaagataaacacataatccaattgattgcagcacaaaaacaacaaaagttaatcacaaattcaccttaggttcttcccttcctccttccttcttcctccctccaaactccaattgagatcgcagccacacgacggagaaccacacgggagggctgcaccttggaggaaggggagaaatggggggg

SEQ ID NO: 12231 - DNA, 296 bp, Zea Mays
atcattcttaccttttctactctaagacaagatggatttcacaccttggaatcctacatatatgaacttcttaagagataggagacctaagacaaaaaaattaaaactattttctctattaaaaaaaagttggttgattgttctgatgataaatgcttgatttgcttctttgattgattgaaacattatagttgggcatcttagcatgtaccactataaggtaatgtattagctttagtgggtgacacactaatctacttagctaataaatcccccgcagtaacatttctcgtaat

SEQ ID NO: 12232 - DNA, 367 bp, Zea Mays
cacaaagtaagctgcgatggaattattttccgcgcccataaagcgtccaaaactctaacaggctcctcaccaacatcaagctaggctccacgttttcccttcccacgactacacgatgcgttccattttacacaatatatgaaattatggagagtagaaatggcaaaagaacaatcttggacaaggcaaaaaaaaaaaaaaaaaaatctaaaatcgcccaaccggatatggtttaggtcctgtttagaagcaacataatctttaaaatttcaatttctagaaactggtttatagaaaaaattagttaatggtgtttagaacacatcggtttccataaactgtctttagctatgggagactagctttt

SEQ ID NO: 12233 - DNA, 582 bp, Zea Mays
gtccccctggtgcaccggacatgtccggtggcacaccggacagtccggtgcgccagaccagggttgccttcggttgcccctttgctcctttgttgaatccaaaacttggtcttttattggctgagtgtgaaccttttacacctgtataatctatgcacttgggcaaactagttagtccaattatttgtgttggacaattcaaccaccaaaattaattagggactaggtgtaagactaattccctttcaatctccccctttttggtgattgatgccaacacaaaccaaagcaaatatagaagtgcataattgaactagtttgcataatgtaagtataaaggttgcttggaattgagccaatattaatacttacaagatatgcatggattgtttctttcttatttataacattttggaccacgcttgcaccacatgttttgtttttgcaaactcttttgtaaatccttttcaaagttcttttgcaaatggtcaaaggtaaatgaataggattttgcaaagcattttcaaatttttgaaattttctccccctgtttcaaatgcttttcctttgactaaacaaaac

SEQ ID NO: 12234 - DNA, 200 bp, Zea Mays
cagataccgtgtggttttgttttttttttttttggacgtagcataaacctagttttgttttaaccggaaggtggcaggtgcagactaaacatacacagccatgcactagaacggtagaacccaacgacccattcttgagcttatattaaacataaaggcttgcagctcacttaaaatgcagcatagaaggtacaccgtca

SEQ ID NO: 12235 - DNA, 2192 bp, Zea Mays
gtaacacccctggtgttacgataactaaaaccttgtcatgtcatcatctgcacttgcattaactgcttgatacacctagaatgcattcactaggtcaaaaattttcaatgaatgtggtgttgtgcataagagtatagggctcagattaagaactttgcttaagacatgggaagagaagtcatctcttgagcaagtagtaagctggcttagaatttaaagtattaaaggcaagtcctagagtctatagcaaccttgttttcaaagttagatcaagtggaagaaatacttgggccgaaggattgacctcaaatccctaagtgagatttgaaaaccttccttgtgatttgtggataaacaaagcaactccaaaaccaaggacactttggacatgagtttcatgtactagagttggattgagattaagaagtcacttgtcttttaggagtatgaattgagttggtaaatcactagatgagaagaagtcacatttgaaaccctaaactagcccaaaagtggaattcaaaatctagaaagaatttgacaaaagtccatatatcaaagttgtagagcttagaaaagtggatatatttcttatttggagattcctaagttgtgtggaagaatttggagttaagtacaaaaattcagttttgggttcattttggaattgctgaaaataatataaactagacaactttgaacccttgtaacttctgatctaaaaccattttgaagatgatcattataacaaagtcatagagctacatgaggagtacaagtttggttaagtcacctagccctaacactctatggaacttggagaaaaactagtccaaagtagagctgtcagaaattgtagatttcagactaagtgaaattcagattctgaatttcagcaattggagcaaactttgggctattgtagtttggaatccaagaggttttggttaatggttactatatcaaacttgtagaggaactataggagtataaactttattaagcaacttgcccctataaacatttggaacccaggaaaaagagtggttccaagtggtgctgctgtatttctgaattttcagatttgaaacagtaactgaaactgaatttcagtgttttgatagcagttttgaagcctatttgtggctgttctataatgttttgtgctatggtatttatagagaagttgaagcccatatgatggtgaacaagtttatttaagtgactttggcttgttcccacataaaaagtggataaaaatgccccaaagatcagctgctaggcattcctataactgaatttggttcagttctgaaatctaaaatttgttgtatggtgccaagtttggagcccttttgtggttgttctataaggttttggactgaggtttctatagaggaattgaagaccatatattggtgaacaacttctttaaaggtgatggacatgatccgatacgaaaattggagtaacagctgctcaaaggttggactgtcaggtggctagtgacttagtctattcagaatttaaagtctgaaatcagtagtgatgcaaagtttagagccctattgtgaccaactcttgtggttttggactaagaattatatagtaaagttggagtccatagtacagagaataagttttatcaagagggttggactcggttctacaaaaaaataggagtaaagcacctctaaacttcctctgtcagaatctgtgtaatgctgtttcagacctctgaaaccgaattttcagtgtttttctttagactttggagctagttgatggttgatccaaggggtaaaatcttaagggttttatggaggaatcgtagagggttgtttggtggacaagttttattaaacttgctctccctgttattatgagaaattgagaagttgaagggggttaacagggaggtctgcaactgaggtagcagtggcctgtttagttaagtcagtactggtctgaaaactgaagatctttatcttcctgctgtacttcgtttatgtgctagagctgagatatagatgaagtatagagctcaggtactaaaggtcttaactctactgaaaatatctaatttggacggttgtgggggctgtgagcagaagagttcttatcccctttgttcactgttttcagtttgggacaaagggggatatttgtgctgagcttatgtgtgacatggg

SEQ ID NO: 12236 - DNA, 677 bp, Zea Mays
caaggataaaaactcgattcgaatcgtctgcttctcgcagctaatgggactgcttgatccattgtactgcattgagtaacaagtggaaatatgatgagttgatacaagatgttgattgctaaaaatgttttctaccatgtatgagtagatagtacatatttagccttaagagagtcacacttaaattgacaaagttaaaacttgagttagaaactcagcaagtgtttttggcaaccaaaccccacagccaaacacctgcatgtctaggggtagaggagtagactcctcacaccgggtaagtctagctgagtattagtatactcagccttgcttgtggcacaattttacaggttctttggaggacatggttgctggagtgacttggccgtccatcttgccaccgggttggactgtcgagtgggaccccacctcggccgaggaggagcatgaggagtgatgggacaggcttccccatccctccatttatttatcgttagttttattccgctacacttcgaacaatgatgactacttttgcaaaactccgatggtgatgtaataatttaatactccttaaatgtatggttttatgctttattgtatttgctctgtgactcaccatcgagtgagcttgtggtacttgatcctgtcagtggcctcgtcggactagatccgag

SEQ ID NO: 12237 - DNA, 1477 bp, Zea Mays
gtcataagtagagagaggctgagttgtgttttccttttctttttataattctttttcttttacttacgcttaaccgtacacagatgacttcccacggatccttaggcgatgggaatgcactgtcccacactaacgggcttgcacgagagggctttccccgtattttgtgggaggtacttcagggggccggatacacgacgcctcctcagtatgcggtgcaacagttcgagaagcaccgagtgccccgctgtagggtgaggatgactctggagcctcatcctctacagccaggatggcgttcgctggactctgagtcctttggataccaagctgaggatacgatcgaggcgattgctctgcacgggttgaccactttctgcggattccaccccttggagctatccacccaccccattggcttgttccccgcggagaaggaggacgacccaatgtggaaggatcgggtggtgcatgccaaggacatctgggctatctacccaggtcagactgctcacttgacagtgcggtgcatgaatgccatgtatcgtctgcaagtgatgcgtggcgaggcaatgtcccatctgatggcactgttggaggcaactaagatcaccctggacaacagagaggagcttgtggttgatttgtccactgagatggtggtaaaagacttacaggtggagcagctgtcaaatgagatccaagagctggaggaattagtgggaacaagggagaacaccattgaggttctcgaggaccagcttatcaacacccagcagcagcttgccgaggctaatgagcacctgaatatgcatcaccaggaaatccaggatatggaggccaacgaggatgtcgacatcgagggaggagaggagcctgcctctagtttggacactgctggctcagggagaccaccttcccccgagtcgagtgttgcctcgttcgctcactaggtatcaggggtagagctagaagtcggtgatggtgggactcctcaaagctagcttagcttttgcacccttggggtactaggctagatagagttgagtcttttgggctattgatgtaatcgcgataaactcttttgaaagtatggttgatgaatgatgtcagtcttaatttaaggaggaaatttatgcagatgtgaaatattttatgtttatgcaagaatctatcattttgcccctttgactctttcttcgtgattgaaccttgaaccttaaaagatgtgttattgagaatatatgtaatctttcagatggccgggagagcgcgtcgtggtcaaaatgagcgcgttcctcctccaccgccaccacctcctactctgcaggagctaatggcccagcagaatgagatcctgaggcagctagctcagcgtcagcctccaccccagcactatggtggtggtgatcatccgcgtcaccccatggcagccacctacctcgagttcctcagtacccagcctccattgttcacc

SEQ ID NO: 12238 - DNA, 1170 bp, Zea Mays
gagagttcaaggcagcttttcagagggcaccatataccagccggtattatggaccgaaagctcaacgagtttttggcactcacccagggaaacaggacagtgttacagtatgctcaggccttcaatgacctgtgctagtatgtcggatatcacgcagacacaaccgagaagaagagggacaggttcagaaaggggctcagcactaagctccgtgaccgtctcaacaccgtcagggccaacaactataatgagttggtcaacatggccatctcctaggaggactgtatcaccgctcgtcaggcagagaagaagaggaagacccatgtggcaggaccttcagctcagccacagcgtttcaggatcgtgtctgatactcataacaggggaccgcagcagcaacaagggcgatgggtgatccgaccacagcagcagcagcaggcacccaaccgtacccagtttccagcacagaggaacaatcaacagcagcagcatcatcgtcaggcaaatgacaacaggtgcttcacatgtggcaacaccggacattatgccaagaattgccccaggaaccagcagaggcaggggcagaatgttaatctgaatcaaggcaagagacagaaggtgcaagtgaggtagggcaggctgaacttcaccaccatggctgatattccagagggagcacccgtcatgactggtatctttacagttttgaattatcctgctattgttcttttcgattctggtgcatcacacagttttatcagtaccaaatttagtgccaagtgtcaattgccttttcaccacaccaatgggggtattacactttcaacaccaggaggcagggttgccacctaccaaatcaacaagaatgtgcctataaagtttggtagtctgataattaaaaccaacctcctcattttgggtttggatagtgtggatatcatattaggaactgactggttgatcaaacatcaggctgtgattgatattgcagctagggcattgaagtgcactcaccgacctgtggtgaaaccacattatatttgcccgaccagggatgtacccgttcttgtgccttcgttatgatcgaatccccagtagaaaagatcccagtggtctgtgactacccagatgtttttccggatgaattgccagggatgccacctgaccgag

SEQ ID NO: 12239 - DNA, 1550 bp, Zea Mays
cttttctttcttgcgggtactgtttaaacctagggagggaccgcgggggagaagagaaagctagggggttttgcgcattgtcagtgactcagaggaatagtagcgcgggggtataactgagagagttagtttggaaataacccgaggacttcggtgcaaagtggttttccaggaaaccttttattaaatctgatttaaaagtaaacagaacttgaataattcatatcttctattttattcacccaaatcaagtcaaaccaattttgccaagtattaaataatgtaaactacctaagaaaaatataaaacccctaagtgctacagaaaactttagggttctgatttaaatactgatttggccaaaagctaaataataggaaaaaaatggctgcactatttaactgaggttaagaaaatttggagaagtacatgaccacctactgacctattttaaaataataaactcttctgtacaccccattaaggtagagtttgccatttatttcacattatgcttaaagttaaagaaaataggaaaggtgatttaattaaggaaccagggggcacccctatttttgttagggtacttattcagtatagttcactagaaaaatttattatactctggtttggtacaaaatacttgggataccttttattttaagaaaacaaggaaaacttagaaaaaccctagaaaaataaccccaaagtgaaaacaccccaacctttgggataattaatgttttgttatgaagaacataggaaaaatatgaaatctgctgtttgacatttttcaaataacaaggcagtagaaagtgcctttttggcatttaactttagaaaatcacaactaaatgaccatccatgaactttctgtgatttttggcacagaagcttattattacagttagatgccaacaaaaataacccttagaacagaacccacccctagttaagagttgtagtacaaagtggcccatttacacaacttttgttatttttgtccaaagcatagcctttttattttgaacctcaaattcctagaacaggctatagtgaccactggcaacccactctaatttttacaaaatttttggaaaaagttaaaccactgttgtagttcaaacccacactagaattcataattagaaaatgaaaaaggggaaattgataatagaaatttgtgtcacctagcccaactagcaaaaccctttttaaattgtccactaaaatatataaaggaaataccaatccactatgcttatccttaacaaaacctaaacctagagtgataagcataaaccactaaaagccacgtatgaccaagaagccctaagttactaactaacttagtttttttcttccttttagcataatgttgttaaatcctgcataaacatgacatacatattcattgcattcgatagattgcaacctcgctgatggagagtacgtcctcgtgccggagcaaggagctgctcaggaggtgaccccggacccagcaccagagcctgcatcagaggatctgcctaccactgctttagaaggca

SEQ ID NO: 12240 - DNA, 648 bp, Zea Mays
ggtttaccttgcaaggataaaaactcgattcgaatcgtctgcttctcgtagctaatgagactgcttgatccattgtactgcattgagtaacatgtggaaatatgatgagttgatacaagatgttgattgctaaaaatgtttgctaccatgtatgagtagatagtacatatttagccttaagagagtcacacttaaattgacaaagttaaaacttgagttagaaactcagctagtgtttttggcaaccaaaccccacagccaaacagctgcatgtctagaggtagaggagtagactcctcacaccgggtaagtctagctgagtattagtatactcagccttgcttgtggcacaattttacaggttctttggaggacatggttgctggagtgacttggccgtccatcttgccaccgggttggactgtcgagtgggaccccgcctcggccgaggaggagcatgaggagtgatgggacaggcttctccatccctccatttatttatcgttagttttattccgctgcacttcgaacaatgatgactacttttgcaaaactctgatggtgatgtaataatttaatactccttaaatgtatggttttatgctttattgtatttgctctgtgactcaccatcgagtgagattgtgg

SEQ ID NO: 12241 - DNA, 1785 bp, Zea Mays
cgcgatcccactacgaggcatttacaaagttccactagcttcagaaaccacgctacgatttctgcgagaagagggcaagaaatacctcgtccgaaaagccatcgcagcatgatcgacccgagaacctccctatactagtagctcctcacaccgtggttgcccctttcgtgtaaggtagtcctccactagttttcctaattagtcagctaagggcgtcccataccacccttgtggtggcacttttttcttgagtgattctccatgttatgattaacgaaatgattttatcatgaacaataatagataatcaacaataataaatcataatgaaacatggtcatgaatcataagtataattaatcccaaaaccaggtagagcaacaataaaaatacccaataattcatttgtttgcaaggtgtagggtaaacaaaacaaggtaacctattaggtctcattagcttaaccaaaatgtgtcacagttattaatagaacattattaggtaaaagaatgtgatcaatgacataacttgccttcaacgagctcctacttagaatcttacacctgatgtgcttcgggttcctcagtgacttgcttttccactcgtatcgatacaaacaacaatataggagcaatattaacatcacaccaaacatgagaacaatctgcataacattattctacacgttgttataaagccgtaggtttgagaaccactaaagtcggagttaaagtgaattagatatgggttttctaagttttctaagtcattttatattaataattcacttaaaatgtttctcaggttttttttcacaatttcctatttatttatttatttatttatttattttaatacgaaaagtggacaacaacttctattattggaaagttcaaggttcatttgacaaaaacatggacctttttgtgacgattcctatacatgggtgaattgtggtttgatactaataaaattcaggggctctttcattaaatagacacggcctgcataactaggagcgttataggccacccgatcaagcaccaacaacctagatttgatcgcgaaccggaacacatatccatgctaagaacttgccacgcatacgaggagtgcttaggactgcacgttcaaagatcaacgatccagaaacaagacccgaaccgatattccacaatccaataatcaccgcccgctagccgatcagcggctagggtatcaccctcctcgtgccagcccggagcgatggtgatctgccagctgcggcgacagcatggccatggtacatcaaacttggacacaggcacccaaactatcaatcgagcgatgatacgtgatgctacggaaatagcgaagtagtccaggggactctcccacatggtttgtgttagtttgccctgacgacgacatagggcagattgggaacacaatacccgccctagtgagctattacaggcatctcaatgccccaatccgatccgaactcggtgtacacaacaatagagacgaggcaaacacaaggaaagagtcttaccgaaactagcagctgtagggtaggccgaccacggcgctgtgtgggttcattgtgtccgaattgttctagtgagcaatcggcactagctccgcccatgctccggtttgattgggcgccgagcggattgcacacgctcccgcgatgcttcaaggcttggcactaggatttcgccggtggtatgtggtcgaatcaatagcagcgacaaaacccttctctttctgcctctcctcggtggtggggctcacagtaat

SEQ ID NO: 12242 - DNA, 923 bp, Zea Mays
gatatataaagggacgtgggctaaacagcagaggcagatgaacttagtttgtacacttcccacacaagcatgagagccaagcgccgcactttgtaacactcaaaaagtaacgaagacatcaacactatattggacacaggaattctctctaaactaacctaaaccttatttttcttaggctcactagagcaaagccaacaggacaacaacccgctaaaccttttctaaccaacaaatttacttgttgtggtaatgaaaccatgatagatataaataggcaagggctaacttctagttggtcaatatttaactgactaatttttccataacaattcactagtactggtccatccaaacacagggtcgagcagggaacatacgacaatgagcttattgttgcacgtcgaggcattgtagctgtagttgtgcttcacttggtcggcggtggcatgtcgttcccgctgaggacttgtcagttatttgtaatcaataaggattggaggggattaatatgaattgagagggaatttgacttactagggatttaaatctacccaatccctccaatcaatatggattaggatggaaacgaacatgccctgaagaggggtggaaaggatatacgccgctatcaagcacaccgatgatgatgacctcaccgaacttggaggtgaagttcctcctactgtgtggcaacttcagcctaaggaattgcgaagtgtgcatcatcagcagctcgtatacctggttcgacatcaagatgaaccccgagcatggcagacaacacaccgagctcctacttcattagccgagaagcgaagccgctcgcgacgtggtggcacgaatggatgagctagtcatcctctggcaggaacgtcttgtaccatgtcgttcgatcgtcgatcgtaccgaacatgtggctc

SEQ ID NO: 12243 - DNA, 228 bp, Zea Mays
gaagcgattgcataaacttacatttatttagaaagtaggatcaagttacttattacagaccagagctataaacgagtgctgagtagtattattacacatatcaagggaggcaaaaactcctcccgatatatcgcacaaaaagtcctaatggaggatcctttcctcccgcacttcactcttgcttctcttcagtaggaaccaccttggagcaaaagcaacaaaaatttg

SEQ ID NO: 12244 - DNA, 263 bp, Zea Mays
tagaaagaaacgggaaaagggtctcgcgggggctaaagcttatgcactaatgattagttaccattggttctaacaaaagaattgagttatatgcactaatggaaacctagacatttttagttgatcaacattgaactggataaacaattgattacatgaattaatagcgaaacagaattctaaattaagtttcctatttcaataacatgaacaatgattaacttgcctaaaataaaacaaataacagtaatgaaagaaagtaa

SEQ ID NO: 12245 - DNA, 479 bp, Zea Mays
aatcttcacaagcttctaaagggagagcacattttaggactaacaaatgtgcattttgagaaagacaggatttgtagcgcatgccaagcagggaagcaggttggtgttcatcatccacataagaacatcatgacgactgacaggccactggagttactccacatggatttattcggcctgatagcttacataagcatcgacgggagtaagtactgtctagtttttgtggatgattattctcgcttcacttgggtattctttttacaggataaatctcaaacccaagagaccttgaaaggattcttgagacgggctcaaaatgagtttggcttgaggatcaagaaaataagaagcgacaatgggacggagttcaagaactcacaaatagaaggctttcttgaggagaagggcatcaagcatgagttctcttctccctacatgccacaacaaaatggtgtagtggagaggaagaatagaac

SEQ ID NO: 12246 - DNA, 843 bp, Zea Mays
caaatttatgttgatgatatcatatttgggtctactaacaaatctatctatgaagagtttagtatgatcatgattcaaaaattcgagatgtctatgatgggggagttgaagtatttcttaggatttcaagtcaagcaactccaagagggcaccttcattagccaaacgaagtacattcaagatatactcactaagtttgaaatgaaggatgccaagcccatcaagacacccatgggaaccaatgggcatctcgacctcaatacgggaggtaaatccgtagatcaaaaggtataccggtcgatgataggttctttactctatttatgtgcatctcgaccggacattatgctttcagtatgcatgtgtgcaaggttccaagccgaccgtaaggaagttcaccttatggccgtgaagagaatcttgagatatttagttcatacacctaagtttggtctttggtaccccaagggatcctcatttgatttattaggatatttcgatgttgattgggcagggtgtaagattaataggaagagcacagcagggactttgtcagtttctgggaagatccctgatgtcttgggcttcaaagaaacaaaactcagtggctctttctaccgccgaagccgagtacattgccacaggccactgttgcgcgcaattgctttggatgaggcaaacccttagggactatggctacaagtttagtaaagtccctctcctatgtgacaatgagagtgcaatccgtatggcagataatctcgttgaacacagccgcactaagcacatagccattcggtatcactttctgagagatcaccaacaaaagggggatatcgagat

SEQ ID NO: 12247 - DNA, 415 bp, Zea Mays
gtcatcttatgcttagtcatagatattgaaagggaaatggagtattcggcaaagaaggcgcttccactcaaactccaaattatatttgccggtattccgcatcgttctccactttggtataatcttcactcatatttttgtgtttgccaaagggggagaaaagtttgagcaagggcttatatttcactcataagtatccgtttttggcaattcatgccgaagggggagaaagtatgagcccaaagcaaaaggaccacaccaccactgaatttaaaaaatgaagttttttatatcttattgtgttcaaaagggggagaaagtagtatcttcaaaacttacaaaaccctcttgaacactaagaggagaattttatttagggggagttttgttttaagtcaaaggaaaagcatttgag

SEQ ID NO: 12248 - DNA, 306 bp, Zea Mays
gtctgccatgcctgcagcaacgagcggatgagtgctctttgcttttacccggcccccggcctggcctgatgagtgccctggaaacttttcgccaacaaatcgacggccgagagacggcagtgagccgaggccggcggtcgtactccaggtcctccaccacgctagggccgtggtggggtcagtttaacgagaaaaactgtctcactccactcctcccgtcggtcagacccaccacagtaaaggcagagccttgcgcccgccctggtagaatagtaaaaaaaaaaaaagaaaaggtaaagacatgtc

SEQ ID NO: 12249 - DNA, 594 bp, Zea Mays
gaaaaccctcgctgcccttgctgctattatatttttatttttgtgctcggtaaaactgttgaacggttgtgtgtgtctaatcgcagctagctgtcaatgccattcgtcgcgcacgcgtgttcgatacaagaccggtcgggtgaaccacgtgcttgcacaacccaaatccgatcccgttcaggttgattgatttatagtttatattatgtatgatttggttgaagtcagacagtgcatgtatatgtgtggatgtgtgtaaaacgtttcggtcatacgcattggtaggagcacatttgcggttggagaacaagaagttgtttgatgtgtgcgatttgtagtttgtctaaatacgttttggtcgatgtggtgtgtattggtgtttgaatatatatggttgcgatgattcatttaggtgtcacgaggatggttcgtggatggtattaatcgtttgttaaaatacttcgtcataaagcagtgtgttagtcgtggtaaatctaataaagcgtaaagcatgtggtggtttccgctgtcggctaatgagttagtctatgtaaatatattttatgtattcatcatggtgtaggttagagtggg

SEQ ID NO: 12250 - DNA, 246 bp, Zea Mays
aaaacataatgccacaaatttaataagtataatcagtgattacattatcggagtttcagaaataataaccataaattttaatgcagcggaaataactaacggagaaaaccgagtaacatggcgaagcctggccacgctactcctcctggtcctctcctgcggaagcaataacccactcgaccgtctgtcccggtggtagggacgaaggccaagtcacaccatcaactaaagcaaggaggtacctgc

SEQ ID NO: 12251 - DNA, 965 bp, Zea Mays
accgatttaccatatttctcggtatgtgtttagtacgttcaaacgcttgacacaggtatccgcacgttaatccttattccaatttcatctcgtagaccacgtatccccatggatccgtgtccacagaccaatcatccatatgatatgaaagtgggtacaaccaattcctgacctcgcgcaagtgctagaaaaatcactcgacttctaccgagatccctaattagcaaagcagctaatcgacctagcatactagtatccatctcaacaggaatcctgagttcatgcaactaggatttcagtcaactcctacacttaagtgcacagtacaagcctacaaacattaagtgtagtaaaatagcatatataaacggttatgcataaaaccggggcttgcctttaatttgacactttgatagtgtttgttgggggagggtactcgctcggcgagcatccactggttaagtccatccttcaggtcgtccaccaactgcatcttgttgttggcaccacatcacttgcacgatcgtcatctctcggtcctaaatgagatgcaggatgcatatgtatgaatatgatgaaatatgtcacaagataatttaagtacacgctagcgaattaaacactaagtagcgagacatcacaagcaaccacacacactagcgttagctaactacctatcatcgagcgcacaatgttaacaccactaaaagacgacaaacatttcgtatacttacgcaacacaaatacgaccccataagtacaagcgtttatttaatttgctacggcttttcattagttcttctatttatcacacaaaagcatccaacacaagtttaaccgatgacaggcatcaacggctatgtaaattctatatcacaatcaactacagcaagaaacatacaaaacatgacacacgtgcagtattaagcttagtcatggcaaatctacattaatttagtgctaac

SEQ ID NO: 12252 - DNA, 296 bp, Zea Mays
taccattatagcatcaaatcttggcagttaattatagcatgttacctgtaaattatatattatattcctgccaaataaaatctcgtccacatcgaagcaataaggccacgcacacacgctcctctacatcgctttaacgttggattgtaaggttttagagcgattcggtgtattgaaatagcatgtattgatcccgcgcaatgcataatatccttatcattgcaaagctaatttaaaaccaactgtgtattgatcccgtgcaatgcatatgcaactcacatgaggtatatgcacgt

SEQ ID NO: 12253 - DNA, 1177 bp, Zea Mays
atagtttcacccctccctattcctttacggtgatgtggtaagttgtttatggcttaatgcttgatataatttatttctgaaattttgatattgttttattaatgcggtagatatcgctggtcattggtgagaatgaagttgttattatgcttttgatatacaagtatgcctatgttgttttcaccatgtttttcatggttgagttttattacaataatattgttatatatgcttgattgtggatgtttctaagaggagtgtgaattgcgtgttttggggtacaaggtaatcatcaatttgaatttaagttgttgagcggttggtggatagctccaactatcattgcaaagaatgattgtttatgttgagaaaccagttttgaaagaaatgaatattggtactttatatggatttttggggggaagtcttttcatagccagaatggcttacatgtctctctcatattgtgtgttctagttgccacaaagcctagatgtggtttaaagtggttgcctgttagtcatactaattgtagaataaatctttgattctcttgatccattgattatgtattgatacattgaggatctgatggttcccttttcgatgcatgcttgtggagccattttttttagaccacctatctattggtttgaaggaagtccttgcctagcctagagttggttgggtgtggctagtcacctactcctagatgatgtggtgtttacatcagcttaatatgtttgtcaaatgtgtgaaggattaggggttgttattatggactttgtatgtctggtactttgagtgcatcgtatgatagaatgaaatgtaagtttctgaactatagtagatgaagacttatattatgtgtaggttatccttactagttggatatttttcttagttgagatgttgaatgaagtatagtgacatgggttaagcaagtattgtgttgttgttgggctatcagtgctctatgtagagttttttggcatttcttcgatgaactatgccgcacaagatgttattggcttcttttggctttattgctccattagttctatagattttctcccttttggtggggtgcaaggaatgttagattacatgattatcttttcatgatggcaagaataaggtttaggaagattaggagttttgttccaatagaactact

SEQ ID NO: 12254 - DNA, 390 bp, Zea Mays
ggaggagagaagggaggagagagagaggccgggtgggggcgggggctggaagagagaggaggagccaggggcggcggctgggaagccaggggcgacgacaggtttagggttagggataatgggcctaatgggccgaggcggttagggttaggttttttttctttttcttttttttttctatttcgtttttctaattttgaaatacatatttaaataaccctaaaattcataataatcaaaccaaaattatttataaataaaatattaatttttagactaatatttattatattgtttaagtgaattttcatttaagagaaaatgttattcaatatctaaaatcaattatgagaaatcaaaaatcattccaattgcacataaataacaaac

SEQ ID NO: 12255 - DNA, 123 bp, Zea Mays
cttcctatcactcactgtatcgcagattcacaagaacgctgaaggagcaggggtggagtggacgtggaaacacccaactaccaaccaaccaaccaaccaagcttcgagccgtcgagtcgaact

SEQ ID NO: 12256 - DNA, 133 bp, Zea Mays
ctaccatattaccttacccgttgccctatcatttttcactattattttgaatcaaacttatatgttttgtaaatggtgagattcgaactcgcaacctctctctcgcgcataccctcctataccactacactag

SEQ ID NO: 12257 - DNA, 270 bp, Zea Mays
gttgcgcgtgttccggttgttcctacgcatgctgtcgcgaagctccctgttcagttctccttcgtcacgttgtcgtgcgcccaaaactgctcgcagtcgacatcgagtcgctgacgcgcgcgttggacacggtgaaacgctgcgtgtacttgtgtccgagcccgcccgaccgcaacctcgctttgctctctgcgtcgctgttcgccgggttaagccccatgttgccggcttgtcgtgccgcgccatcatcgcttctgtcgcaagctcgtt

SEQ ID NO: 12258 - DNA, 672 bp, Zea Mays
gtcaactagatctataaataatttaaatagaattgttggtcacaataaatgttattaatttagcatgcgtatattgtgatgattgatttagataaatcggtaaatcaagtaatttagatacacagtttaaagagttaataaaaagctaggaataaaaatagatgttctagtgttattatgtcaatttggttaatggatgtagtcgatgccctgctgtgatatccatggtgcataatgcttggttttaagtgtttcatcctttttagtgtagattatgcatcttatactatttaaactcgtgctcatacatgtttaccgtgcatctcatgaggtacgataaataatcgcgtgatacgaaagacgaaccaagtcgaccccaagcgcgggctaatccgcaggatgatgctgatggacgaacccgaagatgggatgatctgatcaagtgccaggacaaaggctgatcgtcaagtggacgtcacctaacaacactaacctagttttattcaggcaagccctggtgcatttgtcacctccttgtgttttaaaatctttatcaccttgtttgatgcattaggtgataggagttgtgtgctaaaccgttgatgcatttccttccttgaaaattgatttcccttccttgatacccgttttgaaaataattttatgatgctt

SEQ ID NO: 12259 - DNA, 190 bp, Zea Mays
cccttttccccttggttagccgcccctctcctcccatggcggccaccctccattacttcctcctcctcagatcttcccctacgcagcaaggatcgagaagtggaggagcacgttgaattgaagaggaagagaggatcaaggagatgttctaccccatctcttcttgcagattttcttatggaaagcctag

SEQ ID NO: 12260 - DNA, 806 bp, Zea Mays
ctaaactacacatctaacattcatatataaaatttcgacagtgtctcctttgaaaattgcataaacggggaagcaacaaagtataaatatatatcatgataagaaaaaataatagacattaataatgtgctaggaatgggaagacgaccataacgacatgaactgaattaaccagtgcgcacgactagttaaaaacaaacatcttttgacaagaagtttctaattaaatcatgactgcgcctgggcagcgttattatgagagtgaaggtgtatgtgctgctacttcccactccccttgatgagcaacaagcacctgcattgagtaatgcaagagtgagatgaaacatctcagcaagctaattgttttgacgagatatttaaaccacattgaattaatcaacattttaaaagaatcacaatcaagatcagaaatacttgtagatatagaactcagtagtcacaatataaccaataccatatcatttcctcgaacaaccataatatgttgtataacacttccctgcatcaacaatacctgcaaatatcacttcaatgtatgcataggaatgcaatgtgtaggtcatctatcttcatacctttgagggtataaaaccacatcatctgcaaatatcacttcaatgtatgcatatgaatgcaatgcatatgtcctctgccttcatacctctaagggtatgaagctacatcgtaccccttctcgggcaacgtacgatgctaagttgtaccggtacggtcggaccataggtcacgacaaagcttcagatgcaaatgagtcatgcaatgtatat

SEQ ID NO: 12261 - DNA, 395 bp, Zea Mays
attttgtcaacctttaatggtgttatttgttgagacagtttactgatgatattgtgaggttgtgccctaaattccaactcttttgctttgtctcgatgagatttggggtagtcaggttgcagcctgctttctgtatcgtttctgaaaaccagtgcggcaacagcaaagcagattttttttttttttttttgtccagcaactgctattttcattcagtgatggctgctttaggtcatgctggtgtgctcttcgggactggtcttgtgttagtttttttttgtgactttgagcatatcggtatactgcatgtaatctactgtgcgtctgaaatttctttttgagaacagcaacaatagagtcgcaccgatctgcagggcttctgtacaaagtttttt

SEQ ID NO: 12262 - DNA, 308 bp, Zea Mays
ccagaattggccctgccgaggggggagggttttttctttttcttttttttgttttctatttcttttcttttcttttcattttctacttttgtttctttttatttctttttcctttgaatcaataattttctaaatgatcttgagtgatgaatatagtctatgtgaggttctcctatcatttcaagtgtatgcacatgatgagatgacctaagggtggagtttagggagaaaataaaataagagggggggttaggaggttagggttccaaaccttgggttgggatttttgggatgttacagaggccaag

SEQ ID NO: 12263 - DNA, 771 bp, Zea Mays
ttcagttacaatatacgttaattcatttgttagatttttatgctaagttattttattaccctttttacaatataaattactcctttaatcatggtaaattactgccagccgatttgcaatgtagactaggctgaaggctggtggagagctgagttctgttcccgaactgtgctcctattcaagagcttaagagttgtccagttatgcgatggaacggggcatgaccgcatgtaccattgaattagactcgtttttagaaatgaacagataattcaaaagattactatcaaattgcagagtaggtactaagaagatcgaaatccaatagagctagacgggtagagcggctgcagatgcgatcagagcctgtcgggatgtatgagaagtcatcactttatgacatcaggggattgacagactttcatacatgcatcatcacctcgcatcgaagatcaactaacaagaacaaatatccgacaagagaacggctacgaaaaccaactcacaaaagagactatgccaacgataaaaccgggtcagttggaagaacacgaggaatgaatctaagagaagaaaagaaataacaagtggctcagaacttcttagagggtttgtgcaaccaacaccggcgtccgagggatgcctccggcacacggatttctttcctcatcgccatcaaactgctcaaaacgatatagtaatcgacaaacagaaacaaagaaaaaatggagaaaacatgaaggcgaaagaaccatcggacacagagagcta

SEQ ID NO: 12264 - DNA, 1885 bp, Zea Mays
taaatctttatattgttttattaatgcgtttgatattgctggtcttttgtgagattgaagttgttattatgcctgtgatatacaagtatgcctatgttgttttcaccatgttttttcatggttgagttttattacaataatattgttatatattcttgattgagaatgtttctaagaggagtgtgaattgcgtgttttgggttacaaggtaaccatcaatttgaatttaagttgttgagcggttggtggatagttccaactatctttgcaaagaatgattgtttatgtcaagaaaccagttctaaaagaaatgaatattggtacttttataggaattttgggggaagtctttacctagctagaatggcttacatgtctctcttctattgtgtgttttagtagccacaaagcctagatgtggtttaaagtggttgcatgttagtcatgctagttgtagaataaatctttgattttctggatccatggattatgtattaatacgttgaggatcagatggttctctccccgatgcatgcttgtggagccattgttggaccacctatctattggtttgaatgaagctagtgcctagcctagagttggttgtgtgtggttagtcacctattcctaaatgatgtggtttttacatcagcttgagatgtttgtcaaatgtgtgaaggattacagggttattattgaccttgtatgtctggtactttgagtgcatcgtatgatagaatgaaatgtaagtttatgaactacaatagatgaagacttatattatgtgtaggttaacctcactagtttggatatttttcttagttgagttgttggatgaagtatagtgacattggttaaccaagtattgtgttgttgtggtgtctgtgctttttgtggagcttttggcatttcttcgatgacctgtgccgcgcagaatgttattggctttattgctccattagttatgtagatttcctcccttttgcggggtgcaaagaatgttagattacatgattatcttttcatgatggcaataataaggtttaggaagattaggagttttgtttcaatagaactacttgtttcgtggtgctttgaggtgaggtgtttgatcttcttatacattcgttgggtgtggatgtttcaccatttaattaaaattaattgttgaagttggtaagggttgtgcttagtgcatattaccccttcataaaagagtgttgtcttaagacattgatgttgatgtatagttgcatccaaattcgattgtgtgaaattgtagtgttgattgcatctatgacttgctttgagcttcattgcatgttgtttcatgcttgatgtcaggttgtgtagtttacttagacaattagtccaaggtagaagttcttgtgttaattaagaccaataatggacccatgttttgaatggtggtgatggggtaccttgggtgttttgcttggagtggccgaattcgaggacgaattctttttaaggggggtagagtgtaataccccagaaacatttttggaccaaaagttgatctacgatgcgtggatgtgagaaagggttgtgggccgttggatgcaaaggcagaagtcatctggggcgtcatttcttttctcccacaaaaccctaggtggccaccccttttccctccacccccctctcttggccaccaccctcccccctttttcccttggttggccaccccctctcctccaattgcagccgcccaccatttcttcctcctccctagatctctccctcccccacgcagcaaggatcgagaagaggaggagcaagatggattgatgaagaggaagagaggatcaaggagatgttctaccccccatctattgcagattttcttggggaaaccctaggt

SEQ ID NO: 12265 - DNA, 1568 bp, Zea Mays
ccatgatttttggttgagtagtttgtgagatatcgaattttgaagttaattatgctgctgtttgaaacagattcagtcagttatcttgttagagattttagaacttgtagatggcagattttaattatccattgaataccgaagttgtagagtattttgtgtagatactcctagattatttgtttgatagcacaactgttataattttaaagatacaaaattaacaaacagcgctgctgctgtatgtcatgtggttcagggtgggagtctttgtaccaggtcttggtttcaagtgtaggagcgatttgttgattgttggcaaatgtttgtgaaatatttgtactaagttttatgcccgctagcaggtggctacactccagatcatgcctagtatatttcttcttcttcgatgaaggcaagtgaatgtagcagtggttgcttccgttctgacctgttatttctattgcctacactctaatattcagaagtattggattctttcataattggactctatggtgatgctttacttgcttgcattatgctgatgctcaatcatatattgatgatgatgatgattcgagtatgactcatgagattaattcacacccctgaaggtaaatgaagtattatttgaggttggtattgtatctgaaggtaaataaagtattatttgaggttggtattgtatctgaaggtaaataaagtattatttgaggttggtattgtatctgaaggtaaatgaagtattatttgaggttgtattgtatgtgaaggaagtgaagtatattgataaatgcagcatgccatatacattgcatgattcacttgcatctgaagttttgtcgtgacctatggtccgaccgtaccggtacaacttagcatcgtacgttgcccgaggaggggtacgatgcggcttcatacccttagaggtatgaaggcagaggacatatgcattgcattcatatgcattcattgaaatggtatttgtagatggtgtggttctatactctaagaggtatgaaggcagaggacttacacattgcattactatgcatacatcgaagtgatatttgcaggtattgttgacgcaggaaagtgttatacaacctattgtggttgatcgaggaaatgagatggcattggatattttgggactattgagttctatatctacaagtatttctgttctcaattgtgatccctttaaaatgttgattaattcaatcttttttggtttaaatatctcgtcgaaacaattcacttgccgagatgtttcatctcactcttgcattactcaatgcaggtacttgattcatgttgggaataaggggagtagcagcacgtccaccttcactctaataataacgctgcccaggcacaaccatgatttaattagaaacttcttgtcaaaggatgtttgtttttaactagtcgtgcacactagttaattcagttcatgacgttatggttatcttcccattgctagcagattattaatgtctagtatgttttcttatcatgatatctgtttatactttgttgcttccacgtttatgcaaattttc

SEQ ID NO: 12266 - DNA, 316 bp, Zea Mays
atcacattagtgttaactttgacacgtgggaatttgaagttcaaagtaggagttactctttactatttgttttggagcacttaattaaaggaatgaactaattaaatatgaataaacttaaaactttgcatcatgctggatattctgattatgcatgacaactttgaccctaagtttgaatttcaaattcgaatctggaatggaaaataaaaatagaaaaatgaaatctgaaaaggaataaaagaaaaaaaaataaacccctagcgctttgggccgaattctatactttcggcccattctcccttcctctccgcgg

SEQ ID NO: 12267 - DNA, 318 bp, Zea Mays
atcttgcagcggaattttattaccaaattttacaagttacaacaagttttactttatgtttatcggagtgattacaatagtgattcaaagaaataaactttgaaatgttataaattatttataagtttgaaatatatgctagctcaagggaccatcctcaataagaagtatagaagagttacttagacttataagaaggccgagcccaccggcacctaacaccatcatcagcagcacaaaactatgacctgaaaaacaacagggaataaaaccctgagtacggaattactcagcaagacttacccgactaaagaaaag

SEQ ID NO: 12268 - DNA, 686 bp, Zea Mays
aattttatttggcataacacatatttatttaatctatctaacaattcggctaacaacttgcgcgccagtaataaatttagcttagatttactactttgattaacgaatacgaatccgggtttttcgtcgattacatgttaaataccgtactaatattaaattactcgaaactaataacccaaacaaactacctagaacgtaataactattataccgcaagagatcagcaacatgtacgactaccgatcaaatcaccgtaaacgattcaggtagtctaataaatatcatatttagtcgactggaataacgaagccacttaccgtccattaaatccgacttaaagcttgcgagaacgtcgacagtctccgaataaaatcttcgatcaactcgctgacgagtatagaacggagcttcactttctcttcgtattaagtagaactccgcaaaaacatcgatgatttttgttctggcctttcgccgatcacttgggaaaatatcacgcggctagcttcgacttcacctgattcttttgtcggtgtgaacataagtcggagatgtcacgtagggacccgatatcgagacagggtgatcgaatgacgacggcaaaaccaaaggttggagacgcccggatatcagtgacaaacactagagttttactacggcctaggacgagtgcggaaactgac

SEQ ID NO: 12269 - DNA, 199 bp, Zea Mays
tttccttttcctttttatttccaaattcaaaatttaaattcccatttaaatttaaacttcatggtaaatttgttttctcattaaatgtccaacttaaacatggcatggggtgaattattctatttttaatatttattttgtgatgactagggattctctttctccaaattatagaattccaaatttaggtctaaattcc

SEQ ID NO: 12270 - DNA, 131 bp, Zea Mays
gttgtactcaacatatgaccggtgatatgaggatgttcaccgaaatgagtgaggaaggttgctcaacctatgatagcatcacttttggagacaatcgcaaaggaaaggttaaaggtttgggtaaaattgct

SEQ ID NO: 12271 - DNA, 147 bp, Zea Mays
tgtctcaagacgaaggagtgaaccgacttaaagatgaaatgaccaataaacccatgatagtttgtgtcatgattgtaatcaattgtaaagggcataaatgtaatttcacacaggctgtgccctgtgcctataaatagatgaacatta

SEQ ID NO: 12272 - DNA, 377 bp, Zea Mays
agtggggggggcggcagccttgagggggagtagataggagggtggcggctagggtttgggaggcctaatgggccgaaacaccagttgcggcccaactaacccacgcgacagctcccgaccgcaacgcaaatgtcaaaccaaaaaaaaaaatctactgccctagttgcgaatgttattcacaaaattccaaatccccaaaacaacaactggatgagggaaaaaaaacaacaaaaaaaaacaacccccaacttctcttctttgcataccgggtatcacattctacccctcttaaaaagaattcgtcctcgaattctgacgcttctatcggaatgacacaagaaaagcttagcaaatcaacaacacttacccacaacgaa

SEQ ID NO: 12273 - DNA, 229 bp, Zea Mays
tgggagatggtgggagtagcatgtaccctcctggctagaggctggacggaggagtattgtgctcccgggtagcgcggactggttcacgttgtggaggatctgtgggaacggttgacatatgcaaggattgagtgctacatatgtcttgtggttagggatccctagctgggtataatcggttcgaatcgtcgttgctcctcggtcatggagactctaccctccgaccact

SEQ ID NO: 12274 - DNA, 248 bp, Zea Mays
cataaaaccatacattaaggagtatcaaattattacatcagcatctgagtttttgcaaaagtggtcatcattgttcgaagtgcatcggaataaaactaacgatgaataaacagagagatggggaagtctgtcccatcactcctcatgctcctcctcggccgaggcggggtcccactcaacagtccaacccggtggcaaggtggacggccaagtcactccagcaaccatgtcctccagagaacctgtaa

SEQ ID NO: 12275 - DNA, 301 bp, Zea Mays
ggcagcatcccccttgcaaaattgcataaatgagggggcaacagtgtataaacatatatcatgacaaaaacatactgagtattattaatcggctagcaaagagaagttaaacatacgacatgaagtgaattaactagtgcgcacgactagttaaaaaaacaaacttcctttgacaataagtttctaattaaatcatggctgcgcctgggcagcgttattgtgagagtgaaactggacgtgctgctactcccctcattcccaacatgtatcaagtacctgcattgagtaatgcaagagtgag

SEQ ID NO: 12276 - DNA, 941 bp, Zea Mays
tactaagttttatgcccactagcaggtggctacactccagatcatgtctagtacatttcttcttcttcgatgaaggcaagtgaatgtagcggtggttgcttccgttctgacctgttatttctatcgcctacactctaatattcagaagtatcagattctttcataattggactctatggtgatgctttacttgcttgcattatactgattctcaatcatatattgatgatgattatgatttgagtatgactcatgagattaattcacacccctgaaggtaaatgaagtattatttgaggttggtattgtatctgaaggtaaatgaagtattatttgaggtttgtgttgtatctgaaggaagtgaagtttattgataaatgtagcatgccatatacattgcatgactcatttgcatatgaagttttgtcgtgacctatggtccgaccgtaccggtacaacttagcatcgtacgttgcccgagaaggggtacgatgcggcttcatacccttagaggtatgaaggcagaggacatatgcattgcattcatatgcatttattgaagtgatatttgcagatgatgtggttttatacccccagaggtatgaagatagagtacctacacattgcattcctatgcatacattgaagtgatatttgcaggtattgttgactcagggaagtgttatagaacctattgtggttgttcgaggaaatgagatggtattggttatagtgggactactgagttctatatctacaagcatttctgatttttaattgtgactcttttaaaatgttgatgaattcaatttgtggtttaaatatctcgttagaacaattagcttgctgagatgtttcatctcactcttgcattactcaatgcaggtgcttgttgctcatcaaggggagtgggaagtagcagcacatccaccttcattctc

SEQ ID NO: 12277 - DNA, 454 bp, Zea Mays
cttaaacttcatacgcaaactaagcgtcttatttcacagtcatgaaatcaatagtaaaaaatagtgatttggctcaccgtgatcaactcgattcaagatttgcgagaacgacgacagtcttcgattgaagtcttcaatcaaatagctgacgagtatagaacagagcttcactttctcttccatccacaactcttataatctctccatattaactagaactccgcataaacgatgatgattcttgttctagcctttcgccgagcacttgaggtatcgaccagggcttgcttctttacatcttcttgggattcctttgtcagtgtgaacacaagtcgaggtgaggtgaccgaacgacgacgacaagataaaggaaacaggggtgcgtttgaccgacaactaaaacccacgccgaaccgagcagagagcgcaggaccacggcaaattgagcattccg

SEQ ID NO: 12278 - DNA, 217 bp, Zea Mays
gtagggaggaaaatctgcttgtggttgctgccgtgcgcgcgatagaactcaagggagggagacgcagggagctcgggcttgagccatggagccgagctgctgggcgccggccatggagcaggggcttgcccagaggacgttcgccatgggaggagcaaagagctcgcagggagaaacagcgaccggaaggggagctcggctggcgtccagcttggag

SEQ ID NO: 12279 - DNA, 247 bp, Zea Mays
ttgcacaagacgggtatttggccccttgattgccaaatataacagagtgaaaaaaatcctccatgaaaattaaagtatcatttaaaatacttttaaaatcctcttgctggattatttcccggggctttttgtcctctcgctgccaaactaagctctagtggtcaatcttcgtatctgcatttgtttcatcaagactcgaagacttctggcaatcaacgattgtttggtaaagtagtattcaatacct

SEQ ID NO: 12280 - DNA, 312 bp, Zea Mays
aattaatatagaaatattggtcaaaaataaatattttagttataaataattttggtataattattataatttttttaattgtttaaaaatatatttatttatatttttaagtagaaaagaaaagaaaaaaagaaaaagaaaaaaaactaaacctaaccctagccggctgaaaccggtccattaggggcccagccgcacgcccccaaaccctcccctctctctatggcatatgggcccgccctggccccgcggcctttcttctccctggaagcgccgccaccgccgtgccttgggcacgagcgcacgtgcttc

SEQ ID NO: 12281 - DNA, 292 bp, Zea Mays
atcgtcgtcgcgccttgtgcatcgcttgatcgatggaagcctcactcgtgaacaacatgcgcgactcagtccattcggccagattgtttgatgtatgcaatttatagtttgtctaattatgttttggtccatacggtgtatattggtgtttgaatatgtatgtgtataaaatattttggttatatgcattggtagggtcgtatttgcgatttgaagaacaagatgttgtttgatgtgaaaattgagtttgaatgcaagttattgtggcggaaccgcccgaattattccaact

SEQ ID NO: 12282 - DNA, 226 bp, Zea Mays
gaaaaccctaaacctagtctgataccatgtagaagagtgaactattgtattgataatagatgggtgggatacgatatatatagactcaaccctaaccctaatgggccggtagcccaacagtggtgccggcccacacacacagtctaacagtcggtgtgttgaagcccgagggtcgtaaccaattaggcatagtttggatactttaatattgacctcaatcaacttg

SEQ ID NO: 12283 - DNA, 185 bp, Zea Mays
gcaaaacctaaaatttaacatctaatacataaaattcaacttcgattaggcgttaaaacgagaataagaacaatcgaagtgagggagagttgttcttcttgctagagttgctccaatgaatgcagaattactttgggagcaaatcaattgatatgagattaagcgcaggcaagagaacaagagag

SEQ ID NO: 12284 - DNA, 528 bp, Zea Mays
gccacattgccatcctctcacgcccccattctcggatcgctgaccggtgagacccgcaggccaaggagtcaccgcgcgctcggggattcagtggctggtacgtggggccggtactccagatttgtcctcttctctacacaccatagcaatctcaacagacctcgtaacaaacgcagccaccacaacaacctcaacgaaatccaaaattcattgcaacaaactctgccgggttctagggctctgggatataagtactggtgctgcaccccatggccaaggcatcagatagatagaagtaaccatcgtcgcgcatttgctagagccgtcgcgactgggttctcctctgcgccgattctctgccttggcagacaactgtggtgcttcactagggcgcataggtgacaactgaagcttctggatgaatggagaatcatcggtgccgcttcaattgctcaccgaggattatttgtggaccgtagatcggcaatccgagggttagataggatggttgatgtggaggagtcttag

SEQ ID NO: 12285 - DNA, 465 bp, Zea Mays
aataacagagtgtatagagataaatgtcacaataatcagagtatttattacatagcagaaatcttacaaaataaaagataaatataaaaggatctaaaatccatccttggcgccagaaagtcaactgggagacgccacctagatcgaatcgaactcctcgatgtgtcttctcttgaaccacctgttcttctcctgtgggggtgtgagacagcaaagggtgagctcacacatgttcatcgttcaacaagttgtgcggaataatgtgcatgaactcaccaaaggtgggagttcatgtgaagtgtaaagctgatcaacagtaggggttaagctgagcattgcttttaataagttggtcaaattttattagcagttactaagtgtaagtaaataccaaaccatagtaataataagtaaaaataataataaaataatcccaatgcaatgaaatgacaaattgagtttaag

SEQ ID NO: 12286 - DNA, 446 bp, Zea Mays
tgaatcgagacggcaggggccccaatcatgcaccgcagcggcaccagacgcgccaaggagatctctccgaccgcggatggagttgagagacggatgccagcgactcctacacggtggcctccctaccaacacttctctgctggcggcggggtaggtttaggctgttaatggaggcggattcgagcttggggcgagatctccaggttttctgtgcgtgatgtagaaaggccagagaacgggcggcggtgaacctagggaagctgtggagcggagagaggcaagggatcgtggccactgatataggtgtgggctgagccgcagccgcaacggcttacccggaatcgacggcgagcttctgccatcgtcgggcgaagttgttggagtgaccccctgacggcccgggcccacgcgccagcaaccgtgcgcgcagcgcgcgcagcaaaacc

SEQ ID NO: 12287 - DNA, 254 bp, Zea Mays
ctcctcccaagttaagcgaggtgggataattctgaggctcacacggtcaccgtccaactacaattgggccaactgggccaattgcgtctttgccaacgggtaatagtggaggatgtcctcatcgttcacaccttcttaaaatgggccctacctctgatactagatgatacacccaacccaggtggggttggccgaggcccaacaaattagggttgcccgaagcccaacagtttattaagcacacccaactcagg

SEQ ID NO: 12288 - DNA, 134 bp, Zea Mays
cgagagcagagcatggagtgccaccaccgccatggccatcctccaccgacggcgctggtccctgggctcaaacgtcctccttgtccgcctaatataaatccccagccgaacctccctccatctgtctgtgcttg

SEQ ID NO: 12289 - DNA, 75 bp, Zea Mays
ctcgacgtcgggctcctggtcggcgagctctggctggtctcctctagaatcagctctattccaacagtcgccaac

SEQ ID NO: 12290 - DNA, 153 bp, Zea Mays
cctttctccctccaccaaaaaccattgaagatttgcgccacgcgacggagatccgagcggcaacgaatggcaccatgggaggaggagatgggggggcggctagggtttgatgtgtggctgcaagtgcttgagaaaagaagggatgggagggag

SEQ ID NO: 12291 - DNA, 287 bp, Zea Mays
caaatagtgaaaaataaaaatataaataaactaaaattcagtttatgttgtcatgtaaatatagaaaattaacctgagtttgaacttcccacaaaaatagattcaaatttgaaatctaaatttggaaagggagaaaaaaagaaaaaaaaaaggagaaaacctacttgggcctcggatccttcattctgcccaccaggaaccccccctccgcgcgagcccacatcatctccgtgcaagtctcctggcgtctctgttggtggggccgcgctgtcatacactggtgtgtg

SEQ ID NO: 12292 - DNA, 213 bp, Zea Mays
tttggtttagtatggtgagctctttcgccatccttgttagtagcgtgtaaggtggatgcatatgcatagtgtgattaaattgattctttgattgtatgatgtgagctttaggtttaaattgcaagttacgtatgaatattatttggtaggcatgtaattaaaataatttgtgatgatacatggtatggagtgtgcttggacaggtatatgtgt

SEQ ID NO: 12293 - DNA, 250 bp, Zea Mays
ccagaagccaacaaaatatgaagccagagcgcgcgagagagaagcatcgaggaaaattgacggattatattttgtggggcgtgctcgaggtctatcttgggatgagggagtatcagaccacctgggtgttgctcgtcggctcctgtcatcgaagaccagcctcttcacggcatctttgccggtaagacatatgctcagtaaatcgatgtatactcctcgttctgtactcgtattagttccaatatccgag

SEQ ID NO: 12294 - DNA, 145 bp, Zea Mays
ctgcgatgtgttcgtgagaggtctaggccgtcgtctcccagtcaactttgggttgctggaccgttgtctccttataatgtaattatttatttattttgtatataactcctgttatatagtaaagatgtgacattcgatcctgtgc

SEQ ID NO: 12295 - DNA, 362 bp, Zea Mays
cctccagcgcagccaccttgtccgccagcttgcggcacttactgtcggcggccgatttttcacggacggcgtcagcatgttgcgtccgaagtctctcgacttcggtggacacaaccgccgtgagggcccccgacgctgtgcggtcggcgaagtcagccacctgcagaacacacgtaagaccgcggccccagcaaagccgacaaaaaaaagaaaaaaaaagaaaaaaaagaaaaaaaaacaccaaagtctagctcaacggacctgacttagtgcctccgtcacctccttcagccggcgggacacagcgcccgcctcatccctgacagccgcgagtgccgacatctcgcctccggcactaagag

SEQ ID NO: 12296 - DNA, 2426 bp, Zea Mays
ccctccctcctttccccttgggttggccgtcctgtcctcccatggcagcccctctccacagcttcctcctccctctagatctcccccctccccgcgcagcaaggatcgagaagaggaggagcacgttgaattgaaggggaagagaggatcaaggagatgttcttccccatctcttcttgcagaatttcttggggaaactctaggtatggatgagatccttgttcctccctgtaattatgtgcttttggaggttgtggatcatgggaattaaaggattagaggttggattagatgtggggttaggttttgatctcgaatttagttttctgcagaatggcagattcgacagtttctgttcatgccagttttccgtggtcttaatggcctcaaaaaattacaaagtctatatatgagtcgtagataaattgtagatctttccatggccacgaagaacacctcaatcggacattagatcagagagttattgcagtttgattataacagtttttcagtctcttaattctgtgcagaatctgttctcttatgatttaggcaattttatcaatagaattaaaccttgggtttgtaagaaatgatgtagataatttcataagctttccagattgttaaagagtgcattcatatgaattatgaaactacagttatgtttattttactgtggctgtttctgttggcctgacagaaatgagcgggtctgttcactggtaggtttcatcagataaatggccgaattggctctcccagctatggagacttttgtagagggataaaagtttttacttccagcagaatttcatgatttttggttgattagtttgtgagatatcgaattttgaaagttaactatgctgctgtctaaaacatattcaatcagttatattgtcagatgttttagaacttatagatgtcagaatttaattattcatcgaatgccgaaggtgtagagtattttgtgtagatactcataaagtatttgtttgataccatcactgttataattttaaagatacaaaattaacaaacagtgttgctgttgtatggcatgtggttcagagtgggaggttttccaccaggtcttggtttcaggtgtaggagcgatttgttgattgttggcaaatatttgtgaaatatttgtactaagttttaagcccgctatcaggtggctacactctagatcatgcctagtacatttttcttcttcgatgaaggcaagtgaatgtagcggtggttgcttccgttctgaactgttatttctattgcctacattctaatattcagaagtaatggattctttcataattggactctatggtgatgctttacttgcttgcattatactgatgctcaatcatttattgatgatgattatgattcgagtatgactcatgagattaattcacacccctgaaggtaaatgaagtattatttgaggttggtattgtatctgaaggtaaatgaagtattatttgaggttgtattgtatgtgaaggaagtaaagtatattgataaatgtagcatgccatatacattgcatgattcacttgcatctgaagttgggtcgtgacctatggtccgaccgtaccggtacaacttagcatcgtacgttgcccgaggaggggtacgatacggcttcatacccttagaggtatgaatgcagaggacatatgcattgcattcatatgcattcattgaagtgatatttgcagataatgtggttttatactctcagaggtatgaagacagagtacctacactttgtgttcctatgcatacattgaagtgatatttgcaggtattgttgacgcagggaagtgttatacaaactattatggttgttcaaggaaatgagatggtattggttatattgagactactgagttctatatctacaagtatttctgatcttaattgtgtttcttttaaaatgttgattaattcaacttgtggtctaaatatcttgtcaaaacaattcgcttgctgagatgtttcatctcactcttgcattactcaatgcaggtgcttgttgctcatcaagggaagtgggaagtagcagcacatccaccttcactctcataataacactgcttaggcgcagtcatgatttaattagaaacttcttgtcaaaggatgttgtttctaactagttgtgtgcactggttgatttagttcacgccgttatggttgtctttccattgctagcagattattaatgtccattatgttttcttttcatgatatctatttatactttgttgcttccccgtttatgcaattttcaaaggggatgctgtcaaaattttatatatgaatgttagatgtgtagtttagtagcattctggggtgtttgtggatcccggggtgttacattttgattacaagtgagttgaacacaagaaagaatgaag

SEQ ID NO: 12297 - DNA, 404 bp, Zea Mays
ccataacgatgtgggaacaggcaatggttgtaacaagcccggtaaacgagcacgatctgccttggcttgctgacaggtcagacagtttgtgacaaacgtcttaacatcagcttttaaacccttctaggcaaacagttgcttcacacgagcgtatgttaccggaattcccgaatgacctccaattgtagacgaatgcatggctgcaatcaaacgagtatgcaagtcaggtgactgacccacccagatgcggtgtttgtagcgaagaaggccatcctaccaggtaaaatgttgcactactattgaatcaatggcgagctttgcaataagagcagatgcttcagaatcctgttcatatgatgctgctacatcagatatccacttgggagtgcaagaagatatagcta

SEQ ID NO: 12298 - DNA, 420 bp, Zea Mays
cttaaatatgcaatagtgtggccagactgcaacgatactgctccaatgccacaattacttgcatcggtctccaagcaaaatggttgagtaaagtccctaagaccggagccgaaaccaatgcctgcttcagagcctgaaaaactacctcatgatccaacgtctaaatgaatatcaccccttttttgagtaatgaagataatggtttcgctagcagaccaaaattcttgacaaaacggcgataataacccgccaaacccaaaaaaaactttgtaactctttcaaattagtcagagttgtccactgcattacagcctaaattttaccagggtcagtcgagacaccattagctaaaataacgtgtcccgggtaagaaagttgttgcttagcaaaagaacacttcgagagcttaagttgccactg

SEQ ID NO: 12299 - DNA, 348 bp, Zea Mays
ggatggatgaagacgaatttggtggtaactggcggtcaggtccaaactggtgaaccatgcagcatgtcccaactcatccaagagttcctctatcacaggtacaggaaatgtagtcttgactgtcaacgcattcaagtgcctaaaatccacacaaaacctccacgagctatcttttttctcaaccagtaatactgatgacgaaaatgggctcgagctgggttggatgatacccgactgcagcatggcatccacttggtgctcaatttcgtattttatcaatggaggataacaataaggccgaacatgaaaaggtgatgcacccttcaccaatggaatgacatggtcaca

SEQ ID NO: 12300 - DNA, 597 bp, Zea Mays
agcaacgtgcgtcctcatgaagaaacatgaatgaacaatgcaggatcatgatcactagaatagaaaccacaagccttgatggcagaaacaaatctctcaaaccaagcacgaggagcttgtttaagaccatacaaggctcgacggagacgacatacatgccctgagggaacctctatcccaggaggtggatgcatatagacttcctcatgtagatcaccatgaaggaaagcatttttgacatccatctgagagatagtccaagaagatgaggctgcaacaacaagtaaagctcagacagtagtcagatgggccacaggtgcaaaagtctcatcatagtcaataccctgagtctgttgaaaacctctggccacaagacgagctttatattgctcaataaacccatcagatttggttttaaccttgagggcccatttgcacgtgataggtacaacaccagcaggtaaaggaacaacatcccatgtacatgtgcgatgaaggacattcaattcatcagtcatagcaaggtaccactcaggtataccagaagcctttttataagatgatggtttagcaatgactgcaccagcacggggaaac

SEQ ID NO: 12301 - DNA, 384 bp, Zea Mays
cgcgtcgatgcgctcctcaacgcgggaatgtagtacactccggtgagcagcctgtgctcaccagacgtggcggtgaagacgactgagccggcgcccttgatctctacgccggaggcgtccccaaacttgatggagcctcggacgctagagtcaagctcggtgaagaactcccgtcggccggtcatgtgatgagtggcgccggtgtcgaggcaccatccttcgatcatgtccttgttggagccgtcgccgaggaaagcgcgtgctttcgactcatcaaggtggagtagtgccgctgcggccggtgccgctggagatggctcgatgcttgcatgtgccaggagcagggcctcctcctccgcctccgcctgtgcgacgttggcctgg

SEQ ID NO: 12302 - DNA, 336 bp, Zea Mays
ggggaagaggagaacctgttgatggcgatgttggtggcgtcctcgtcggaggagaaatcaatggagctctcgtcggagtcctactcccttcccatgtgcgcctcgccacccttcttgtcgtagtatttcttcttctccatcttcttctctcctttcttgtcgtcgtccctgccactatcacttgaatttggacatttagcaatataatgatcggacttaccacaccggtagcaaacccacttggagcagggtttgtactccttccccttcttttgcttgaggatttgccagaagatcttaatgataagagccatctcttcgttgtcaagcttggag

SEQ ID NO: 12303 - DNA, 587 bp, Zea Mays
tttaattctgttgataaaattgcctaaattataagagaacagattctgcacagaattaagagactgaaaaactgctataatcaaactgcaataactctctgatctgatgtccgattgaggtgttcttcgcggccacggaaagatctacaaattatctacgactcatatatagcctttttaattttttgaggccactaagaccacgtaaaactggcatgaacagaaactgtcgaatctgccattctgcagaaaactaaattcgagatcaaaacctaaccccacatctaatccaacctctaatcctttaattcccatgatccacaacctccaaaagcacataattacagggaggaacaaggatctcatccatacctagggtttccccaagaaattctgcaagaagagatgggaagaacatctccttgatcctctcttccccttcaattcaacgtgctcctcctcttctctatccttgttgcgcgggggagatctagagggaggagaaagccgtggagaggggctgccatgggaggagaggacggccagcccaaggggaaaggaaggaggggcggccaagtgtgggaggg

SEQ ID NO: 12304 - DNA, 540 bp, Zea Mays
ccactagggttttctttgcgggaggaaagaagcgacgccacagatgactctgacttagcatccaatggcccacaacccttttcccacatccacgcaccgaagatcaacctttggcaacaatttttttgggatattacactctaccccccttaaaaagaattcgtcctcgaattcatccactccaaacaaaacatccaaggtaccccatatagcaccaccattccaaaacatgggtccattattggtcttaattaacacaagaacttctacctcggactaaatgtctaaggaaactacaccacctgacatcaagcatgaaccaacatgtaatgaagctcaaaccaagtcatagatgcaatcaacactacgatttcacaacatcgaatttggatgcagtcatacatccgcatcattgtcttaaaacgacactcttttatgaaggggtaatatgcactaagcacaacctttaccaacttgaacaattcattttaatttaatggtgaaacatccacaccagatgaatgtataataagatcaaac

SEQ ID NO: 12305 - DNA, 334 bp, Zea Mays
cacacttggccgcccctccttcctttccccttgggctggccgtcctctccttccatggcagcccctctccacggctttctcctccctctagatctcccccgcgcaacaaggatcgagaagaggaggagcacgttgaattgaaggggaagagaggatcaaggagatgttcttcccatctcttcttgcagaatttcttggggaaaccctaggtatggatgagatccttgttcctccctataattatgtgcttttggaggttgtggatcatgggaattaaaggattagaggttggattagatgtggggttaggttttgatctcgaatttagttttct

SEQ ID NO: 12306 - DNA, 3684 bp, Zea Mays
gttgtgggttagtggtttttaaataagctacctgatagtccttagtttagggcttaacagaggatgtcgctagcattattgttttcaaatctgtttttcaaaaccaaacaatgtgtttagttgaaaataggttttccaaaaccaaaactttgttttgaaaatacgtatgtgacggtattatacttaatcttgctctgataacagctgtggcagaacctcccaagttattgggcccacatgcacctgcccttgtctcaaagacctctgatggctatgcatgtgcaccaaataacttaacaggatccgtccgagtgtcccaaggaccccagataaaccacttacaaccatgaccgcaggattaagtaaacacaaatcacacaccaacaatttgcagcggaaatcttattaccaaattttacaagttatatcaagtttacaatgtacataatcggagtgattaaaaaagtgattcaaataaataactttgaactgttataaattatttatagttttgaaatatatgctagctcaatgacaatcctcaataagaagtatagaagaagtacttagacttataagaaggtcgtgcccaccggcgcttaacaccatccacagcagcacaactctagtacctgcaaaaacatgggttcgaaaaccctgagtacgaagtgtactttcacaagtcttacccgtttaaggaaaaagactctcaaggttatgctagctgattaggaatcaaggtatggcttatcaagaatcaaagactctgtttgcagaaaagcatactatgagtggctccttcaaaatccatttttacttgtcaagttaagtaaagttatcagcatctagagttctttctaccctgattcaaacacttggcctacactagccatcttttatgatgccatcagttcactggattgctacatgtaagtcagtgaccaagtcttcatgtccgagaagtaacggcgatccgaatcgattaatactcagctgaggatctccaatcacacggcatatgtagcacttaacccttgcatatgtcaactcaccatcgggtttcttaagatcagaccgggttgacgccaaccgagagaatagatacaccaccctctagcctcttgccatggagggtacacgctactctcgccatttctccactcccattgcatgttggcctttctagtattagtctgcccgaggcaaagcttacccatgacgaggcatgtgaccagttaaaaggtcctcggtcagcagacccacatcgacacggtccttaagcgactcagacggagacactacaccgagactcctttctcgtgcaagtcaaccgcccggtctcagctttattatttaaacccaaagtttggtacctggcagaggtacatcttttcctatgttgaacccatcatggccctgatggatccaccatcaagttttatttttgaaaacattcccatccactgtgaagcatcaccttttgtttttaaaacaaaacattttgtttttctaaagcaaggctaagcatcataaaaatccttttcaaaaagggtatcaaggaagggtaatcaattttcaaggaaggaaatgcatcagttgtttaacacacaactcctatcacctaatgcatcaaacaaggtgataaagattttaaaacagcaaggaggtggcaaatgcactggggcttgcctacataacactacgttagtgttgttagatgccgactacttgacaatcatccttgtcctagcacttgatcaggcaggttcgtccatcagcaccaccatgcggagtagcccgcgcttggggtcgacttggctcgtcttccgcatcacgcgattaattaacgtacctcatgggatgcacaatgcacatttatgaatatacagaggaatagcataagataaataatctacgctgaagatgatgaaacactcataacaaagcattagaatcaatcacaagcaagtaccagctagcgatataagactaattataataattacacttttctagcctattcggagatagctcatacattaagaaaccttaaaccttgtgcgagtcctcaattttccttagctaatgcatagcaccgaaaggctaacaatattcaaactcccattgttggacacctgagttatagtacctgcaagaacaatttaactaacctatattccactagggcattctaacaatcgatataatacaacgttataattactaaggcaaggcttttgacctcactattcaacacaatcaacatcaacaaacttatcgaataatttcttaaaatactaaatctattcttcacgccactaatttggcatacttcataagtaaaaccaatttgaacacattcgacagacacgtcctctcgggtactcctacgtaactagcattttaaacctatgtcctacgacactagtacgccataatcatgtcctcacatgcgacaagatattttggcaaccatctaatataactatgacatgtttatgcttcaatcaatataatcgtcgcgatcaatatatctattcaatccatcgactcaattaattataaaaatagcgaactagagaacggttaccgattcaactagaattccaagccaacgttgacgattcttgttcatgcctcctgtcgagcccctgacaagcgccccgcgggttccactttttcactcaaattcctaaaaattgcagcggtgatcgaaggcgagcatgtagaggcagagtcggagcaaacacaacaacaacaagattgctcaccaacaacagtacatagtcaattgacgacatcgacgtgttggcatgctgatcacttgttaacttttgaacaccatacctgctatctgaaacacggacccggcgaccttgaaccaaagttgtcgacgacggggcccctgacgagcgtctgagcacgaggggaggtgtcccgacatggtaagcaatgacggcgcgacggcgagaagcaagggggctgctgttgcgatgacggagaaggaagcatgtccctagttcgaccagcatccaatggcatagcacatgtattgagcggcagcgacgcgagggacaagcggaaatagccgcaggcaaggacgacgaccggcttgacacaataaggtcgcccgccacaaccacaaatggagggagacgtggcttatcaccaaaaattccggcgacgagcacccaaacaaggagaggatgccgaggaggtctaggcacgtacagagagggacacggccctgtccaagtgcaggaaaacataaatcacacacccaacaacctcgccaccgacaaagactcgctccccatgtcacacgaaaacagaacgcccgatggagatcatgaccgagatgcagggaagcaaggacatcgacgatgaggcctcatggccgatgaaggctttgcgcgaccgagcgccatggaaaattgggagcgcgcaagagcagaggagcgcgcgcgcaggaaggtccatggctggggagggcgagcagagaggggcgcgacgcagattgaaggactagaagcttgggtgccggcagaggaagctgcgagcggaagggagctccacaagctgggatccgatgcgcgcaacagggaaaaggggagggagagaagtccagggagcggcggcacagtgaaaatatcagggagggcacgggaggatacgagagagaag

SEQ ID NO: 12307 - DNA, 363 bp, Zea Mays
atcctggccggataacctctgcaatgatgaatggtccttcccatggagatgacaatttgtgtcgcccttctcctgtcagcactcggcgaaggactagatctcctactgcaaaggatcgatgctgcactgctttgtcgtggtagcgccttagtgtttgctggtatctagacgattgaatgacaacaatcatatgttccccttctaatatatcaacatcctccagcctggacgcttcagctttagctatgcttttgattgttagcctgggtgccccaaagatcaaatctgctggtaatactgtgtaatacccactttgtaaaaaaatctaaaagaagaaattatctgcctttatggatatgtgtg

SEQ ID NO: 12308 - DNA, 290 bp, Zea Mays
gacaaggaatatattaaaagtccaaagtggaatttaaaagaaattctggaatttagagaagaaagaaaatgcatatacaaaataaatattttaaaggtaataatagtatgtgcaaaattatactcttaatccgaggaagctttaccccagagtaaatttgaatttagattttgaatttcaaactcaaagggaaaacaaaacaaaatataaaagaaaaacaaaaaaagaataaaaaaagaaaggggaaaccacgctcaggcccaaaacctagcttccggcgcaccccgatt

SEQ ID NO: 12309 - DNA, 323 bp, Zea Mays
cagcctcgcactcgcactcagggtggccgtaaccctctcaatgacgggtggggcctgcttggcggccggttgctcgtgcccacactaagacgcggatgactcgctgcgctctgggcccacttgtcatctctattccatgagatcggggcaacgacgctcgccgagattcgcgggtcaccagcgtaacaaccctttccgggtcttctggcctcagctgggcgttcccggttctgcatgcttacataaggaggcgtgggcgcccgggtcgtgcccctttaacatccgttgttccgcgaaaactccaccaccgtgaatccatggga

SEQ ID NO: 12310 - DNA, 580 bp, Zea Mays
tttacattgtacatgattgaagtgattacaaaagtgattcagagaaataactttgaactgttataaattatttatagttttgaaatatatgctagctcaagtgaccatcctcaataagtatagaagagttacttagacttataagaaggtcgtgcccaccggcgcttaacaccatccacagctgcacaatctagtacatgcaacaacatgggttcgaaaaccatgtgtacgaagtgtactttcgcaagtcttacctgtctaaggaaaaagactctcaaggatatgctggcttttgggaatcaagggaaggtttaacaagattcaaagactctattttgcagaaatgcttactaacagtggatccttaaaaatccagttttattgtcaggttaagtgaagttacctgcatctagcgttctttcttcctagttcaatcacttggcctaaactagccatctttttgtcaacccttcagttcactggattgctatgtgtaagtcagtgaccaagtcttcatgtccgagaagtaacagcaatccaaatcgattaatacccagctggggatctccaatcacacgac

SEQ ID NO: 12311 - DNA, 762 bp, Zea Mays
gctcctcctcgaccgtcgctcccagttttcagctcgccggctgaccgtcgcacccctgctccttgttcgcttcagccgcgaccttgccagacccgtccctgctcggcttctctagctcaccgatgccatctcgccgcgctcggccatcacctggtagcgcccctctgtccctcatgcgctcggcgctcagctcatccatgcactggcgtcgcctaagccggtcatcgatttgctattcgccctggtcatcacgttggctccctatcggagctagcccagctcgccagccgtcttgccctttttgtccgttgagtcgtgcgttgctgtgtccacctcgttgtgtcgtcgtggagttgttggcgtgttgctgtggtatctagatcatgtttgcctcagctccaataagtcgtcataccatcgtcttcgtcaattaggaatcatggtgccgacacatcgacatcgttgttcgtcccctttctgagtttacaacaacatcgcctatccctccttggtgcttgtcatcgatccgtcgccttgccccgatgctggctcctacgtgacatctcccacttgtgttcacgccaaaaatctgagaagattaggcgtggaaggaaataaatcagtacacgggcgaagaattctcgatgtggaggaagaagaaagcaaagccgcacaacacccatcagatgttcgacgaaaagctcaagctaggatttattagcattcgtacgagtattgagtcacgtttgatgctggtgatct

SEQ ID NO: 12312 - DNA, 507 bp, Zea Mays
ataaaagtcatcaaataaaaataatacatttggttattaatgatatttatgataattacttttcttttaagtgcttgttatttatttgcctttggaatgatttttgacttctcataattgatttttggatatttaataaacatttcttgttaaatgaaaatcctagtaaattaataatataattattagtcccaaaaaaaataaatattttaaatagttgtggtttaaacattatgaattttatggttattcaaaagcatattttgaattagaaaagaaaaaaaagaaaaaaaaagctaacctaacctagccggcccaccaaggcccattaaaccggccacttccttgacctagccgccgccccctgctcgctttggccgccgccacttcttctccctctccctggctctctctcttctctcctgcccttgctcttctctggccgtcgcaacaagagccccacccgcgcgccaggacgccgagcgccgagccccaagcgcgacaccc

SEQ ID NO: 12313 - DNA, 312 bp, Zea Mays
ctcttggccgccaccctcccccatttttcccttggttgggcgtcccctcttctcccatggcagccgcccaccatttcttcctcctccatagatctttccctccctcacgcagcaaggatcgagaagaggaggagcaagatggattgaagaggaagagaggatcaaggagatgttctaccccccccatctattgtagattttcttggggaaactctaggtaaggatgggatccttgttcctccatataattatgtatttttggaggttgtggatcatgtggattgaagaattagaggttggattagatgtggg

SEQ ID NO: 12314 - DNA, 627 bp, Zea Mays
gaaaaagaaacagaactacgggtagcagtgacatgtacttactcaacaaagtagaagagataggaaatagaaacacaactacttgttccatcatcatgtagcagcggcatcagtctaaagattatcagcatctaatatttaggctgtagcgcccaacatggcttcaaacaggggaataagcagttcatatacatggggtaaaatagtgcagactaatcccttcaaacaggggtcttggttcaaatttctggaacaagctgacatcggtggctggggtgcacctccacctcgcatatcgactccgtcgcggggaacgtggggaaacgtgtgccgccggtcaccatatcccgaccatacgaagcaactggccttaacggatgaatttgctcgagtctgctgccgcaacctccatcaccaacgaagacggctctcccgctgccgcatcctaccatggctccacaaagaaaacgagcacgcgacggtgggaatcaacgcaggaaaccacagtgatgcgcgtgcgcgagtgggaaccttgctacacgcaaatttgcaggggataaggctgcagatgcggggtggcgaatagattggggaaggaatgacgctctgttgtaggcggaaagtgaa

SEQ ID NO: 12315 - DNA, 406 bp, Zea Mays
gttatttatttgcctttggaatgattttttatttctcataattgatttttggatatttaataaacattttttgttaaataaaaatcctagtaaattaataatataattattagtcccaaaaataaatattttatttataaatagttttggtttaaacattatgaattttatggttattcaaaagcatattttgaattagaaaagaaaaaaaaagaaaaaaaaactaacctaacctagccggcccaccaaggcccattaagccggtcgcgcccctctcctccctgacctagccgccaccctgctactccccagccgccgctatctctctctcctcgcttctctcacctctctcctcctttcctctctctcgcgcgcgcaaaggaggccggtcaagcccgtgcccgac

SEQ ID NO: 12316 - DNA, 415 bp, Zea Mays
ccaaaatcaagccatgttcttatttggtgaacttagacccaaatttgaattttccgttatcactccacaaccaaactcatacaaataaatgcttaggtaatttccttgttggacaaaaagggtacttaagcttaaaataagaatctcgactcatattttcatcttagaccatgcccttattcgattggcgcaagctgatatccctaattccagcttgcttgttcttgataatcacatcattgttttatcgacccaacctaggaaaggcatgtctcatcattttcatgagtttgatgcctttgatttcctcatttctatcgaaggcatatcaacttaatctcatgattatttttactccacatctagtcagatactaatccttgaccttgtaatctctatgatgggcatagaaata

SEQ ID NO: 12317 - DNA, 288 bp, Zea Mays
gtcttcaccaccactgtccacatcataactgtcgctgtcaccagtatctccagacaaaccttccagaatctccttggtgattttttctgtattagtcttcgacattgctataagaaaccccagattcttctcttcatcgagactcaacttcatctcggtagcagccttcttatcttcagacatcttcggggatactaaaaaactgttttcaatgccgaagcttaaaaacttaaaagctcagcaaatcttggtgcgcaagagctaaaaattgagtgagcgggagcagat

SEQ ID NO: 12318 - DNA, 973 bp, Zea Mays
catacatcacaaacctatacttataaatatgtttacaacatatataaatgtttgttaatccactatatcttcctcttttgagttatcattggtgaaaatatgagcaggtgatcatgatgctagtttatttagtataatatagataaaatgacttaacaaattttacagaaaataattattaattatattctttattacttaataatagacttttgggttttattcttttctttctaaatagaaattatacgtacagctaaaaatgtttatttataaatcgcctaacattaatattctaagaattaatgtagagtactaattggactttagtaatataatcatgatgattttgacataaagaaatattttactaattctaagtaattaagtgctatacatatgaatacatttatcatgactagtaaaacctatatttttaatctgaccgaaaatacgtggcctagtatttcttctactttcttatattaataaaattatacttaaatcactactaacaaatattgttccatgttaaagcgaagttagtcataaatgtttctagtatgtaaatcaccaagttagtgaatagtgacattatttatttttttgaaatataaaatagtactcatgtccaaaatattgttgcaggggtagttcatgatttagtgtgttcatcggggtctcttttgaataatttctaaactgaaaatctcagaattaatttcatttacacgcagggactaaaatgcaaaatgtgcttcttctaccttgagctattgctcacacgcaggaatggagatcgacgaggggttcggccgagcaggggaggagcaggggctcagtcaaggagggtgaggcgtggacggcgaggctcgacgtcgagcgggcgcggtcgacggcggagctccggcggatcgacgcgacggcgagcaaggaagagagaggagagcgtgagaaagcgagggagctcggg

SEQ ID NO: 12319 - DNA, 366 bp, Zea Mays
ctcactcttgcattactcaatgcaggtacttgatacatgttgggaatgaggggagtagcagcacgtccacttacactctcacaataacgctgcccaggcgcatccatggtttaattagaaacttattgtcaaaggaagtttgtttttttatatagtcgtgcgcactggttaattcagttcaggtcgtacgtttatcttcccttgctagccgattaataatacttagtatgtttttgtcatgatatatgtttataccctgttgcccccttatttatgcaatcttgcaaaggggatgctgccgaaattttatatatggacgtcagaagtgtagttcagtagcattctgggttgtttgtggaacccggg

SEQ ID NO: 12320 - DNA, 136 bp, Zea Mays
ctcgccccagccgttctcctgctccttgcatcgtgattgccgagttcaccggcaaccacagtcacgtcgtgccgcgccacgagctcgctccccgctatcgttgtttcctcgtgcccgctggccgtgcgctcctgca

SEQ ID NO: 12321 - DNA, 116 bp, Zea Mays
accaattcttggagaggaacgacgatgatgggagacggtatgccctcatctcccctctcttctcttcttttttcttcctctcttctcttggggcaaggcacaaaagggtgacggct

SEQ ID NO: 12322 - DNA, 273 bp, Zea Mays
ataatggtatacaaatttgaatttatacctaatttacaatctagaatttggagaaagagaaggaagaggctatacaatacaaagaaattacatatataaataaataaacctttctcataatggtatttgactttgtgtatttcatctgagtatgaattggacaacaaaaatttgaatttgaaatctaaaaataaaataaagaaaagaaaacataaaagaaaagagaaagaaaataaaaaagaattttggaaaacccacctgggcccgaaccgg

SEQ ID NO: 12323 - DNA, 303 bp, Zea Mays
ccttctcccagtgaaaactgtttgtgtcctcaagctcaagcataccaccatcgccagtctcagcccaacgctctgcctcaacaactcaccttgccgtttacctttttgttctttggtcgtcgtccatagaaaagaatccccatcgtcaggtcatttatccactccaagccagcgtccatgatagggtgaggcaggtatggtctttgggctcatgttgaggtgaatggggcagggtagttgtgggggggaagcgctcgccttatgcttgttgagattcgactgggtgcaggcaaccagaaattg

SEQ ID NO: 12324 - DNA, 874 bp, Zea Mays
cacatatctcacaaagaccattaatcaaacataagacactcaagaacataagtctcataagtctcaagttctcacataagtatccaacacaaacataagtatccaacacaacattaccaacaagttctgaagtctcaagtatctcataagtctcaacactaagaacataagtctcatcgaggtgggtggttggactggtgcagcgatgggctaggcgatccatgagggttgttggatgccgcccgagattgtccctccacagggaagagattgcatatgttacaccagatgcattaccaacatctaactacaattttgataatcacaggagtatggaacagagcagggtcaactgtaggaaacaatggaggtggtagagcgaaaccctgtgcgtcgccaaggctctgtatgtattggaacatctcagccatcctcgcctccatctactgacgttccctcctctctatttctagcttggtctgtagtattccaagctaatgttatagtaactcaaaaagaaggtatataactaaaggaatgacgagttacagaaacactaacctcgagttgctgtatgcgatgatgtgagttgtcctgccaaggtcgtatggctggactcgagtccgtgctccttgctcgcacctgagacagagcgggagtggacgacgagtcgattgccccatcgacaatccagtaccgcccatgtctcttgcctcctcagaccgtcatgaggacatcggggtcgatctgctcggtcctcggattgtattctgggccatggaccttctgtgccatggtggtgtagtcatgaaggcggttgtagatggcgaggttgttgtatgcctcagctcccgtcatccgggttgtaggtgac

SEQ ID NO: 12325 - DNA, 260 bp, Zea Mays
catgtatggccttcatttttttctttccttttcttttcttttccttttctaatttgttttcttttttttctagtttcaattcaaattccaatataaaatgcatcatccaataataaccgagcatgtaaattagaattttgtattatttattcatttatcttattcacttatccaaatgcttttaaatatataatccatacacacaaacaatatacccaaataaaataccactttgcgtgtggggtccaattaaaagtgca

SEQ ID NO: 12326 - DNA, 441 bp, Zea Mays
gctggcggtgtgcgtgagagcgaggtcccggggactggtcagagggtcccgcatgacagtcgcaggatttctctccactgggccatgcggggtgggaaaaggagaatgggccaaaatgagtagtggccggcccaggtagtgtcttcctctttttctttttcttttttttctattttcttttcttgttttcttttattcttaactattttgaattcaaatttgaattttgaatacgaatttcaacattgtgtcaagtgtacaaattcaagcttctagtggaggaacaatatatttttatttacttatttttatccacaaaattcttattttcttctcttttctaaattctacaattccttttggattttaaattccactttggactttaatatttttttgtcacatttattattttattttgtcaccatgtgcacacaaaat

SEQ ID NO: 12327 - DNA, 172 bp, Zea Mays
atttgcttggccgccccctctccctctccttcttccccaagagctgcagccacccccacacaaaaccctagccgcccacattccccccctctccaaggtgcagccctcccgctggttctccgtcgcgtggctgcgagctcttaattggagtttggagggaggaagaagaaag

SEQ ID NO: 12328 - DNA, 1053 bp, Zea Mays
gaaggatttataataaatatataaatactggatagacaatgcaatttaaatgagagaaaacaatacatttctattgtcatagaaattacaatacttaaaaaataggaattcctactatattctaagagtacgtgaactttccttttttaaaaaaaaaaggtacggagggggtttctttcccttttgcacggcctagtccataaaagggcccaattacgtacgcacgagaggaccctattagggttttctggtgttggccgccgctccaaattctcctcccctttatttttttatttcttcttcgctccaatctcttctttcttctgtttgcgaatcggagcagcggctcttctgctacgcacgcagctcacgcgctcgtggctgggagcggcggtcacgcctgttcgcccgcctggccatggcagcgttacggcgacgacacccgatcgcctgcctggccaccaccgtggtggtggcgcagcggtggcgcccgctctcgcatagtgcaggcgcgaccttcctgccgtggtgcccgcctatgccacattcatcttccctttacttatacgcacgcgttcttggccgtgatggtgcatgcctgcgcgctcggtcgcggcggcgctcgtctgcgcgctcgactcgtggcggtgctctcgcgcacttggcagccgcgtcgaccgtccgcgtgcacgatcgaggtggcgctcgcctgcgtggctgcgcagtggtgccgcgtccgcacgctttgctgtggtgtttggcatctcgcagcttcaagccggcgataaaatctgctctagagatgcttttccttgcatatgtgtttatatccgaaggaagagaagggctaaaaaattacagaaacttcttattgcaagtgaacttaatcaactcacctttgctttgtgaactcctagatcacaagagcaatcatgctgataacatgttaagaaccctttgctactgagtatagttcaaaggctccttaactcataaacatagaagacataaagatatgagaggaactgagattcttatttatataatctgttc

SEQ ID NO: 12329 - DNA, 259 bp, Zea Mays
ccaaattcggcccagccgaggggggcggagtttctctttttctttttttttatttctatttcttttcttttccttttctatttttgtttctttttatttctttttcctttgaattaaaattttctaaatgatcttgagtgataaatatagtctatgtgaggtgctcctatcatttcaagtgtatgcacatgatgaggtgatctaagggtagagttaagggagaaaataaaataaggggggttaggaggttagggtttca

SEQ ID NO: 12330 - DNA, 518 bp, Zea Mays
attgcttgcctcatgttgaatttgcttacaatcatgccacgcattcttctacaaagatgtgccctttccagattgtttatggttacatccctagggcacctattgatttgatttcacttaatgctgccaacgccccacatgtagatgctgctgcacatgttgaacaaatgattaccatacatgaacaaacgaaacagaacattgctgctactaatgctaaaaatcaggttgctggtagtaaaggaagaaaacatgttacttttgagccaggtgatatggtttggttgcacttgagaaaggatcggtttcctactttgcgtcgttctaaattaatgcctcgtgctgctggtccttttaaggtgctaacaaagattaatgataatgcttatatccttgacctgcctgcggaatttggtgtttccactagttttaatgttgcagatttgaaaccatatatggccgaggatgaggagttgtcgtcgaggacgacttcacttcaagaaggggaggatgatgag

SEQ ID NO: 12331 - DNA, 181 bp, Zea Mays
gagagagagagttaggggagagggagagagctggcggcggctggggaaaatttcccagggcttgcgcgcgcggtgctagtgcgttagggttaggggcatgggcccctagtgggccggctgggtgggattttggttttttttttcttttttttttattccgaaattcatttttaaagaacta

SEQ ID NO: 12332 - DNA, 77 bp, Zea Mays
ctcctccagaactggatgcgccctccagccacaggaactcctagaatactcctcatcacctacaacaacatgggttc

SEQ ID NO: 12333 - DNA, 75 bp, Zea Mays
ttgctcattatgattccatccatgacttagattgcaggtcagtgatcaagtctccattatccgaggatataacgg

SEQ ID NO: 12334 - DNA, 183 bp, Zea Mays
cacattccttacttcaaatagtatagagtttaaatagaggttattacaataccggggtacaagctcgagagagccagaatataaagcgcagtaggaaaatgtactagcccaagccacaggcagaactgggtgcagacacagccctctcaatcaagcatagcagaaaagaagtctccggctgct

SEQ ID NO: 12335 - DNA, 3102 bp, Zea Mays
ccccaagacacatggtagcgaactaaacattaaatcgtaagacacagtaaacaaccacacgctagcgttagctatctacacgtcatcgggtgcacaacatcaacaccaccggaaggacgacgattactacctataattaaccaacgcaaacacgacatcacatgtacaagcatttaccacattcactttaaccatttatcagttactctattatcaaactacttaagcacacatacattcactgtgacttctaaatgtcatacagacaaacttagtttaatagggaataatcacttaattggattctaccaacattctcaatattctaatgcaagcacacacccaagagaacacgtagaaggtgatagactaatcacactgcttattatactaccctaatgaggttggttatttagcaatgttgattgaagctgattacttactagacttcaacaatttaatttactacatagagagacgtgcactagttacttacatataacccaattatattagttactatcattattactcatattcacttaaaaccaaaacaagcaagcagtcactcaagataaacacaacagggtagagtaatcaatcacaatcaacatgattaagacagtagcacatcagttacttgtttcagtcataactcacaagatattcatacaaaaatagtgatcaaatactttttggaaagtttaataaatgctctacaaccttggtattatcatcttaatgtgattggacacttaacaaggttaaatagtgataaacgacagctctgtccagatttggacagattcagacttcaacttccaaaaaatcataacaaaacattcatgcatccaaaacaattgatcctagactttctagaaatataatgaaattgtctaccaatcatttataaacaactcaggttggtttagtatgtatcaagggtaaaagacactatgaagaccttgctgtctagaattggacagattcagtcttcatacttcaaacttctataacttgagctttagaccaccaaaaaggatgatccaagacattttggaaagcttaataaaagcaatacataacttttataatcaccaagaagtggttccaattttaatcaacccaaacaatatagttttcgaaatatgtcccaaaagtggacataacacaacaatcattttgtaaacttcataactcttaaactatcaggtctatggtcatgaaattttaacacatgcaagataaggaagttttatacaactttcatatgatcatcaagaatttgattctaagcttaacgtaaacaaacattgtaatatctgaaatctatacagaaaattagacagattcaggtactgaacttatgaaaaatataacttctaaaccattaactcttagctcatacaattttaggatgagctagacatttaagttaaatacaacttttatatagcacatatctacataaaacatactttaatttactagattaatcgcacaaccaaaactgtacacgtaggaatttcagtttgctaacacaagaccactcactaaatcaccaagcaaaatcatagggagatactaccaccaatttctcaagtctaaatcattatgacttagttatcaagtttcaatttatattgagacacttaagcatttcgagaaacatgcacacttttgtttacttctaatttttcactaactcttcttataattataaaatgggtgttattttggcaccatatgaaactatctaatttggggctggaatgtttatgaggcataggtaataacaaattatgactaatgtacaaagttcatatgctcaggttttatagtttatttactacaataataacaaattgttaatgcaataaagcatgtgagagcaagttaaatctaaaactaattattttctgtaaatgctggaccatattaagttttcttaggatactataatatcatgcaaggacaatggaacaccattttccatttttacatatatataatatttgtaaatcatttaaaactacttaatgtgcatcaagcaagttaaatcactaacttagtgatacttcgaccataaattatgaaatgtttaccagtcaccgatcatcgcaccaagagtctactgtaaagatttcaatccatttagagcaatagagctacagatccaaaaataacaagcaaatcaattatatttttcctatttaacatgatttaattgacacaccaagaaaagagtaaacaacataggggttttatatttttcttggttagagtatgacttcaactaactaacaaaacaagtctcatcatttgtggatttttaaaattaaagctatggagagaaacaagttcatttgttttcgaaaccacttttaaatacgaatttgtacagaagcaattttccactgtgacatgccaaattatagatctgactaacaggcagagaatttcataagtaagttaacaaaaacaagtttcatgattttaggagctaccaaactcaaggtatgaatttttgaacacaacacaaaaatctataattttatgcacttttagacttggccttgggcccactcgtcataggcacgggggccttcttttaccttacgtaggatggagcagctctatcacttggagcacgtacggatggaagagatgaccgtagctggtcgaagaaccagcaaaggtggaccctggggatgtcactggcgccggctcaggtgagggcaagagttgttgccagtgttgttagagcaggcaagatgatgccaagcgtgcgtccatctcggcgtgtgtggatgctggttcggcgtgcgcctttggccatctgtggtgcgtggcggagggttgccgggctaggaagatggccgacgaggctcgccgctgcggttgagagcttctgcgcgcgcaggggctgatgtccagggctgctgcttgttctttcgttggcgagcactagcaagagacggagcagggtgcttgccgtccatggatgaggaaggagcagggcaatggcgtgtgcgatgtgagccagcattggggaatgaaatggcgtggaggaagctctggacatatcagccagcattgaac

SEQ ID NO: 12336 - DNA, 342 bp, Zea Mays
tttattgaccaatacatttataagtacctttaaaaagatttaagctaaatcatatcttgatagaaactatacaatagaaattattttttcccaaaataaactatttatgagtgaattgcatggctagaagcatttgcttaactattcatgttggagtttgattgtacattttaaataaatttgaaagctaagacatgaattgaatttggaaatcaaaactgaatttggaattagaaataaagaaatgtgaaaataaaaaataaaaaaataaaaaaggcaaaccaaccccgtggcccaagttccctttcggcagcgcatctcctctcactgtcggtctgtctt

SEQ ID NO: 12337 - DNA, 797 bp, Zea Mays
cagccgcgacgctgctcctagctctctgctcgctagaccgcgccctgggtcgcctttgtggactcaacctcgcctggccgttgtctcggatgcgtaggagtagtgtaggtgcttgcagtcggtggatcctcgatatcgagctagggatagagaagacaatactattccgtgtgtcgcttatccgatgcttgacggaatgcccaacagggaggtgatagcttcgtgtgtcggcgagtcgtcgttttcctcgttcagtgtttgcgtggccttgcccgaaccacgctgccatctcccgacagcttgcccttgccccctggacgtgcttgtcgcgctagtcaacccagcctcgatcctcgtcgtcgatattgtgcttgctggtggccaaagctcgcgtcgccctctccctcactggattcgtgtcctcgcaagagctcgcgctaacgtgctcgatcacacctcgccagctcgctccatactcaatctcgtcgtcgttccatgcgtcatcaagaaaactcaagagtcgggtgaagacaaagttagcggtgtgatattcaccaagtgctcgacgcaagggctgaactagaatccttgccgtactcgcggatagcgcgtcagatttagtatggtaagccaattcatattttcgttagcttaattattgaattagttcgatgaatgggatgtgattattttcgtgattttggagtagtcgtgttgggtaggtttgagatgttaaatatgtgacctatggtaaattagtgaatgaagtttaaatttagtatttgaaaatgtctgag

SEQ ID NO: 12338 - DNA, 317 bp, Zea Mays
cgatgtctgcaccagttttccgtggtggactgtcatggccacgcgatgtagatgggccggctgggtggtttttggcccaaagtcgttttttctctttctttttattttttttcttttctgttttgtttttcctttttatctttgaatccccaatttcgaattcaaatgtttgtggcaaatttgtacttaaatttgaatgtatgatttgaacatgccactatgggttgaatttatttattttataaatttattttgtattggctagtatttctctctttccttttctattttcccaatttcctaaatttcaatttggg

SEQ ID NO: 12339 - DNA, 296 bp, Zea Mays
tccggtgaaggcaagtaaaactgtgacggttattccatctggcaaatgaggagtcttattcttgaatatgttgtgctattatgttcacattcatattttgtttgtttattgagtaccatcatttgagaatgttcatgtttcatggatttcatatgttgagtttgaggtttgatcatgttactcaagtggttattatgtggaatgggtggaagtatatgactagtacatttttatttgggaagaacttatgatgttgtcatgcataatgcactcatcatccattgcattgaagttcg

SEQ ID NO: 12340 - DNA, 1242 bp, Zea Mays
gggagatgagcagaagcttcggattcccaactttagaagacggactttcggtgctgtcaaagaacgatctggctgacagcctagcttacaacagtttaaaggtgcgacaaatggaattcttgtatttttttttgtttgtttaaaactattgacacagacatgttcctgtttgcagggcctgatactcagcaatgccctcagggcacagaaagatgctgaagacgaaggttgtactatagccctgagcaaccttcgttccgaagtaattgaactgaggaatgaaggtctcgaaaaagacaaaatattatactcattgatagataaaataaaggaggacgaagctgcttttagaagtcaagctgaagctcagaaacgcgaaattgaagaccttcggaaacaactggccagagccaaagaagaacgtatacttgaagaatcaaagcgtgaactcagcgatcaatgggcaaatcacctagaagtgaccgttgaagagcttcgttcatccaaaaagagatgctacaataaatctatagattgtgttaaataattaaaggctagcttcgccaaggtcggcgcattctcaagtgaggaaaacttttcgagaggcaatcccgaaggtgtcattgaatggattgaccacgaagctgaagccttcgaagaaattttaaatagccgaggagatatatttgccttctctggcgccagagggattgccaccattttagagaagaagggctgcgaacatgtaaaaattttagcacagtccgaagctgctttgtcctttgaagatacaaaagatccttcggccgaagctagcataattggtggaaagttttttaccgatatctgggataatggtggccgagaaatggccggagaaattattcgaagaagtgaaaagggcattcacgatgctagagaagtagctgaggctgctgtcaagggcgcagaagccgaaggtcaattaggtactaaataatagtttttatcgtgttgtaatctttagacttttaagatctgtttgcgatttgtaatagcaatgtagccgtgtcctgcttcagatccgactaaagcaccttcggaccctcagccgaagggggatgacgaaattaaaaagatggccgaagctattatggacgaagtcgtcaatcggctcctgaatgaggctgcagaagtcgttttgagagaagagtaaacatttttgtaaaaaacttctgaaatgtaatatggtgtaacattttg

SEQ ID NO: 12341 - DNA, 291 bp, Zea Mays
cttagaccttgaaactagaatttgaatttgatattaactagaattttcaattattcatgtgattgaattaattttcatggatcacctattaatattactcaaaggaatgaaaaaattaaatataaaaaatttgcattagcatgttggaattttcttgattgtgcatttagattgaatttgggtgtccaactcagaattgaatttaaaatttgcaaattacaatagaaaaagaataaagaaaagaaaaacagaaaagaaaaaaaatgaaaagcttaccttcacttgggccta

SEQ ID NO: 12342 - DNA, 62 bp, Zea Mays
gttgcgaactcctatttcccaagccatcagactcgtcttcctcgactctttccctccgcgcg

SEQ ID NO: 12343 - DNA, 1394 bp, Zea Mays
taatgttctacttgttagattatggataaataagatattttatttatttggtatattatgcataatagtctagaataataattataaaaactagttgagtggcttatattcttattctaagtcgtgggtgtcctatactggtgagtcgaagttttattagattattaacgttatgctttagctaaggttgatataggacttgagcttggtttattgttggggacttgttctcaaatgctatgaattaataacaaggcaacacaaatgttaatggttaaaggtccatcgtccttcgaagcattatttcccttaggatataatgatctttcgacgaaggtcatgaaggatataccttcatcttcacagcatgtgttaatgaaagaagaagcatatgaaatataagagacaacataaataatcatatgacattattaatatatcttatttatattaacatggataaacagaaacaatattgaattacatttgtatcttcagcttgacagaaggtaaaagtccaagcgtgacacacaaatgaatacaagtcagcgtgaacagtacgggagtactgttcatctatttataggcacatggcgcagcctgtgtaaatttacattcatgccctacatatttactattgacttatggacaacccaacggggactagatagccttttcccctttaagtcggttcattttcccgccattgagccgaagttcccttgtgcatagcttcggagcaacatcagccttcatcgcgaccatgcttttcacatcgtgtatgcttttaacccgagtccgaaggtacctgctcatatgttacacttggaaaacattgttaaatcatgtttttgaggaccttcggaagacgaaggcccccaacagtagcccctcgcagtattaatttgttaagataacgaattcagactgtgacatggacaaaggccttaagccgaaggtccgaaaaaacaccttccctttgctagaatagaaacagtcaatgacagacggggccctccaatttgcagtgcactgggcgtataaataagaactcacactaactgcatttgatacgctgcttgtgctatttgcattattttctcaatcttttagctcttgctcactagcgcttgctagattttcaagctctctgaacttcggtttaaaaaacgcattttcaccatgtctggagaaaagatgtctcaggaagagatggttgttgcggaaacgaagctgaccgaagaagcgaagctgtttgagaagaagcagtctgtggatccttatgttgctggatttattgaatcgatggcaaaaacaaacacagagaaaattactaaagagatactggaaggtttgtctgaagatactggtgacagtgatagctatgatgcgga

SEQ ID NO: 12344 - DNA, 939 bp, Zea Mays
cccaaattgagaaaacctaaaggctttagggaaagagtcataaaatatccccaaaaacaaagtggagtcacatttatacccctgggtaccagaaaccctaattggaaccctggaactaaaccctaggggcctatgtgcaaaattagtccacttttgggttaaagtgcaaaaaccaagttaaataagtatattaggtcatttgggtcaatcatatgtgaatttgcaatccaaaacttgagatttggacttaagtgcaaaagagccatacttaaccctttttggttaagtgtgcatttcagtgtgattgcctcaacttgaagcccatgtaactttcaaattatggggtttgtgccctaggtcaccacatcaaaattatagcccaattataggacaacaagtttgcttaagagtgcaagccatgttcttgtaagaaaatgggagataatcatgcccaaactttggctgtcacgcggattaagtctgaaaatcagactgacagtgacattggatcatctttggaaacagtttatgactaatctagtaagaatttgcccatggctgctgtaacaaagatgaagatggtataatggacaacaactttgctgcagaacctcggataggttgccatggaaatttgagagaaaatcaagctccaacttgctctgtcagtcgactgaataccatttcccatggtacagtgtctacaccggatcagaccgccagcgcggctgtcctcaccgccgacgaccgatcttcgccgtgattcgcgccaccgccgttgtgattcacgtcgccgatgacccgataaggccgccaagtaaaagccatgcacctggggataactccggtgactcaccgccgtacccctcgtgctctgcggctgtggcagataagttcatcgacgagagccgccttctggccttgtgccacgtgcctgag

SEQ ID NO: 12345 - DNA, 222 bp, Zea Mays
aacgaaggaagcactggaaatcgttaatatggctgaatctattgttgacgaagtcatcaataaattgctaaataaagttgcagagaagatcctgaaagaagactagcacttattgtaaaaacatttttaaatggtcaatgtagctttattgtaacaagactgtaatatttgatgtgtacatccttgaatctaatatgtaaattgtttgtaattcacttcttt

SEQ ID NO: 12346 - DNA, 292 bp, Zea Mays
agggaaacacatccatgtcctcatcatcatccccttcttgaagtggagtcatcctcgactcaagctcatcttcttttcccaaatatggctttaaatctgaaatattaaatggtccagcagcatggttgggcaagctcgctctaggaatcaaatcaatctggtgctcaattccatgaatgggaggaagtcctggaggtaactcagagggaaaaatatctcggaaccgctgcaaaaggttagtcacagatgcaggcaaagtgctagcaatatcatcaatagaaaagaaagcatc

SEQ ID NO: 12347 - DNA, 218 bp, Zea Mays
ccctattcccctttgtggccgccacccccctctctctctccctctccttctcccccaagtgattgcagcaccacccctcaaccctagccgcccccctcctcctctccatggtgcatcctccccgcttggtaccccgtcgtgtgggtgcgagtcttccattggagtttggagggaggaagaaggaagaatggaaggaggaaaggaggaacccaaggtga

SEQ ID NO: 12348 - DNA, 827 bp, Zea Mays
ctaatattgaggatgatcatgatttgggaatgatatatgtggttgattcccatcttggatgaagttgaagtatctttttgaatcatgttgtatgaagtgttgtaggcatgtcatgcacatcgcatcatccatattgcatttgaagttatatcgtgatcttatggtccgaccgtaccggtacacttttagcatcatacgttgcccgaggaggggtacgatgcagcttcatatccttagaggtatgaaggcagaagtcatccttgcatttgcagacatttgcactcatgaggtatatatgaagtgtgacattactatgttactattgtggtttctacctgcgaggtgtggtaactaggtgtgttgtacgttgtattcgtgctgcaccttcgtaataagaaggttgcgaaatcaaatggtggtaaaacaatgttcttatgtggttaaacagtttgttattattttacttgctgagatgtgtcatctcactcttgcattactcaatgcaggtacttgatatatgttgggaatgaggggagtagcagcacgtccactttcactctcatattaaggctgcccaagcgcatccatgatttaattagaaacttgatgtcaaaggatgtttgtttttttactagtcatgcacactggttaattcagttcatgtcgtatgtttaactttcctttgctagccgtttaataatacttagtatgtttttttgtcatgatacatgtttatacactgttgccccctcctttatgctattttgcaaaggagatgctgtcgaaattttatatacggatgtcagaagtgtagttcagtagcattc

SEQ ID NO: 12349 - DNA, 1096 bp, Zea Mays
gtcctgtaccacgaccacgagtagcgcgacggacacggaaatcagccaacttctctggaaacttagcaaagcagttctcagaccgatgagtggccattttgcaatgttcacaaggctggaaacaggtgtttcttgacttctgagcagcggccaacacactgtcagaactcacaccagtaatagaagacatagacttaagacgagtctcttcagcaagtaattcagacaacgcctgagccatggtgagtatcagaactgtgaagcagtcttgcacgaagagaatcaaattcagattgaactcccataacaaatctgtaggtaaaaaacttctcgatgaacttgtgagctgggcaaggcacagctgtacaagcaggcaccatagaggtcaatgcactcataagacgatcaaaggcggaatagtattcatcaatggacatatcatgttgctcaatgacatgagtctgttgcataagggtatgtaaaagagcaccgctgtcctgaacaaaccggtccttcagatgtgaccagatagctttagcagtggtgaatttggacagactcataatcatagttggtttagtgcttttgaccattgcagtcattaccttaccatcattgatctgccaagtcttgattgcagcagcattgcttctatcggctgctaaaactggtgaatcttcagtcaaatgaaatagtaaaccgtgacctcttaatgcagtctaaacacaaaaggcccattctgggtaattctgcccatcaagcacaatattgacaacaatagcgttggctgacatattgaagagcaataaaacactaaagaataacagatctgagagagactggctgaatggtaccaaaatccctagcgggagcagcggatgaacagtggatacgccggttgcattcctggacgaaaccgtgcaaattcatagcagatcgaacagagtacagcagatctggtctaggctgcgtgcgacgcagaagcagacggcaggacgacgcagatggtgcggcagcgaacaccctgtgttgcgcgctgacggcgaagaacagcggggccgcgacgaacggcgcagatgcgggggtcgcagcagct

SEQ ID NO: 12350 - DNA, 826 bp, Zea Mays
gtccttatcttccccagccgtttctcctccagccacgcgcaacgcacccagcttttcttcttctccttgccaagctcccacgacgcccatcccctatgccgaggcctcccaactctctctcactcagccggcgctttgcccaatccccaaactcgtcgcgcccctgctcctccaggctggccgcacgcccatcttcctaccgtgctcgcccagctcggatctcttcttgccggcgctcttccctgccatggccgcaccccccctcagctcgcctccctcatgcacgccacgctcctccctgctcggccatggaagccacgctgtcgaccccgctttgttgggggtcttcggctttcgaaggttctcaaaagcatgatttaacaatgtttctggagtataataaatgagcacaacctttggatttggacccttcggaattgagtcaaaatcacagtataaagaagcccaagggaaacaaaggagggaacagagccgaagctgtgcagaagggagcttcggcataatgacaggaaaaaggaaaccgacttaaaggggaaaaggctatctagaccccgatgaattgctatagagttattagcaaatgaaaagggtctggatgtaattttacaagggctgtgacccatgcctataaatagatgaacagtactcccgtactgttcacgctgactggacatctttgccttcgtgtcacgcttgtactttcattttctttcaagccgaaggtacttttgtaacttgttaacattcctatttttccttaataataaaataaaaatgagttgatggtaataaatgactgttttat

SEQ ID NO: 12351 - DNA, 537 bp, Zea Mays
gtttgatttttatttgcatttagaataattttgtttgctcataattgatttatggatgtttagtagaatttcttttatattgggaatccaattaattagtatagaaatattggtccaaaaataaatattttagttataaaaaattttggaataattattatgatttttagagttatttaaaaaaatatttatttatatttttaaaaagaaaagaaaagaaaaaagaaaaaagaaaagaaaaaaatcgagaaaccctaaaccctagccgaccgatttggcccactaaggcccatctgctcgcgcgcccgcgcagcgcacgtccgcctcccctccaagccggaaatcgccgtcgtttccctctctccctccaccatttctctcactcaatgccgcattgaaggccgaccatttctctcctcggctctccctctctcgctctataaaagccccgagctcttccttctctccctccccgagctctctctctctctcacgctctcttctccgtccaagctcgtcgtcgaccgcgcccgcgcc

SEQ ID NO: 12352 - DNA, 998 bp, Zea Mays
gttgcatcctattccctgacattgagtatgcataagttttaattatgttaatcattgaattctatgatgaagtttatttgtttggaagtattaattctcaattgtctaatattgtggatgatcataatttggtaatgatatatcatatatgtggttgattcccatcttggatgaagttgaagtatttttttgaatcacgttatatgaagtgttgtaggcatgacatgatgatcgcatcatccatcttacattttgaagttatgtcgtgatcttatggtccgaccgtaccggtacatttttagcatcgtacgttgcccgaggaggggtacgatgcggcttcatatccttagaggtatgaaggcagaagtcatccttgcatttgcagacatttgcactcatcaggtatatatgaagtgtgacattactatgttactattgtggtttctacctacaaggtgtggtgactaggtgtgttgtacgttgtatacgtgcttcaccttcgtaataagaaggttgtggaatcaagtggtggtaaaacaatgttcttatgtggttaacagtttgatattattttacttgctgagatgtgtcatctcactcttgcattactcaatgcaggtacttgatacatgttgggaatgaggggagtagcagcaagtccactttcactctcacaataacgctgcccaggcgcagccatgatttaattagaaacttattgtcaaaggaagtttgtttttttaactagtcgtgcacactagttaattcacttcatgtcgtatgtttaacttctctttgctagccgattaataatacttagtatgtttttgtcatgatatatgtttatacactgttgccccctcatttatgcaattttgcaagggagatgctgccgaaattttatatatagatgtcagaagtgttgtttagtagcattccggggtgttggtggaccccgaggtgttacagttggtatcagaggataggctttagattct

SEQ ID NO: 12353 - DNA, 915 bp, Zea Mays
atcattgaattctatgatgaagtttatttgtttggaagtattaattctcaattgtctaatattgtggatgatcataatttggtaatgatatatcatatatgtggttgattcccatcttggatgaagttgaagtatttttttgaatcacgttatatgaagtgttgtaggcatgacatgatgatcgcatcatccatcttgcattttgaagttatgtcgtgatcttatggtccgaccgtaccggtacatttttagtatcgtacgtggcccgaggaggggtacgatgcggcttcatatccttagaggtatgaaggcagaagtcatccttgcatttgcagacatttgcactcatgaggtatatatgaagtgtgacattactatgttactattgtggtttctacctgcaaggtgtggtgactaggtgtgttgtacgttgtatacgtgctgcaccttcgtaataagaaggttgtggaatcaagtggtggtaaaacaatgttcttatgtggttaacagtttgatattattttacttgttgagatgtgtcatctcactcttgcattactcaatgcaggtacttgatacatgttggaaatgaggggagtagcagcacgtccactttcactctcacaataacgctgcccaggcgcagccatgatttaattagaaacttattgtcaaaggaagtttgtttttttaactagtagtgcacactagttaattcacttcatgtcgtatgtttaacttctctttgctagccgattaataatacttagtatgtttttgtcatgatatatgtttatacactgttgccccctcatttatgcaattttgcaagggggatgctgccgaaattttgtatatagatgtcagaagtgttgtttagtagcattccggggtgttggtggaccccgaggtttt

SEQ ID NO: 12354 - DNA, 341 bp, Zea Mays
cgaagtcaaaacatttcttcttaaggttgttgagtgattcgctcagcttcaggttcttttcagcctcaaccttgatcgtcatattcaaagctttggtttcatgactgaatcggatggagttttcttgcaaaaatatctgagtctccttcaactctttgcttaatctctcattctcagcctaagcttcggcaagcgatccttcggttgagcacaacaaatcaccttttcctttcaaagaatcttcaagtttcttgattttatcttcaaaacctttgataacaacttcattctttctatcctcgtcatcttgttgcattttcaatgctttacttagcaataaa

SEQ ID NO: 12355 - DNA, 124 bp, Zea Mays
gccaaatcgggaatcgggggaaattaggccaccgccccgacctcgatgacgtgcggaggttcgccatggaggttgaagctggtaatggcgtccgattggagaagggtcgtctcgggctccggct

SEQ ID NO: 12356 - DNA, 248 bp, Zea Mays
ggctgggccaacttaaccgaactggccccaatgcaggttttgcctttttcttttgtattttcttttttttatttttttaacttcataatttaaattctcattcaaatacaaacttcatggtaaattttgttttctcattaaatgtccaacttaaacatggcatggtgaatttatttatttttttatatttattttgtgctaactagtgctttctttgtccaattctagaattccaatttaggtttaac

SEQ ID NO: 12357 - DNA, 333 bp, Zea Mays
cttcctctctcaatttttgcagccaccaaaccctagccgcccccccccctcccaatcccctcctcccaaggtgccaatccttgccgctcggatcatcgtcgtcgtggtgcgagtcttcaatcgttttggtggagggaagaagggaggaaggaaagggggagaatccaaggtgattttttgtgttcattccttgttcatttgcgctgcaatttaattgattagaggttgcgtttgcgattgggtagagggggttgtccagaattttaggtggtgggtgaacagcagtagtctagcagtttctgtgttttttcgtgaggaattaagggaaatcag

SEQ ID NO: 12358 - DNA, 628 bp, Zea Mays
gccaaaagcactagctaagtctaaaatcaggttttagcttttcaagttttagtgtgattttcttaagactagatgtgtacctagctaatcatacagggtatcaagcaatttagcaatcaacatcttttgccatacaacacatttccacttattactcaatgtagcagcatggatcaagcagtctcattagctgctgttgggggcctttggcttccgaaggtcctcaaaaacatgatttaacaatgtttctggagtatgatacatgaacaggtaccttcggacttaggtcaaaaccacagtgtgaagaagcacaaagaatacgaagaatggcgcagagccgaagccattcgcaggaaagcttcggcgtgatagcagaaaaggaaaccgacttaaaagggaaaaggctatttaaaccccgatggattaccatagagttattagcaaatgtaaagggcatgggtgtaattttacatgggctgcatcccgtgcctataaatagatgaatagtgctcccgtactgttcacgctgacttggcatttgcttttgcgtcacgcttgtactttttatctgccttcaagccgaaggtacacttgtaataaattattatttttatctgttcataggaat

SEQ ID NO: 12359 - DNA, 202 bp, Zea Mays
tgcagccgccccctccctctcttgctctcctccccattggcagccgccccctaccctctccatggctccctcctccctctagatcccccccacgcagcaaggatcgagaagaggaggggcacgttgaattgaagaggaagagaggatcaaggagatgttcttccccatctcttcttgaagattttcttagggaaaaccctag

SEQ ID NO: 12360 - DNA, 384 bp, Zea Mays
attaaataaaaataatacatttggttattaatgaaattatggtaataaaaattttcttttaagtgtttgttatttatgtgcatttggaatgatttttgatttctcataattgattttagatattgaatagcattttctcttaaataaaaattcacttaaataatataataaatattagtctaaaaattaatattttatttataaataattttggtttgattattatgaattttagggttatttaaatatgtattttgaaattagaaaaaaaaaatagaaaagaaataaaaaaaagagaaaaaaacaaaaacctaatctaactaaccctagccggcccatttggcctagcagccgccgccctagcctcctgctcccttggccgcc

SEQ ID NO: 12361 - DNA, 1662 bp, Zea Mays
cagtttccttatcctcaatctccagccgccgtgcattccctactcccagctgccctccctgcttctctcttccccgcggcttccatcctctactcgccattgcaagccgtgctccctcgctgtgggatttccctctgcccggccgagctcgccccggacccttcctgctgcagctcacgacccccagctcctctgctcgcttggagctcaagcttcctcgcgccggtgccctgcgtattccccgtcacgtccatggccgcacccagcttgtctcccttgagctcgcccctgcgcgtgcgtcctcttgtgtcgtccctacgtcgcgcgcgatcttttctgtgcgtgccagcagccacgtctctctggtgtttcctccctgcgcgcgcgaaatttccttgctcgctggcgcttggtccgtgctccactgtgccatgctgtttctctgcgcgcgttaagtttccgtgccgagttcgcctgggtcgcaagcctgtgtgtcctcgtcgtgcttgctgctcaccaaaacgtcccatgttgcagcgtccctatttcagtatgtcattccacgtcgttatcgtttctgtcgtgagctcgtcagtcatcaacaaacaaccgtggtcgtgttcgtcgagctgttgaacccgtcctcacttgctcgtaacttcgtcatcgccagagccctcactagattcgtgtcctcgccagctcgcttcatgtttaatctcgtcatcgtcctacgtgtcatcaagaaattccaagagtcaagtgaagacgaagctaaccgagtaatattcaccgactgcgcgacaaaaagctcggacatcctgcgcgactcaagttcgattcgtcaaaattattcagacgaggaaaagatcttcagcagttgattaccgaagaaaaaaaggcccctggtgacgtcaaccgaaacccgtagccatgcttctgactatctcgtcaaattagtcagggtaagcagatttgttattcgtgcgagtggataaataaatgatctgactaggtctaatatttattagattgcctgagtcgttttagtaaattggtcgatgccgtaggataaaagaggtctcaataggtcttagtgttgcgggactgtaggtgttaaaaatgggaagttttattaatatataagatacacaatttaaagagttaataaaaagctaggaataaaaatagattttctagtgttattatatcaatttggttaatggatgtagttgatgtcctgctgtgatatctatggtgtttaatgcttggttttaagtgtttcatcctttttagcgtagattatatatattatacacgttatacatgtgctcatacatgtgcatcatgcatctcatgaggtacgataaataatcgcgtgatgtggaagacggtccaagtcggccccaagcgtgggctactccgcatggtgaagctgaaggacgaacgtaaggatggatgatcggaacgagtgccaagttaaaagatgatcgccaagtggtcgccacctaacaaacactaacctagtgttactcaggcaagccccggtgcatgcaaccccttccttgtgtttttaaatacttttcgcacactttaagtctagtgaaatgtgcattaggttcataggagttgcttggaaccctttgatgcattgctttcctt

SEQ ID NO: 12362 - DNA, 708 bp, Zea Mays
actcagggttttattccctgttgtttttcaggttctaactttgtgctgctgtgatggtgttaagtgccggtgggctcggccttcttataagtcttagtaacccctctatacttcttagtgaggatgatcatttgagctagcatatatttcaaacttatacttttgtaatcactccgataaaataatgtaaatttttttataacctataaaatttggtaataagatttccgctgcaaaaaatgttgtgtgtgtgatttgtgttacttaatcccgcggttctggttgaaagtggtttatccgatgtccttggggcaatcggacagatcctgttgagttatctggtgcacatgcatggccgtctgaggtctttgggacaaggacaggtgcatgtgggcccaataacttggaggttctgccacagctggtatcggagctggattaagtatctacagtcacatacgtatttttaaaacaaaagttttggttttgaaaaacctattttcaactaaacacattgtttggttttgaaaaatagttttgaaaaactataatgctagcgacatcctctgttaagccctaaactaaggactattaggtggcttagttgaaaaccactaacccacaaccgggtggttattgcatacatgtgtattgttatttttgaaaaccattcagttttgaatggatcgatgcccaaggtaaggtgag

SEQ ID NO: 12363 - DNA, 285 bp, Zea Mays
caaaggttgagtttagagatcgatttgtcgagttatctaaattcactttggcacaaaccatcctgagaaagtacttacaaaaaccaagttaattcgactagtaaccacctagtcatcgttctagtcatgcctcgattgcctcacgtgtgcttttccagcatgagtgatcagtcgagccatgcctaatgctcgataaaatggactggttgcaaagtccgcatctataggtccccccgctggtgattctctagaatctataccatctttcgtggacttgaattctcg

SEQ ID NO: 12364 - DNA, 1571 bp, Zea Mays
ctcattccgatccaaaactttggatgtaaataacggatgcaaattcatctaataacgaagccggaatctgtttaactcggtccatttacaacctgtccggaacaaactagaccactgtaattagtattgataacaagtaattggtgaatgatttagttcgctaaatcattagactgaaatgggtacccgtataacgtgttgaccaattatgttcatcgcttaaaatcgtgattcaaaaatatcttcgattgccattaaaaaaaagaaaagataatccagaaaaagaaaaaaaatcttgtctacgttcctatccatagccgctcaagcacaggtgaaaaaaaaatgcagccgacgtgtcttctttatccccttccccgcgcgcagtttccttatcctcaatctccagccgccgtgcattccctactcccagctgccctccctgcttctctcttccccgcggcttccatcctctactcgccattgcaagccgtgctccctcgctgtgggatttccctctgcccggccgagctcgccccggccccttcctgctgcagctcacgacccccagctcctctgctcgcttggagctcaagcttcctcgtgccggtgccctgcgtattccccgtcacatccatggccgcacccagcttgtctcccttgagctcgcccctgcgcgtgcgtcctcttgtgtcgtccctacgtcgcgcgcgatcttttctgtgcgtgccagcagccacgtctctctggtgtttcctccctgcgcgcgcgaaatttccttgctcgctggcgcttggtccgtgctccactgtgccatgctgtttctctgcgcgcgttaagtttccgtgccgagtttgcctgggtcgcaagcctgtgtgtcctcgtcgtgcttgctgctcgccaaaacgtcccatgttgcagcgtccctatttcagtatgtcattccacgtcgttatcgtttctgtcgtgagctcgtcagtcatcaacaaacaaccgtggtcgtgttcgtcaagctgttgaacccgtcctcacttgctcgtaacttcgtcatcgccagagccctcactagattcgtgtcctcgccagctcgcttcatgtttaatctcgttgtcgtcctacgtgtcatcaagaaattccaagagtcaagtgaagacgaagctaaccgagtaatattcaccgactgcgcgacaaaaagctcggacatcctgcgcgactcaagttcgattcgtcaaaattattcagacgaggaaaagatcttcagcagttgattaccgaagaaaagaaggcccctcgtgacgtcaaccgaaacccgtagccgtgcttctgactatctcgtcaaattagtcagggtaagcagatttgttattcgtgcgagtggattaataaatgatctgactaggtctaatatttattagattgcctgagtcattttagtaaattggtcgatgtcgtaggataaaagaggtctcaataggtctcagtgttgcgggactgtaggtgttaaaaatgggaagttttattaatatataatatacacaatttaaagagttaataaaaagcttgaataaaaatag

SEQ ID NO: 12365 - DNA, 315 bp, Zea Mays
attagtatactcagtcttgcttgtggcataattttacaggttctctggaggacatggttgctggagtgacttggccgtccatcttgccacctggttggacagtcgagtgagaccctacctcagcagaggaggagcatgaggagtgatgggataggcttccccatctctttgttttttatcgttagttttattccgctgcatttcgaacaatgatcactgcttttgttaacactccgatgatgttgtaataaattaattactccttaatgtttggttttatgttttattgtatttgctctgtgcctcaccatcgag

SEQ ID NO: 12366 - DNA, 464 bp, Zea Mays
ctcgattgaaattgaatgacaagttagatttaaagaagaaataagaggagaattgaaaacacggataaggatcttatatgtgcttatttttgcagttagaagcatctttctactaatagaagattaatgaaataaaacttgtatatcatgcttttattataattgtgcatataattttgaaattgaacgtagaactaaattgaatctggaatagaaaacaaaaataaaaaaataaaaaaaaatggtgaaagctgggccgaattgcccaacccattcattcttccctgccgtcaactcagaactcacatccttttcttcctattgtttatttcctaacagcaaagctatctcatccagacaccatgttgttgttaactcatttccaactagtgtcgcttacatgtggggccatgtcgtcagctgcacctcctctgggtccaacagatcgcatttgcctgagttcg

SEQ ID NO: 12367 - DNA, 393 bp, Zea Mays
gacaattttgtcgaaccccaaacagaccataggtcagtttggccggcctcagaatggtgtcaacaagctcctttaaaaatttcagattttttggacacccgagcgaaaagttatgcccgttttacggaaggtacctcaagttatgttctaaaaacgaccgggatgaaacaaccgtatcctttctccttcgttatcttttttttctgttttttttgacgtaaccaaaggagaaaaacaaggaagcggccgttgacttggtttcttttttttctgtttttttttcgtaaccgaaggagaaaattaaggaaacggccgttgactcagtttgttttttctgttttttttacgtaaccgaaggagaaaaataaggaaacgatgttgactcggtttgtg

SEQ ID NO: 12368 - DNA, 304 bp, Zea Mays
cccctgcccacctcctctctccattgttgcagccaccaaaaccctagccgccgcccccccaatcccctcctccctaggtgctactccgtgccgctcgaatcatcgtctcttggtgcgaatctccaatcgttttggtggagggatgaagggaggaaggaaaaggggagaacccaaggtgatttttcttttgtgttcatcccttgttcatttgcgctgcgattcaattgattagatgttgtgtttgcgattggatagaggggggctgtccagaattttgcgtggtggatgaacagcggtagttcca

SEQ ID NO: 12369 - DNA, 1390 bp, Zea Mays
attgttcttagggattttgcccgaacttcggtaaaggcaagtaaatacagtggtggttgctaccgtttggtttgcatcctattccctgtcattgagtatgcataagttttaattatgttaatcattgaattctatgatgaagtttatttgtttggaagtattaattctcaattttctaatattgtggatgatcataatttggtaatgatatatgtggttgattcccatctggatgaagtggaagtgtctttttgaatcatgttatatgaagtgttgtaggcatgacatgcacatcgcatcctccatcttgcattttgaagttatgtcgtgatcttatggtccgaccgtaccggtacatttttagcatcgtacgttgcccgaggaggggtacgatgcggcttcatatccttagaggtatgaaggcagaagtcatccttgcatttgcagacatttgcactcatgaggaatatatgaagtgtgacattactatgttactattgtggtatctacctgcgaggtgtggtaactaggtgcgttgtacgttgtatacgtgctgcaccttcgtaataagaaggttgtggaattaagtggtggtaaaacaatgttcttatgtggttaaactgtttgatattattttacttgctgagatgtgtcatctcactcttgcattactcaatgcaggtacttgatatatgttgggagtgaggggagtagcagcacgtccactttcactctcataataacgctgcccaggcgcagccatgatttaattagaaacctattgtcaaaggaagtttgtttattttttttttatatggtcgtgcgcactggttaattcagttcaggtcgtatgtttatctttccttgctagccgagtaataatacttagtatgttttagtcataatatatgtgttgggggccttcgtcctccgaaggtcctcaaaaacatgatttgacaatgttttccaagtgaattatatgaacaggtattttcggattcagaattatagatatggagcacgaccaggacgaaggctgagccagacgaaggtcgggggcagccgaagctgtgcgcagggaagcttcggcgcgatggcagaagggggaaccgacttaaagatgaaaagacttcgggggcctcgacagatttccataagccgttagcaaatgtaatgggcatggatgtaattttacgtgggctgcgtcccgcgtctataaatagatgaacagtactcccgtactgttcacgcggacctttcatttgcctttgcgtcacgcctgtacttttttaccttctcccaggaccgaaggtacatttgtaatttgaaatcatttctattttcccatgttaataaaatagaaatgattccatgatgatgcttatattat

SEQ ID NO: 12370 - DNA, 2456 bp, Zea Mays
aatcatccctcttccccaacgagcatcacacctgtctcatggcaaaagagaagaaggtaagcaatcgcaatactagtacttatgcttcttcaagtgatgatgaatctagtgatgatgaaatagactatgcatgtttattcaaaggattagatagaaccaaaattgataaaatcaatgaattaattgatgctttgaatcagaagaatagattgttattaaagcaagaggaccttttatatgaagagcatgataaatttgttagtgcgcaaaattctcttgctctagaagttaaaagaaatgaaatgctttcatgtgaattatctacatgccatgaatctatctctagcttaaaaaatattattgatgacttgagtgctaagttagaaatagctaataaatcaacctcttgtgtagaacatgttgtgatttgcaataagtgtaaagattttaatgttgatgcttgtcatgagcacctagtttccatttctaaattaaatgatgaagtggctagtcttaatgctcaacttaagactagcaaaaatgaatttgataaattaaaatttgcaagggatgcctacactattggtagacatccctcaattaaggatgggcttggctttaagagggaagccaaaaacttaaccagtcataaggctcccatctccgccaaggaaaaagggaaggctccaatgactaatagtgctaaaaagaaccatgctttcatgtatcataataggagaaattctaggaatgttcattatgatagaagttataatgcctttgattcacatacaatgattgcttcaagttcttctattatgcatggtagaaatttggctaggaaaaatgttattcatcatatgcctagaagaaatgttgttcatgtacctaggaatgtatgtaatgaacactctacaatttaccatgcttgcaatgcttcctttgcaatttgtagaaaggataagaaagtgattgctaggaaattaggggcaaaatgcaagggagataagacttgcatttgggtccctaaggctattgtaactaaccttgtaggacccaacaagagttgggtacctaagaccctagcctaatttgccttgcaggtttatgcatccgggggatcaagctggattatcgacagcggatgcacaaaccacatgacgggggagaagaagatgttcacctcctacgtcaagaacaatgattcccaagattcaatcatattcggtgacgggaatcaaggcaaggttaaaggcttaggcaagatagccatctcaaatgagcactctatctccaatgtatttttagtagagtcgctaggttataatcttctatcggttagtcaattatgtaatatgggatacaattgcttattcacaaatgtagatgtgtctgtctttagaaggagtgatggttcactagcttttaagggtgtactagacgacaaactctatttagttgattttacaaaggaggaggccggtctagatgcatgcttaattgctaagactagaatgggctgactatggcatcgccgtctagcacatgtggggatgaagaaccttcacaaacttctaaagggagaacacgtgttagttctaactaatgtgtatttcgaaaaagatagaccttgtgcagcttgtcaagcagcttgtcacagcaagaatgtgatgaccacatcaagacccctggagctgatgcatatggacctcttcggacccgtcgcctaccttagcatcgggggaagtaagtatggtttagtaattgttgatgatttttccagcttcacttgggtattcttttgcaggataaatctgaaacccaagggaccctcaagcgcttcctaaggagagctcaaaatgaatttgagctcaaggtgaagaagataaggagcgacaacgggtccgagttcaagaacctgcaggtggaggagtttcttgaggaggaagggatcaagcacgagttctccactccctacacaccacagcaaaatggtgtggtagagaggaagaacatgacgctcatagacatggcgaggacgatgcttggagaattcaagacgcccgagcggttttggtcggaagctgtgaacacggcttgccacgccataaaccgggtctacattcatcgcctcctcaagaagacgtattacgagctactaaccgagagcaagttgatcctgatgatgtagatgaggatgatgttccaacggacgcgatttgtaccatggcgattggagacgtgcgaccagaggaacacaaggagcaagatcaaccttcttcctcaacaacggtgcatccctcaactcaagatgacgaacaggtcccctcaagaagaggcgtgtgatcaaaggggagcataagatgtccaagttgaagaggaagaagcaccacaagcccctccaactcaagttcgagcgatgattcaaaagaaccatcccgtcgaccagattttgg

SEQ ID NO: 12371 - DNA, 1371 bp, Zea Mays
ctacctttgacttaattggatattcagactccgattatgctggatgtaaggtcgataggaagagtacatcagggacgtgccaattcctgggaaggtccctggtgtcgtggagttctaagaaacaaacctccgttgccctatccaccgctgaggccgagtacgttgccgcaggacagtgttgcgcgcaactactttggatgaggcaaaccctcagggactttggctacaatctgagcaaagtcccactcctatgtgacaatgagagtgctatccgcatggcagacaatcctgttgaacacagccgcacaaagcacatagacatccggcatcactttttgagagaccaccagcaaaagggagatatcaaagtgttttatgttagcaccgagaaccagctagccgatatctttaccaagcctttagatgagaagaccttttgcaggttgcgtagtgagctaaatgtcttggattgacttggattgacttatagcatacatgtgtttatgccttgatcatgttccttatgccttttttgtggtgctcaagttgtacaagcactccccagacctcacaagtccatttgtgagtgatgcacatatttagggggagatgtgctacaacttgaccctttgaagactaaccatgtgtttgagcttgcttgatttagtctcaaaggtggattgaaagggaaaaggtgaacttggaccatgcaagacttccactgcactccgatgagagggtaacttactccaagttcatctcaatacccttattgcctttttactcttatttgaagattttggtgaggcaatggggtttaagggccaagattgatcccgttttggtgcttgatgccaaagggggagaaaataaggccatagcaagaaatggatcagctaccacttgagaattttgaaaataatagaattagagctttttgtttgacaaaatactctcattgtcgcttattgtcaaaagttggtctcttgtgggtagaatgtttgattatgggaaaagggggagtttttgaattcttgatcaatttctcttggaatacctctctctatgcctcaacaagtgtgtttgacttagagataggaaattgagtttgatttgcaaaaacaaaccaagtggtggcaaagaatgatccaaatatgccaaatttgaatcaaaacaaatttgtgttctcatttgcattaatgttgcacttcttttagttgctttttgttgtgttggcataaatcaccaaaaagggggagattgaaagggaaatgtgcccttgggccatttctaagtattttggtgatcaagtgccaacacaaatggtttaagtgtgaaatatgccaaatggtggatgaagtgaaaatcaac

SEQ ID NO: 12372 - DNA, 728 bp, Zea Mays
ggacagtgtccggtgcgccaacggctctaaatcttcaacggtctgctgcgccagaataggaaagaaatctgcaccggacagtgtccggtggtgcatctgactgtccggtgcgccagtcgacagaaggcaagaactgccttcctggattgctctcaacggctcctagctgccttggggctataaaagggaccccctaggcgcatgtaggagtacaccaagcatactttgagcattcttgatcattcacactccgtctttgcgcactcgtttgacattcttagtgatttgagctccgttctagtgagaaccttctgatattcatttgagctcaagtcttggccgtgtgtgtgcgtattgttgtggatttgtgtgtgttgcttccctcccttactctagtgctttcactttgattctcattgtaagggcgagagactccaagttgtggagattcctcgcaaacgggaaagagtaaagaaagaagaacaccgtggtattcaagtcgatcatcggatcacttgagagcggttgagtgcaaccctcgtctgttgggacgccacaacatggagtaggcaagtgttgtacttggccgaaccacgtgataaatcctcgtgtctcttgtgcttgttctcactatgtctattttgcttcacaagagctctccttagccacttgattttattgtgctaactcctaaccaagttttgtggctttaagtttcaagtttttac

SEQ ID NO: 12373 - DNA, 369 bp, Zea Mays
atttttagcaagccccggtgtgcgctcacgttcgccatcccctgttcgacctcgtcgtcgagcttcgccttgctggtcgtcgatctgcgcaattccggttcgacaatcgatgctgtctccgtcgaactcctatttgccatcacgccgagctccttcagcactgcccccaacccgttgtcgttgttccgtcacctcgctttgacgctagtcccttcgtggtgcctccgagttggaatcacgctggcaaaaggatccccaagagatgttcaaaagttggatggtggggtgtgtgatgattcagatagtacctgccaagtgctcgacaaattgcctggatcggaaaattactaccgatctcgcggattcgag

SEQ ID NO: 12374 - DNA, 160 bp, Zea Mays
aacttttgggaggcctactccccatagaaactgtctacctgagactgtcccttggcccgagggtctgacacaaggttagaatccgagctcttccagagtggtatatcactgatggcatgaccccccggaagggggccttcttcgccttccacctaagctg

SEQ ID NO: 12375 - DNA, 198 bp, Zea Mays
cgacggcgcgtcctggcggcgatggcgtgacacagggaggaagaaggccgtggggccagggcgggcccacacgccagcgagagagggaggagggggtttgggcgcgtggccagctaggtcgttagtgggccggtttcagcctgcggctagggttagggtttttgttttttttgtttttttatcttcttttcttttctt

SEQ ID NO: 12376 - DNA, 499 bp, Zea Mays
accttgggttcctcctttcctccttcttttcttccttcttcctccctccaaactcccatggaagactcgcacccacacgacggacaccaagcggggaggctccaccttgatgaggaagaggtggggggggctagggttgaggggtggcgttgcaatcacttggggaagaaggagagggattggggcggctgcaagagtggaagagagaggggaggggcggccaaaggggtgggggagtgagagggagggggcggctagggttaagggggagaaactaatgggctccccaccgccggatcgagatccatggcccaaactcgctctcacgtctgctcccgaccccagcgcacaaatccaacaagtattctactgttttattggtgaatgcttcctataaaactccaaccccaactacacagatcacgaaagaaaagggaaaaatatatttaacttcttttcagaaaattgggtatcacactctaccccccttaaaaagaat

SEQ ID NO: 12377 - DNA, 220 bp, Zea Mays
accttgggttcctcctttcctccttcttttcttccttcttcctccctccaaactcccatggaagactcgcacccacacgacggacaccaagcggggaggctccaccttgatgaggaagaggtgggggggggctagggttgaggggtggcattgcaatcacttggggaagaaggagagggattggggcggctgcaagagtggaagagagaggggaggggcg

SEQ ID NO: 12378 - DNA, 109 bp, Zea Mays
gtgctgccccttcgcctcctcgcctccgtggagcatgactcacagccgcccgcccgttggtcttcttggaccaccttcggcggttgtctcttcattccagtaactgcag

SEQ ID NO: 12379 - DNA, 208 bp, Zea Mays
ctctctcttccactcttgcagccaccccaatctctctccttcttccccaagtgattgcagcgccacccctcaaccctagcccccccacctcttcctcatcaaggtggagcctcccagcttggtgtccgtcgtgtgggtgcgagtcttccatgggagtttgcagggaggaggaaggaagaaaagaaggaggaaaggaggaaccaaggtg

SEQ ID NO: 12380 - DNA, 1976 bp, Zea Mays
tgcaaaagtatctaagttgattcttgctaaagccttttccttgattcctatttaaccagcaattcttgagagtcttttctttagtcgggtaagtcttgctgagtacttgcgtacttagggttttacccattgttgctgcaggtgatgagaacataacccgcacagatatgaccatgttaatgcctcctgctacaaagacattgaggaacaaagaagttgattggggaccaagtaatgatatttccaacatttccatcaaagcaagcacatcatcaaatttaaagatatacttgggtcaggagcacacactagagtcgaggacgactctattacaagaagtggaggatggtgaggacatcactgccatcaatacaccacacagtgacccccttcaccattaaaaaatggactagtgaaccgagtccgtgcacgtaaatttaattatcagttgaactcgttccttgttgttgaagctaatcatttcttaaatgaggtactaataccttgtgattactttattatgctaaggtgtttgggaggtgaaccatctagaatttgagaaggcaacaaagcaataaaagctgctccacttgaggggatttcgaaactacaacaagtgcaagtttaagagggcatatctttcagcttccaaggttgtttaatgcaaataagcacttgttggaaaggtctctttgtctactttctagtagatcaagagtcaaggagagaacgcatccaaggcgtccaggaacggccgagacaacttcatgactccaccagcccgagtgatttcgtaactgcaagctctaaattaaatggagcatatctttcaactcccaaggttgtttaaagcaaataagcacttgttggaaaggtctcttcgtctactttctagtggatcaagaatcaacgagagatcatacactaagcgtccagaaagtaccgagtgaactcctgctctacccaagtcaatttcgtaactgcagcatgcaccaaattaaatggagcataactttccactcccaaggttgtttagtgcaaataactactttttggaaagctctcttcgtctactttcaggtgcatcaagaatcaatgacagaaaccaaacgaggcgtccagaaactgccgagagagtttcgttctccattagaactcctttctattcctctatttaagcaactagcagccaccaaagaacttgggtttttgtttgatgtaagtttatcctttgctacttccttgtaaacgcgtgtgtcggctagaccacccggacacttgaaacagaaccccaactctatcagatccgtgcgcgtctgcgttttatcttgttcttgcttgttctcgattgcttgcaggttcaatgctgttcttggcatggcaagagcagcaacaacaggagccggtgtaactctcgctaaggcgcagcacccttgtggttgttgtagtcggatagcacaatgtcgacctcgaccccaaatcgtagttatcaggagacggtgtacctgtcgctcaaggcgccacaccatcttggttgtcgtagtcgggcaaccaacgtcgttctccaacaagttttccacctccatcatctctcatcaaaagatcgggcacccttctacccgttgggtttatcaagtggtatcaatttcaggttactcggtgagagatctcaatcttcggtgagagcccaaagatatatttagagcagaaattcacctaaaaacagtttgagcctttgatttactacttagttttcgacttgttgaattcacagttgctgcatttgggtcgagttgctggtttaaagttttcttaccgctaaagtttcgagttcgcgccaccttgttttcaatcacctgtttagacctcttgctgcaattcaaccaaaaaagaagagaaagcaaaaaggcgagtgcataaaaaaagccgcactaatcagcaaaacaaaaaaagacacgtgcaaaaaaagagagaga

SEQ ID NO: 12381 - DNA, 1118 bp, Zea Mays
aaaagtttggtcatcaacatcaatcatgatgcaaaaccgaggacggtttgttgtcaagaaggggagaatgatgagaacataacccgcacagatatgaccatgttaatggctcctgctacaaagacattgaggaacaaagaagttgattggggaccaagtaatgatatttccaacattttcaacaaagcaagcacatcatcaaatttaaagatatacttgggtgaggagcacacaattgagtcgaggacgactctattacaagaaggggaggatgatgaggacatcactgccatcaatacaccacaccagcgacccccttcaccatttaatcatggaccagtgaaacgagtccgtgcacataaatttaattatcaggtgaactcgttccttgttgttgaagctaatcattccttaaatgaggtactaataccttgtgattactttattatgctaaggtgtttgggaggtgaaccatctagaatttgagaaggcaacaaggcaataaaagctgctccacttgaggggatttcgaaactacaacaagtgcaagtttaagagggcatatctttcatcttccaaggttgtttaatgcaaataagcacttgttggaaaggtctctttgtctactttatagtagatcaagagtcaaggagagaacgcatccaaggcgtccgggaatggccgagacaacttcatgactccaccagcccgagtgatttcgtaactgcaagcactaaattaaatggagcatatctttcaactcccaaggttgtttaaagcaaataagcacttgttggaaaggtctcttagtctactttctagtggatgaagaatcaacgagagattagacactaagcgtccagaaagtgccgagtgaactcctgctctaccctagtcaatttcgtaactgcagcatgcaccaaattaaatgcagcataactttccactcccaaggttgtttagtacaaataactacttgttggaaagctctcttcgtctactttcaggtgcatcaagaatcaatgacagaaaccaaacgaggcgtccagaaactgccgagagagtttcattctccattagaactcctttctattcctctatttaagcaactagcaacc

SEQ ID NO: 12382 - DNA, 1056 bp, Zea Mays
gttaacagtttgatattattttacttgctgagatgtgtcatctcactcttgcattactcaatgcaggtacttgatacatgttgggaatgaggggagtagcagcacgtccactttcactctcacaataacgccacccaggcgcagccacgatttaattagaaacttattgtcaaaggaagtttgttttttttaactagtcgtgcgcactagttaattcacttcacgtcgtatgtttaacttctctttgctagccgattaataatacttagtatgtttttgtcatgatatatgtttatacactgttgccccctcatttatgcaattttgcaagggggatgctgccgaaattttatatatagatgtcagaagtgttgtttagtagcattccggggtgttggtggaccccgaggtgttacagaaggtgcactttgttgttgttagtcaggtaagacagtgttgtgttcatatgcttgttgaaaacctgaaagtctttcgagttacctcatcatggaggagaagacatgcaatggtcgtcttttgtttttcagttttcactgttgcacttttattgcaagatcgcgttgcagtgatcatgtctttttatttgtctttttgatatatatacagaaaacactatatggactctcggagaggattgctgatctgcatgaatctatcgcacaaaagaaggctgaactgggagttgtctaaataggatggagaatgtgcactttgttgttggtagtcaggaaagatagtgttatgttcatatgcttgttgaaaacctggaagtatttcgagttacctcatcatggaggagaagacatgcaatggtcgtcttttgtttttcagatttcattgttgcacttttattgcaagattgagttgcagtgatcatgtctttttatttgtctttttgatatatatatatatacagaaaacagtatatgaactcttggagaggattgctggtctgcatgaatctatcgcacaaatgagactgaactgggagttgtctaaatagaatggagaaggtgcactttgttgttggtagtc

SEQ ID NO: 12383 - DNA, 411 bp, Zea Mays
agctcctgtaaaaatttcagattttttggacacccgagcgaaaagttatgcctggtttacggaaggttcctcaagttatgttttaaaaacgaccgggatgaaacaaacgtatcctttctccttcgttttcttttttttttgtgtctgttttttttatgtaaccgaaggagaaaaacaaggaagcggtcgttaactcggtttgtttttttttctgtttttttttcgtaaccgaaggagaaaatcaaggaaacggccgttgactcgttttgttttttctgttttttttttgacgtaaccgaaggagaaaaacaaggaaacaatgttgactcggtttgtggcgtgatcaaatgggagatggtggcggcgcgagggtttgaatggtggaagaacacaatgcaaccagcaacaaat

SEQ ID NO: 12384 - DNA, 259 bp, Zea Mays
gttacatcaaaccctaacgcgccgcaaccatcttccttatttttctccttcggttacatcaaaccctagcgcgccgcaaccatcttccttgtttctctccttcggttacatcaaaccgagtcaacgccgcttccttatttttctccttcggttacgtcaaaaaaaaaacagaaaaaaaacctagtcaacgccgcttccttgtttttctccttcggttacgtcaaaaaaaacagaaacaaaaaaacgaaggagaaaggat

SEQ ID NO: 12385 - DNA, 547 bp, Zea Mays
aatttgtcatatgcattgcatcgcaggtgatgttattactttttttaattgggttggtatttacttatacttagtaattgctaataaaattttgaccaactttaaaagcaatgctcagctctaaccattctctttggtaagccttacacttcacgtgaactcccatctttggcgagttcatgcacattattccccacaacttgttgagcgatgaacgtatgtgagctcactcttgctgtctcacacccccacaggtcaagaacaggtaccacaggatgaggcgcttggaggatgctgtgacgagttcgcgagaggtctaggtcgtcgtctcctagtcaactttaggttgccggaccgttgtctccgtataatgtatttatttatttattttgtatagaactcctattatatagtaaagatgtgagattcaatcctgtgccatgattcatcttatgtgagacttggtcccagcacacctggtgattatgttcgagcccgggtcttggtgcccctaaaacccgggtgtgacaaaaagggatcatccaac

SEQ ID NO: 12386 - DNA, 238 bp, Zea Mays
ctggcccccacgcagcagtggccgaaccagtgcacggaaatggagccaggccgtggaggctaaggaagcaagtggccgtggatttgagagagccggcccaagtcgagttctggtgtttttttttctttttttttcattttcattttctatttaacttcaaatttgtttctagttccaagttcaattattcaaactcacatttatactcctattttatttatttatttttcagattttc

SEQ ID NO: 12387 - DNA, 990 bp, Zea Mays
cacatttggagctctaaactgagatttttaaaactaggtccttcactcttcactaatcacaacatcatacatagattattttggatcctagcgaatgcattctaagtgtatcaagcaagttaatgtaagtgcatatgatgacatgccaaatttttagttctcgtaacaacaggggtgttacactaaaaatacgagaatcatcgaaacctacatatctatcaatccatttattaaaacaaagtaataacgtacagaatttgctcaccataatcaacatcggctcaatatttgcaagaacgatgacaagcttcgatttaagtcttcgatcgaacacttggcgagtgacgcatcgaaacgtcactttcttcttctccaagacacactgatatttttcattagtaaaatcagacgggaacttcgcaagaaccacgatgctttctaatacaggcttttcgtcgagtactttgtgaatttcacactgctagcttcgtcttcattcaatttttgggatttcttgatgacgcacgacgacgaaatcgatgacgcagacgggtgatgaggtagggtctgtagagatgtgcgtaagggaaggtgagctcgcggtgccgagaatcgacgacgtgattcgagacggctgggcacgcaggcgagctacggatagtcccagcgcacagcacgacgtcgagggcctggtgacgcatctgctgttggaggaagcactgctgcagagctcaacacaggagctgcgcggttctgtacggatgcgagcagggagagggctggcatcgctggctgttggaaggcgagggcgctatgggcgagcggtagcagggagatagacatggcgagctggaagccgagcagcagcggccagcagaggagctcgcacgggagctgcacggcgagggagaggagcacagctgccaggaaattgaagacaaggaagctgcgcgcgtgggagataaatggagatagagaacgtgagggaga

SEQ ID NO: 12388 - DNA, 1209 bp, Zea Mays
ctatgccttgttatggcatatgaaagcacaaactgaaatccactatgccctagctgattccatagtttctccaccgtgccacaccattcacatacatctagggtaagccctcaaaccttatccacccctctatttcactaagaaggccagaacaccgagtaggcactggcagtggtgaccacacccaccgaatcctccacctccccgtggtcagtcttcccttgaaggtaatatgttcgagttgttcgtgttttctaacccctatgtgatggtgatgctcacggcattaatcttttgaatgctaatattattctggccagaaccccgacaggtttgtccaggacgccactgcgaaccacctttgcgtggactgactaaaccatgcccttctcgggcaaactcatgtgagcaccgtgcgcttgatagatcaccgatactcaccatagccttgggttgaacgctaccatgctctagacctagattcgagctcaccggagctcgttctccgccgtcaccatggctggagatgttgtacgttaccccattccaattaaccgagggaaagtgaagggttagtctcatagattcgatcactgtgctcagtttctctagaaatggtcaccagcggtgagatgggtacgcgtggccaggtgttcgacatgtgctcagcggagtcgggatctgggatgagaaagtgtaaaagaacaaaaacaaaagggcctcagtgcacatgtcagtgagacataggaataggtcacatgactcttgttcggttagccaatctagcagggcctaaatgaaaagggcctcggttcacaattacgggtgaatgatccttagaaacaaacgagtttatcgaaactcggcaccctgagtaagttatctgattcacatacatatccatccgaggctttaaaggcaaggattggtatacgtgggaccgataatttggttgggttgtgacaccgtccaccgctaccgagtgctcctcctgccaccactccaccgccgccgtcgggcccttctccatcaaaaggttaatttttattgtgtattttattgcatatttttggcgacaattatttaatagccgccgaaattagtatgtatttgtaattgtgcttgtttcattaggtatgtgattagtattattgtttagttttattccattaatgtatttgtggcatatgtggttcagtgattagtggc

SEQ ID NO: 12389 - DNA, 463 bp, Zea Mays
atttcttaatatataatctacaatataaattatatttccctaaaattcataaggtgtgaactattctccatttcatgatgggaatcatgtataaaagaactaaaataaaacaaatatataaaatatatttttgcattcgtgctggaaattttgtgatgtacatgtagtttatattggagtcttaaaactaattttgatttagtttggatttgtaaattaaatagaaatctaaaaacagaaaatagaaaaaaaaagaaaaaaacctcacctaaacttgcgccatgggtcgtctccaccctgcgaccgggccaactccccacttactcctcctgcacaacccaccttccccctttctgtttctgtgttcattttcactgagtccccgtcaggtgggcccgttcgccagcgcgccatccatcccatgcatcctcacgcgtgtgccgccagggacactacgttgtgg

SEQ ID NO: 12390 - DNA, 272 bp, Zea Mays
gtatggtgaaatgattaagtttaaaaggtagagcttaatcttactactggaaattctagtggtacacttagccatttagggtcaagtttggttaagtcaattagtctgattattttagtgttccactgatttccatttaatgttttagtaaaagtttattaatattcctagttgaattcattggggtgagattcattattctttcccaatttctttcttcttctccttctcttttatgcttttaaggtgggcttgaactacaacctaccttt

SEQ ID NO: 12391 - DNA, 202 bp, Zea Mays
cagcaagctaggggggcatgtcgcgtgttctactatgtcatgcgaggctatggagacagtggagagtgcgggactagaagcgatgaccgagtgctaccgatgggctcaccgctcagcctctcacgggcacagccgcacaggcatttggcgaacggtcgagcgacctatgagcagcggtggccagtgggcgacgggcaccagc

SEQ ID NO: 12392 - DNA, 243 bp, Zea Mays
aaatactatactatataaagaaaaagaaatatataaataaatataatctctctatacttgcattttcaatttgtacatttaaaacgagtacaagttcacaattgaatttgaattcaaatttgaaatctaaaattaaaaataaaaagaaaacagaaaaaaaggaaaaaaaaagactggaacctcgcactgggccgaattactcctggccggcccaattcatccgcgctcggcccaatcagctgt

SEQ ID NO: 12393 - DNA, 279 bp, Zea Mays
ttttgacgtaaccgaaggagaaaaacaaggaaacgatgttgcctcggtttttttttctgtttttttttcgtaaccgaaggagaaaaacaaggaaacggccgttgactcggtttgttttttctatttttttttgacgtaaccgaaggagaaaaacaaggaaacaatgttgactcggtttgtggcgtgatcaaaggggagatggtggcggcgctaggatttgaatggtggaagaacacaatgcaaccagcaacaaatgacgcgaaagcacacaaattcaac

SEQ ID NO: 12394 - DNA, 320 bp, Zea Mays
ggcggctcggatgcgcggacagagagagagcaggggagagaagagagaagggcagagagcaggcagggtgatggtggctaccagagggcggcagccatgggagaggagggcgcgcagatgggccttcgtgggccaaaacggccgagtttaggtttagagtttctcgtttttttattttttttcttttttttctaattaaaaatgtaaattcaaaaatcataataattcagaccaaattatttataactaataaatttattttggaccaatatttctatattatttaattggattttcaatataaattaattccactaaac

SEQ ID NO: 12395 - DNA, 457 bp, Zea Mays
gaaaaattcccagaaactgctaatactactgctgttcatccacctgaaaaatctgtttttttggacagcaacatacccggattcaaacaacgatatctcctaaattataactccgaatcgagcgcataagtactcgttggaaaggtatgacaaagctctacatgattatcccactgattcccactaattaccccacgaaaattcccagaaatccctagaactactgctgttcacccactcacaaaattcctggacagcacctctaccgattcgcaaagataaacacataatccaattgattgcagcacaaaaacaacaaaagttaatcacaaattcaccttaggttcttcccttcctccttccttcttcctccctccaaactccaattgagatcgcagccacacgacagagaaccacacgggagggctgcaccttggaggagggggagaaatggggg

SEQ ID NO: 12396 - DNA, 229 bp, Zea Mays
cctcttccttgcttggccgcccccctctctccctctcctcccatgtgtttgcagccacaccacctaaccctagcccccccatctcctcctctccaaggtgccattccttgtcgcttggatctacgtcgcgtggtgcaagtccccaattggttttggtggagggaaaaagggaggaaggaaagggggagaatttaaggtgatttttgtgattatctcttgtttatttgtg

SEQ ID NO: 12397 - DNA, 385 bp, Zea Mays
caccttcgtaataagaaggttgtgaaatcaagtggtcgtaaaacaatgttcttatgtggttaaacagtttgatattattttacttgctgagatgtgtcatctcactcttgcattactcaatgcaggtacttgatacatgttgggaatgaggggagtagcagcacgtccactttcactctcataataacgctgcccaggcgcagccatgatttaattagaaacttgttgtcaaaggaagtttgtttttttagctagtcgtgcgcactggttaattcagttcatgtcgtatgtttaacttccctttgctagccgattaataatacttagtgcgttattgtcatgatatatgtttatacactgttgcccccccatttatgcaattttg

SEQ ID NO: 12398 - DNA, 363 bp, Zea Mays
caaaggtagtcactgaaaaagaacaactagcacagcacaaagagaaacaacagatttagagattcagcccccttcttcttcttttccttttttttcttttctattcttttttttcttcttcttcttctgttttttttgcagggacctaaaccctttttttcactatgacaacccaaacaataaagatattgctaacagcccctttaaatcagatttaacaaatcttgttaatatagaaagtccagaaatctctacgatgattgcggagcgctcagaatgaattttgagacaaggtcagatccgttggaaagaagataagataagctttccagattgtatttaaacttccaaatcggacatgag

SEQ ID NO: 12399 - DNA, 448 bp, Zea Mays
caatttcaaggttgggcgattaggcgtcggatcgtgtggccggcagcgaagctccgccgcgggtatgccctgcggtgccaccgtgttcagttggggttggtggcgtggtcgcatccgttgatctagggatcggcggctaggctcaaacaagctatgggacgttggtctatcagggaacggccacgattagatatgtgagaactttgtcattttaaatcagtgctgcagattgacgaatgggtggatcggatggtgtcgttgcggggggaatttcgggccgtggatctcggatccaagggcaggtatcacataccggttctggttttacgggatctaatgcatgtcgttggttttagatcgggcagctgggaatcaaggacaccctttcagccgtgaaacaaatacaaaagagccctcggttttcttttaaatcaacccgcagtctggg

SEQ ID NO: 12400 - DNA, 601 bp, Zea Mays
tgccattttacgattatttgcctacgaatttttaaagttaagcacagattctgcaaatttaagcgcttctaccttcactctgggcccacgtgtcataggcagggggtcttcttctttggacgtagggggcttcttcccaggttgcaactagcgtgagcgccatgtgggcaagtcgacgatgagggttggtgcttgcttcggccatcgagaaggatgacatgctcgtggaggccgaacagagctcgcacgtagccgctgttaccataccgctggagctcaacgtacgccacggccagctcgatgtgcgcgagcagcaacaactcatcaaaggttttggcctgcgtgtggagttgcagtggctgcgtgggaatagggttgacgtcgtcggcgcgcagtgaagcttggagagaggaggtgcaggcgtaggcgcgagcgagcgaggctcgtccggctatggtccgctggctggccggtgcttgcaactagactattggcaaggcagggagcaccatagccatggaggagctcagagagggcgccatgggagtcgatctctactgctgaaggtggaagaaaaaggggggcgtcgtagggaaaggtc

SEQ ID NO: 12401 - DNA, 216 bp, Zea Mays
ccctcccctctctcttccactcttgcagccgccccaatccctctccttcttcctcaagtgattgcagcgccacccctcaaccctagccccccccccacctcttcctctccaaggtggagcctccccgcttggtgtacatcgtgtgggtgcgagtcttccatgggagtttggagggaggaagaaggaagaaaagaaggaggaaaggaggaacccaag

SEQ ID NO: 12402 - DNA, 650 bp, Zea Mays
cccccccccacctcttcctctccaaggtggagcctccccgcttggtgtacgtcgtgtgggtgcgagtcttccatgggagtttggagggaggaagaaggaagaaaagaaggaggaaaggaggaacccaaggtgattttcgtgatcattttgttgtatttgtgctgcaatccacttggttacatgtttacctatgcgatttggtagaggtgctgtccagaaatttagtgggtggacgaacagcagtagttctagtgatttctgggaatttttcgtgggcaattagtaaggatcagtgggagaatcatgtagagctttgtcatacctttccaacgagtacttatgcgctcgatttggagttataatttaggagatatcgttgtttgaatccggttatgttgttgtccaaaaaaacagatttttcaggtgggtgaacagcagtagtattagaagtttctgggaatttttcgtgggtaattagtgttaaccagtatgataatcatgtagggctttgtcttatctttccaataagtacttatgtgcttgatttggaattatattttaaaagatatcgctgtttgaatccggttatgttgctgtcaaaaaaacagatttttcaggtgggtgaacagcagtagtattagcagtttctg

SEQ ID NO: 12403 - DNA, 359 bp, Zea Mays
aaaaattcccagaaatccctagaactactgctgttcgtcctcccacaaaaaatctggacagcacctataccgattcgcataggtaaacatgtaaacaattggattgcagcacaaatactaaaaagaatgatcttaaaatcaccttgggttcctcctttcctccttccattcttccttcttcctccctccaaacgccaatggaagactcgcacccacacgacggggtaccaagcggggaggatgcaccatggagaggaggagggggggcggctagggttgaggggtggtgctgcaatcacttgggggagaaggagagggagagagagggggggtggcggccacaaaggggaatagggaag

SEQ ID NO: 12404 - DNA, 2749 bp, Zea Mays
ggcagcgtctcctttgtaattataagcatcgcagaagcaaaagagatatatcaatacaaaatgaatcatactaatatgatataattctcatcaaagacgattaaccacgaatgaaccagcttatgcctacatcatatttcaaaatatgaacaccaaaagtcaataacgaaagctaattatttggttctttaaacagtgtgtgcaacatgccgctacttcccactccccttcatgagcatcaagcacctgcattgagtaatgcaagagtgagatgaaacatctcagtaagcaaattgttttgacgatatatttaaaccacaaattgtattaatcaacattttaaaggaatcacaattaagatcagaaaatacgtgtagatatagaacccaatagtcctaatataaccaataccatctcatttcttcgaacaagcacaataggttgtataacacttccctgcgtcaacaatacctgtaaatatcacttcaatgtatacataggaatgcaatgtgtaggtcctctgccttcatacctgtgatagtataaaaccacagcctctgcaaatatcacttcaatgaatgcatatgaatgcaatgcatatgttctctgccttcatacctctaagggtatgaagccgcatcgtacccctcctcgggcaacgtacgatgctaagttgtaccggtacggtcggaccataggtcacgacaaaatttcagatgcaagtgaatcatgcaatgtatatggcatgctgcatttatcaatatacatcacttccttcacatacaatacaaacctcaaataatacttcgtttaccttcagatacaatacaaacctcaaataatacttcgtttaccttcaggggtgtgaattaatctcctgggtcatactcgaatcataatcatcatcaatatatggttgagcatcagtataatacaagcaagtaaagcatcaccatagagtttaattatgaaagaactccataattctgaatattagagtgtaggcgataaaaaacaacaagtcaaaacgatagcaaccaccactacattcacttgccttcatcgaagaagaaaagtgtactaggaatgatccagagtgtagccacctgcaagaggatataaaaccaagtacaaatatttcagaaacatttgccaacaatcaacaaatcgctcctatacttgaaaccaagacccggtgaaaagactcccaccctgaaccacatgccaaacagcagcagcgctgtttgttaattttgtatctttaaaattataacagtggtgatatcaaacaaatactctaggagtatctacacaaagtactctacaacttcgatattcaatggataattaaattctgccatctataagttctaaaacatctgacaagataactgactgaatctgtttcacacagcagcatagttaacttcaaaattcgatatctccaaaactactcaaccaaaaattatgaaattctgctggaagtaagaacttttatccctctacataagtcgatatagttggaacagccaattcggcaatttactagatgaaatccaccagtgaatagacccgctcatttttgtcaggcaaacaggaacagccacagtaaaacaaacataactggagtttcataattcatatgaatgcactctttaacaatctggaaagcttataaaattatctacaacttattttaccaaacgaaagtttaattctgtttataaaattgcctaaaacttaagagaacagattctgcacggaattatgagactgaaaaactgctataactttctgatctgatgtccgattgaggtgttcttcgcggccacggaaagatctacaaattgtctacaactcatagatagactttttattttttttgaggcccctaagaccacggaaaactatcatgaacagaaattgtcgaatctaccattctgcagaaactaaatttgagatcaaaacctaaccccacatctaatccaacctctaatcctttaatccgcatgatgcacgacctccaaaagcatataattacagggaggaacaaggatcccatccttaccttgggtttctccaagaaaatctgcaagagatggggtagaacatctccttgatcctctcttcctcttcaattcaacgtgctcctcctcttctcgatccttgctgcgtgggggagatctagagggaggaggaagccatggagagggtaggggcagctgccaatggggaagagaggaagagagggagggggccggcggccaaaggggtggaaagggtggggggcgactgcaaccattggggagaaggagagggggtcagctagggttggggaggagaggggggctcccatccatcggatcgagatcaatggcccatactcgctctcccatttgagctcccgaccccagcggaaaaaaagccaaaagatcttgtaacaccccgggttccacaaacaacccagaatgctactgaactacacttctgacgtccatatataaaatttcggcagcatcccctttgcaagattgcataaataagggggcaacagggtatgaacatatatcatgacaaaaacatactaagtattattaatcggctagcaagggaagataaacgtatgacctgaactgaattaaccagtacgcatgactatataaaaaaacaacttcctttgacaataagtttctaattaaatcatggctgcgcctgggcagcgttattgtgagagtgtaagtgggacgtg

SEQ ID NO: 12405 - DNA, 386 bp, Zea Mays
cttctccgtaaggacctgttcgttggatgaccacttgggaaaacagtacaaccgtgagggtggtatgggacgcccttacctgattaattagaggaacttgaggtatagtcggcttcaccatcgtgctgtcaattgggtctgggcacagtacttgctctaccgaggctgggtgccaaggttctttcgtgttgcttttattagtcaccctttctatggggagagctactgtgtttatcaaattggagaaacctaacgggaggctatgatctttggggaatctttgtaaaggctacgtagtgataccctaccagattacccaggtactgatcaatggggagtagcgctcctcgggcagaaagggaatcatggctcgtgggtaaagtgtg

SEQ ID NO: 12406 - DNA, 1526 bp, Zea Mays
gttattttgaataactcccgtcggcctggcggcgcggccgacgggagttatttaatcgccgtcggctgtacgcgcggccgacgggagttacattaattcccgtcggctttacgcgcgggccgacgggagttagttaatccccgtcggctacgttgactggccgacgggaattaagtagttttcgtcggccttactttggccgacggggattaattaattctcgtcggcccgcacgcaggccgacgggaattaatgtagccgacgggaatgatttgaattgctgtagtgcatggatacaaagctaaacttcagctcaacttatcatccgcaaacggatgaaaaaacggaaagaacaaaccaagtgttggaagatatgttaagagcttgcgctctaaagcatggtagaagctgggataagagtttgccctatgcagaattcttgtacaacaatagttatcaagcaagtctaaaaatggcactgtttgaagcactttatggacgaaagtgtagaacaccgctttattggaatcagatcggagaaagtcaagtatttggtccagatattctccaagaaacagaaaagcaagtacagattgtcagagagaacttgaaaatagcacagtcgagacagaaaagctatgctgacaatagaagaagagagttgatctttgaagttggagacttcatataccttaaggtttcaccaatgagaggaatgaaaagagttaaggttgagggtaaactatctcctcgctacattggtccattcaaaattttggaaagaaaaggtgaagtagcatatcggttagagctacctgatagtttatcagacgtgcatgacgtatttcatgtgtcacaacttaagaaatgcttaagagtacctcaagaacaattacctatggaagagatcaatgttaatgaggatttgacttattcggagtaccctatcaggattttggaaacatctcgccgaattaccggagtaaagttatcaacatgtgtaaaattcagtggagtcatcattcggaagatgaggccacttgggaaagagaagatgaactcaaagcagaattccccgagatattcgcagaagttccttaatctcgaggacgagattcttttaagggggtaggtttgtaacacctcaaaaaccatcaactaaaaataatataattagaatattagtagtaataatattaaaaatattttcttcaagtgtttgattttatttgcctttagaataatttttgtttgctcatatttgatttatggttgttccgtagaatttcttttatattgttttgtagaatttcttttatattgaaaatctaattaattaatatataaatattggtacaaaaaataaatattttaatcataaataattttggataattattatgatttttagagatatttaaaaatatatttgtttatatttttagtagaaaataaaaaaataaataagaaattttgaaaccctagacgtgttggccaatttggcccattaggcccaaaccggccgc

SEQ ID NO: 12407 - DNA, 427 bp, Zea Mays
ctcctctcccctgcgccagaaaccgccgctgccacctcctcctatgtaacaccctgaatttggtggtataaaatttctttctaagtacctaccatattcaggtgttactcttctctctctagtttctctctctgtttttcttttgggtatatttagcttaattagtgagggattaattattttattttgtcaaaacaatatgagtcatgaaatgttgcatcatgctgagctccaaatattctttgaattgttgcacatgtttgatttagttggaatttgaaacatggtttgaatttgaattgaaaaccctagaaaaaataaattagaaaaggcattagaaatatcaggaaaatgaaaaaaaccaattcggcccaagtcagcctagcaggcccagtcccgcgcgcgcgccctcagcccttgacaggcg

SEQ ID NO: 12408 - DNA, 12876 bp, Zea Mays
agcaccctcgccccctctctcgccctgcgcgcgcatccaagaagctccgccaccgctcaccgaagcctgtcgctcgttcctcgaccgttgttgagcccccgtcgcgtcgttgcctcggtgaggtccgcctcgccgtcagcaactcgggacacccctcgatttgcccttagcccatcttgttcgcccggtccacgctcaccggagtgtttccctgtgcagccagagtccatcgccttcaacccaaggcttccccacgtccccgccgtcgcccaagcgctcctatgttcgcactcaaggtgagcaaccttcctatgcacttatttcgtccgttactgccctagtgtccgcacaattcatcgccagagttgatccacgccaccgttagaccgcctcgccgtgttccgcgccctctggtgcctctgtgcctgtattgcacccacgactgagtttgccagatcgccctgagcatgcctgagcccttccctaaacccctagagctctgtcgtggtcgttcctcttgtctccggcgacctcaccgccgaggagcaagagcggcgctgcccgcaaccgtaaaaccttcccggtgttgatctccaccgttcgatcctgatcgcgtggtctagatcaccgggtaccgattcgcgcccgcgtgcccagtctccgggcccgccaaacagcgcctacaccccctggagttgggcccggctggtcagcccgccttcccctctagtcgctgacgcctcgtccccacttgtcagctacactcgcccgtctgcgcccgcacgctcgtctgcgggatctaatctgggccgttgataggagatctgacggtcaatttagccctgcaccccttcacgtggcggttttgcttaagagaccctcggattttcaagaatcaacccgccgtccctgagtattgcgcgcaggtccctggtttcttttaaatagacccctgcccttttaaataatcatagaattgggcttattttcatatttcaaacttcaaaacttgtttatttcatatctttttcatatgaactccaaattagtggttcaaattgcaaaatgttcatagaaatattctctgtccaaataaattatgatcatccacatcttatgcactttaattttatgcctagagtaaagattaagtttaagtaataatgtttttgtttagtaaaataaataaaaatgaaaattctaatggtacttagatgtttaatattgtgagattagtaaaatgttgtgcatgaattggtccctgatataattttgtgtctcactaaaattggtggcactaaacaatatagtccataatatcttgggaatcactgatctctaattatgtgaaaccctaacatttaagtctactctttatgttcatagtgtcttatcaaacttgtgttcacttgattgtacatgtttggtgtgctgttcatttttactttcgaaatgtattgaatgtatcatcgctttatttagacaatgagcagccgtggttcctgagtgttttgccgaagatcttcctgagcaacaacctggtgaaggcaagtgtcctctgacctactatgtcctacatacttataattcatcgtcccgcattacattattgaaacctaaggattgactagtctgtatttaccttatccttgtttaccttttgggttatcatggttagctttaatgctattgctttactttaatcaatgaacatgatgtgattacttatgatacaaatgatgttatcccgattatgttcttgtgatactttaggggacctaggccattttcctgagtacctctccgtaaggacctatttggggagcgacacccgggatacagtgcaaccatggagggtgaaaagggacgcccttagatgattaattagaggaaccagaggagtagttagctttgccgtagggccgtcactggggttcgggcatagtacttgctctaccgaggctggttgcagaggttcttgatttggttttgttagtcacccttcctttggggagaggtactttgtttatcaaaccggagaaacctaatgggcaactatgacctctgggaaatctttgtaaaggctacatagtgataccctgccaggccacctaggtagtggtcaatggagattggctctttttgggcagaatgggaatcacggcttgtgggtaaagtgtgcgacctctttagagtgctagaaactgatatatcagctatgctcacggttaagagcgaccttgggatcctctttgattagaagaactttggttacttttatgatgatggtctaattatgatctctagtatttcctcttggagggagtacatttgggtaataactgggtttattactaaaacttggctctagtagtagtaataaatacctgaccaactaaaagcaactgcttaaccttaattccacatacaactactccactttagccaaactggacatttgctgagtacgttgatgtgtactcacccttgctttacaatccaccccaccccaggttgtccccattgtacttagtgctcaggaggagatgctggcaacatggaagattttgaagagtttcaggactacaatgagttctagtttatcttagtggcaaacccccagtcagctacctgtgaaggccttatcttctacattttgtatttccgcactttgatgtcaatgactatgttatagactcagtggatgtcttggacatcttgttgtaataaaatacttttccgctatttattttgagcaatgtgtgatgatgtccaattatgtaatcgctgtgtacgtgagtttctgatcctagcacgtacatggttcacattcgatttgccttccaaaaccgagtgtgacataagtggtatcatagccttgctgactctaggactgctaacctagactagaatggtcgccctaaggactatagacccctactcttaccttgaccttagtgttatttcaaaagttggtcatcttgaccaattctgtattattacccatctcacaaaattttgtctcacttacctttctgtttacttgctggtcttatagttctactctcactcttgtgcttacgatgtcttttgtagatggctcgtattagatgcactgcacgtaagtcagtgatcctatttttgccttctcgcctggtggagcacccactgcgtcgcccggtgccaggtcagtccagtcacctggagggactgcatcatcgcctgcacgaggagcaggagcgctgatgccaggagcaggagcaggagcagcaggactcttcccctcacctcagcaggaggtggagtctgggaggcagccttctcctgcacctcagccagagatgccccctgcatcaccatagggcatcccagctactggaggagaccctgacggagacggagacgacgacaacgccgatggtagttcaagccacagcacggagctctcagaggagcaggagccggagggatggatcgctagacccatcacccacgacgccgctcgtgggtgtcacttccacgatgctctcgacaccttgttgcgtcaagccttcgaccgacacacttcgtccatcgagtaccattgtgtagtctaccagcatcgtcgcgggttatacccggaccagtgggaggctacttgcttggtgcgccgtccagacaatgatctacggggtgcagaggccttctcagagcactattctatcactgagagggatactgtcgaggcagccatgcaagatgcagcacgacgagccctttcgcagtattgtttgttgttcagcggggtagctgatggccttgacctgaagtactaccctcgccgttcgaccggaagtgctggaggtgtgattgtctcgcccgttggtgaaggcaatcccaggatgaacagcatggtcaacttggtcgtcgtgctcaacaccgagctggaccacgcccttgacgagttgggcaaggtttaggcagagattgcggaattgtgtgctgagtgcgcatcacgccactacttggatggtggttctcccgcccctgtcgggattcagtacccttaccattcgccacccgtggttgctttgattatggtacccctgactataggacccagatagatttggatccatagatcgatggagtcggagtctgtaataatgcttaattcagtgtcttagtcttagccagtcttagttagagttagtttgcttatcatatgttggatgcttgtcgtgatgaacttgtaatgaagttggatctttgtaatgattgtcaccaaggtgtgggtatcccctaccacttggtgtagctattaataaagtcagttattcagttgggtaatccctttatttccacttccctctttatctaagaagctgtcagtgaagatggtcgattgttcagtgctatgaagatttctatatatcttttcttatgctgaaagactgcagagtcagatctaatgtgtgtgtgtgctttctacatatgtctgaaaataggcgccgtggtgcaaggtgtgctcagccggaacagcaggcaccccaggagggggcagctcagcatcagcagttgccaccgtcaccccgatgaccgttgagcagatattcctgatgcagactcaagcagtccaagcaattggtcagaccttagcggcaatgcagcaagtacaacagcaaccacccccaccctcagcctcaagtgcaagttcagatgcctcaggtgcccagagacaagcgagcaaaattcatgaggggccatccccctgtctttgctcattctgcttatcccatggacgctgaagattggttgcgtactatggagcgtgagttgcatactgctcattgcaacgatcgcgagaaggttttgtatggtccccgtctgctcaggggagcagcgcagtcctggtgggagtcttacctcgccacccatgtcgaccctgaagccatcacctgggaggagtttagggacaacttatgtcgctaccatgtgcctgaaggactgatgatagtaaggaaggaggaatttctggcattgaagcaaggtcccatgtccgtaagtgagtacaggggcaagtttctacagttgtcacgctacgcaccagaagatgtcaacacggttgctaagaggcagtaccattttctgagaggtttggtggacccccttcactaccagctgatgaaccacactttcctcaccttccagcatttgatcgacagagcaatcatgactgaaaggaagtgctgggaaatggaggacaagaaacacaaggttggtggatctcagtccgggagtagcagccatcctcgctactcagacaacccaccccatcaattcaagcaaggtcaccagcatcagcatcagcgccagcaccagtaccagagacagtttcctcaacagcagcagcatcgtcagaacaaccaaccaggagggaatcagtgtcggcgtcagaacaaccaggcagctcgccttcctgccccagcagccaactagaacaaccaagcagccccagtgcaagtaggaggccacacatgcttctattgtaaggaacaaaaaccactgggtgaagcgctatccgaagaaggcaactcagcagtcgctagtagtcaatgccctagcaagacaaggagcaccacatcaagcaccaggaggccatggtcaggctttacaaccttggaaaaggtgaaccacttggaggccgaatcaatctaggatgcttaagacatggcagtcggtatgtttccaattgaatcctatcaagcaaaagtattatttgacactggtgccacgcattcttttgtttctacatcttgggtagaagcacataacatccccatagaatcaatgtttccacctttaagagttaattcagttgggggaaagttcagtttgataggatttgttcgaatctaaggattgaattaagggggatagacttccccgctaacctagtagtaatgggtactcaagggttagatgtcatcctagggatgaattggctatataagaaccaagccaccgtcagttgtgacaagagaacaaccaagttggtgtccccatccgaaaaggaagtagtaactaagttgtacttgcctgaactagaaggagcctgccactatttgtcagtagatgacaaggaggacaacccagtcgaggatattagaattgtgtcggaattcctcgatgtgttccctgaggagttaccaggcattccacctaaaaggaaagttgaatttgtcatagatcttatcccaggcacttcccctatttccaagagagcctatcgagtgtctggaccagaattggtggaactcaagaagcagattgatgagttgttggagaaaggctacatcagaccaagtacctcgccttgggcagtcctagtgctatttgtggagaagaaggatggaacaaagacgatgtgcattgattacagatctttgaatgaagtcactgttaagaacaagtaccccctaccccgaattgaagacctattcgatcagttgagagaagccagtgtgttcttaaagatagatttgagatcaggttaccatcaactcagaatccgaccttcagatataccgaagtcaacattcatcaccaagtatggactatatgagttcacgatcatgtcattcggtttgacgaatgcgccagcttacttcatgtacctgatgaacagtgtgttcttggactacctcgatcagttcgtagtggtgttcattgatgatattcttgtatattcccagaatgagcaagagcatgaggagcatttgaggaaagtacttcagaggctacgagattgtcagttgtatgccaagcttagcatgtgcgagttctggatcagcgaagttctgttcttgggtcatatcataaatcgagatggattagttgtggatccaaagaaggtagcagtgattctagactggaaagcaccaaaagatgtccgaggaatcaagagtttcatcggaatggctggttactatcggcatttcattgaaggtttctccaagattgccaggccaatgacagccttgtcggcaaagaaggttgagttcaagtggaccctagcatgccaagagtcctttgaaatgttgaagaagaagttgacaacaacaccggtattgattctgccagatgttcacaagccattctcaatgtattgtgatgcttcgtacatcggactaggatgtgtattgatgcaggaagggaaagtagtggcacacttgtcccactagttgaaggttcatgagaagaattatcccactcatgatctggagttagcagcagtggttcatgcactgaagacctggagacattatttatacgggcagaagtgtgatatctatatggatcacaagagtctcaagtacatatttatttagtcagagctaaacatgaggcaacgaagatggctagagttgatcaaagattatgagctggaaatacattatcatccagataaagcaaatgtggttgtagatgccctgagtagaaagagtcaagttaatatgttggccgctcacccgatgccgtacgagctagtaaaggaattcgacaagctgagtctcagatttctgaacaacactcaaggagtgacagtcgagctggaacccactttggagcaagacatcaggaaaggtcagaaagacgatgagaagatcaacaaaatccgacagctgatcatagatgggaaaggtctagatttccgtgaagatacagaaggagtggtatggttcaaggataggctgtgcgttcccaacatcaaatcaatacggaaactgattcttaaggaaattcatgagacaacatattctatataccctggtagcgagaagatgtacataagggttttatatttttcctaagtagtttacattatttaaagtttgacaaaatttgtttgactaaatttggatgaataaaacagaagttatggattattcaagttctgtcaaaatttaaatcagatttaaataaaggtttccgagaaaactactttgcgccgaggtccctgggttatttccaaactaactctctcagctatacctccgcgttactattcatttgagtcactcacatttcgcaaaaccccccagacttcttttcttctcccccgcggtccttccctaggtttaaacagtacccgcaagcaagaaaagggtggcgcggcttaccggcggcgagagaggtcaggcgaggggcggggttggctcggggaggctctggcggtcacagcgatgtacggctcgacggcggggatggccggaatcgcttggtccacgtgcgcaggcgggtgtcctcgtcggcggcgggtgtgccagccaaatcacggcgatctagttcaatcccttggcacagtgagcttcacggggtgatgtagaggctatctgtgcattgaatcgaaaaatggcgcagtggtttacccggtctacgctcgccggcagtcggatggagtccggcgaccgtggactggcctctccggcgaagcagacttcgattcctcgcacggggagcttcaccgaggtgtgctcattcttctccgagggtcggacggggctgggaagggcttggttggccggtctacggcggcaggggctcgggtggccgcggacacgccgtgcacgggcaaacgccggtgagttgagctccagtgaggtttgagcgcgtgcggaggggtatggttgacacctgagtgggctttataggcgcgggcgcacactgggacactggcgcagctcggcgcggcgcggggtcgggcacgggcgtgctctggcgtgcgcagagcgcgtcgaacacgtggaggttttcttctacccgtgttccacagctcgcccaagtcgcaagcgtgcgaatcttggaaaaaatccggtgcgagtcttttcctggcacctagggctgtctctcatccgtgagtcgccttggcagatatgccctaggtagggagatctttggacgccaaatcaggtatgtctccctgcccacctcgcgacaaaaacgatgccaaggcatgtcaaacgtcaagggctcggtgtcacctttttccagggggtgccctaggtggtatgccacatttttggtatagaacttaggtggttttggtgccatcttcaaggtgaacacggtggatctttagattaggtgtagtttttgacttagagagaattagagagctctagctctctctctacttagggaagggatttggggtttcttaaggggtcttttagcattgtttcctctctataattgtaggttaataagttacttaactttgtgccaaaggtttggtcatgacttgcacctttgcttaaactctctcctttaaccaaggtgcttaggagatagggttcaacaaaggtctagggttttctccccccttgtccaaagtgataattgcacacaactagggtaatgcttttggtcattcacatctcttggttaaaacctagcttccaaggcccttacactttgctccttaagtttcttccacaagtgatcatagtcatcagtgcataggtgtgccctagccctggtaacacctgaggtgttacagccctccccccttaaaggaatctcgtcccgagattttaggcagagtcctctagaggggtgccatgaaagcgcgctggcgtgctactctttcttttactcaagtgtctctggttaactgctcttcgaatgtcattctctttgtaacttcagaaggaaaccctttttaagttaaatccacaacttagactatccttgttctctaagtttttcttataattgtattcaaagggcaggtgggggtggggttttttgggttacataccgactcctttgggtagaaagtcggggaagcgagagcgtagaaaatcctcagtctcccatgttgcttcttctgctgaatggtgactccactgaaccttatacattcggattgaccttgcccgtgtttatctctctttctgatccaataccttgatggggtactcttgataggacaagtctggttctatctcaatgtccggttccggtagcacttcagtgggtaggcgaacacatttccgcagctgagatacatggaacacatcatgaacagctgacatgctgggtggcaacttcaattgataggctacgggtccacaagcttccttgatctcgtagggtccaatgtaacgaggagctaacttgcccttgatcccgaatctctggacacccttggtgggtgacaccttaagataaacatggtttcccacttcaaactgtagaggcttctgcctcttatcatgatagctcttttgtctggcctgagcagcttctaagttcttcttgatgattctgacctttgcctctgcttcaagtaccaaatctggcccaaaaatttccctctctcctgcttgagaccaattcagcggggttctgcaccttctcccatacaaggcttcaaaaggtgccatctttagactggactggtagccgttattataagaaaactctgccaaagatagacacttgtcccaatcctttccgtagtgcagtacacatgcccttaacatgtcttccaaaatctggtttaccctttctgtctggccatctgtttggggatggtatgctgagcttcatactacatgggtcccaagtgattcctgcaattgctcccaaaatcgtgccacaaatggtgctcctctgtctgatactatagtccttggtatcccatgcaaacgaactatctggtcaatgtagatctctgcatacttctctgtccggtgggtggtgtgcactagcaagaaatgggtggtcttggtcaatctgtccacaataacccaaattgaatcatggtgcctggaggtattgggcagtcctacgataaagtccatgcaaatgtcctcccatttccaagatggtatgggaaggggttgcaaagggcctgctgccttcaaatgactagctttgatcctctagcaggtgtcacactcggatgtgtacttggcattttccctcttcattctggtccaccaatataaagatctgagatcatgatacattttgttgctaccagggtgcatggagaatttggaaacgtgagcttcatccaatatcttctttctgagctcagggtccttgggaacaaccaatcgatctccaaaccatagaattcccttgctgtcctgacggaagcacttgtatttctctaccttctgcttgatcatttctttgataacctgaacacccttatcctcaatctgtgccctgactatttgctcttgcaatgtgggctctaccgagatataacttaaggcacctgaagaaacaacttccaggttcaacttgcacaactcatcacacagggtggtaactcttgcatccatgctcatacaattgcactgggcctttctactcaaggcatcagccacaacattggccttgcccgggtggtaatgtacttccaaatcatagtccttgattaattccaaccatctcctctgcctcatgttcaaatctgcctgagtgaaaatgtatttgagactcttgtgatcagtgtaaatgttacagtgagctcccatcaagtagtgtctccatatcttaagagcatgaatcacagctgccaactccagatcatgtgtagggtagttttgctcatggggtctgagtgctcgggaagcataagcaattactctgttatcttgcattaagacacatcccaatccagtaccggaagcatcacaataaacttcaaagggcttggtgttgtcaggttgagccagcactggagctgttgccaagtgctgcattagtgtatgaaaagcatcttcgcacttctggctccaatcatatttggctcccttctttaacagttcagtcattggtttggcaattctggagaaatccggaataaatcgtcgataataccctgccaatcctagaaaactccgaatctgcctcactgtagtcgggggtttccaatccattacctcttgtaccttctcaggatcaactgatatcccatcctgagaaactgtgtgacccaagaatttaatctccttcagccagaattcacatttagacaatttagcatacaactgatggtcacacagtctctgaagtacggtatgcaaatgtttggtgtgctcggcttcattcttggaatagaccagaatatcatcaatgaaaacgaccacgaatttgtccaactctggcatgaatactgagttcatcaggtacataaaataagccgaggcattggtcagcccaaaagacatcaccaaaaattcatagatcccatatctggtagagaaagccgtcttgggaatatcactggcacggatcttaatctgatggtaacccgagcgaagatctatcttggagaacactttggctcccactaactgattaaacagaacatcaatgcggggcagtgggtatttgtgtggcagaacctcccaagttattgggcccacatgcacctgtccttgtctcaaagacctcagacggctatgcatgtgcaccaaataacttaacaggatccgtccgattgccccaaggacaccggataaaccacttacaaccagaaccgcgggattaagtaacacaaatcacacaccaatatttttgcagcggaaatcttgttaccaaattttacaagttacaaaaattttatattattttatcagagtgattgcaaaagtataagtttgaaatacatgctagctcaagggaccatcctcattaagaagtatagaagggttacttagacttataagaaggccgagcccaccggcacttatcaccatcatcagcaacacaaaactatgacctgaaaaacaacagggaataaaaccctgagtatggaattactcagcaagtcttacccgactaaagaaaagactctcaagggtatgctgg

SEQ ID NO: 12409 - DNA, 7757 bp, Zea Mays
ctaaaattcaacttaatctctacatcgagtaataaacaagagaatcatcgcaatgaattcttctatttaatcctaccatttatttagtcgacaggaataataaatcaacttaccataattaactcgagctgaagttgcggggtcaacgatgatcttcgattgaagtcttcgaccgagtacttgataagcgatgcacagggacctcgcttatttttgtctaaagtctgggattcagggttcgacaagatcgagcatggaagaacgaggttcgacgggctcgacgacgatacgggagagcgacgtatatggagctgtaggtctggcgggctgatgcaagtgacagagacagccgcgtaaggcagcagtgcatcgatagtctatggatttgggtggtttattgaataggtgggatgcgaggagccgaacaattacttgaacatggtcgacggcaaagtctgctgggagagaatatcagcacacgacgcggcacgacgaacgcgcatagcttcaaaaccacgcgcgcgagacccctctactgcgggatgcgcctaagaaacaagcgcacgcggtagcaaacacggtcaacgatcctaaggacacaggaccaaacgacgaacgcatttggcgaggtcaacgatgcgacgggaattaagaccaagcgaagaaaattcgcgtgtgcgacagagacgaagaccgagcgcggcagtaggcgtggctgtggcagcaaggcgagaccgtgaccacaggttcggcaaagggcgtgctactgcacggcgcgcgacaccgggaacaacgctagtaaaagaactcgcgtgttcagggaaccaggaacggcgcgacacgcagggagtgtgctgctctaaatccgaacacggcgagatggacaggactgagcgccgtggcgagctggaagggcgcgtggccaccagagaagaagctgcgcacggcgatgggagctccggcgcgacgagcaaaggaacaccgagcaggacgcgaactagacgggaaattccggccgggcgccatggctgcaggagattgcgcatggggaaactcgacggctgggcgagcaaaggggagctgcgcgctgccatggaaccgagctggttgagcagggaaggaggggagggagcggctgagcaggaacgaagaacagaggggctgaggccggggacgcgcagggaggtcgacgccgaggggaaaagccttggcaagcaggttgggcgctgttcgagcagaagtgcggtacaggcgagcacaccagggagagaaacccagcgcaagagctcggctgggagcttggcgggcggaaattcgagcagggcaccggtcaacagagaatcgagagggagaggaaggagctggggcgctcgacggccaaggctggtgagcggctggagaagaagagaagcctgcgtgcgttaaaaagaaaacagagggcggctgggcggtcgggcggccggggatagggatggtgagcggatgagatcggctgttgttccacgaactcaaacacagaggagattgacccgtagagcatgagaaaatatcgcccagggataggccgatggccaagggacggtggctagataaggctgatcgacatgcaggagatgaaaattcccatacgtgaactaattggataaggaagaaatgactcgcttccagattgaccggcaacagcaaataagaactaggagattaggcggtggaggataagtctatggaaaacaaattctctccaatttcttttaacaaatggtgtgttcagaatatcctagagacacagcggtgagatattttctcttcttttttttaatgaaattgaaatggagatatttcgaggttctaacattagggtcgaaaagaggtatgaacaggtcgaatcaaacaaaatcggtgataaaatttgcaccagatttgattcgacataatttaaagtctgataatttatccgcagtctgaacaaggaaacagattaattatgaatactcaggagtcagatgaatttgtactgttaattcacctttttaaattaaggcgaaaagcaacggaccgaattaaacctatttcggctttgttaatttactttgcgtgattcgactaaaattagccgaaaccatatctgctaaagtatacacgatttcgccgttaaacagcgtgctgaagaatgaataaaatcatatctttgcgcacgagttcactcagacgacgcacaattcgaattattttgcactgagtattttagtcgtcgagttcaaattaatctgtccaggataaaaattatccgagtgagtcaggcttccgaattcggattcgcgcgagtgatgaattttaaataatcaccggacgcaccgattttcggaacgaccatcttccgaacaatacgaaaacttcggaagagcccgaataaatagaagtaaaaatgatgtcgcactcgcgaaaaatggaacagatgcgatattaaaatcgcgataagcgagggtgattaaatttcagtatttgtttcattcactgatattacgtgtttaaatccgtactcgttgtcgagcgaaatataaacatctgggtgttacagccctcccccttaaaagaatctcgtcccgagattcggagcgaaagactttcaagagtagagaagcatgtaacccacgtccatatcagcggtaatcataaggcagttctgcgtgaagacaagtgtctcaggatgaggtttctctagtggacataacatgtatcgccttaggctaattcagaaatgtccaccaatagaaacaatatctgccagaggaacacataaggttccatgtgtgcagtttgctttttctgatgacattgtactatctgatacgcaatctcacccaaatagaaccagatgcaccatcttgggtaaaacacacagaaagaggtttaccaacaagtggtcacagtgagtttgtagcacacgagacggatgtggatgtcgaatactgtcgcggttaacatgtggttaacccgagaatttaagtccacaaaagatggtatagattcgataaaatcaccagcggagggatccgtagatgttgcctttgcaaccaatcccttttatcgagcactaatcatggctcgacatgatcacacatgctagaaaagcacacgtgaggcgatcgagacacgactagagtgatggctaggtggttattagttgacttgacttgattcttgcaagtactttcttaggatgggttgaatcaaagtgagtttagacaactcgataaaacgatctctagactcaacctttgttcattgggtagttacaagttagtaaaaccaacttgttgtactacatttgacattgagcaagtcctctcagtaccatcggtaagccaacggtcgagaattcacatttgctagagaaaggtcatgcatttgggtacaaatccatttggtctggttgttcatccgtttctttaggtgagatgaatcaacttggtccaggaatatatggattaaataggggagcgaatgaacaaactcctttacacaaaggatgtaaagggaacgtgtatgagtagtcactatcaaagtcaagggaaaagagaccacacatggaagtggtatgcccttttgatccaatagagatgatagatgttgcttgatcacttgacaaacaacaccgaaatcgtttcaagggaggagtttatggacgataacatattagggtagttccataatggatcatgatcatagaccttgataccagcagccgacgagtagcacaatcctgtgtgcgcattcacaggaggctctcagttttgctgcggcaccataagtccttaaccatgacaccattaccaaacaacaccaataatgaatctcatgtagcaaaaacagattgtgccaagataacgtattgacatagtctcatagtggattacaactactaactgtgataccagcgcgtgccgagcagcacaaccatgtgtgcgcacacacagaaggccctcggtttcgtcgcagcatcatcagttttagtcataacaccattactagacgtaaccaataagaaatctcgcacaacacaactggattgagcaagaatgacaatatacaaaaatagactccacttgtaagaatggttacaagtagagagccaatcatagatcacagcccgatgaatgaacaagacatggccataacctaacttggatgacgaagggagtacgatgggagactgttaattcagccccaagcatatttctatgcccatcgcagagattacgaggtcaaggattaagttgatatgcctttgatagatatggggaaaccaaaggcatcaactcaagaaaaaagattgggtacgtcttccctaggttaggttggtaaagcaacatggcgatccttaagaacagacaaactagataagggacatcagctttcaccaacaaagtaaaggcatggttttggttggaaataggaccataaaagagttataagctaattaccaagaatacagactcgagatccttgttttaagcttgggtacattttatgttcaacaaagaaattatctaggcatttatttttatgtgtttggtcctggagtgataacggaaaattttaagttttgggtcatgaatcactaaataagaacatggcctaattctgggtttaagcaaacaagttactaaccttctatcgacacatcaagcacaagagcaaacaccatataagaccttaataggttacctaaagaatggaggacacctatttcatcgaagttcataattcaacactacaccacattatctacaatcaatggttactgtaatagaggcgagagaagcattttgggtgtataggtgacaaacatgatgcaacaatcaggatgcatgctcgtcctacacgtcctcactgattttgccaaccaaatgtggcaataactttctatatcggtggcattcttacgactctcacggtatttttctagtcgtcaactacacatacgttttcgaggttagtgtacctgcagaaaatttccatcacagcccacttcccaatgatgcaatccacacatgacagtttatcacagtttatactccatatattgctatatggaggccagctcatcattaagcgccgagccacgcatatgcgccgttgccacacttttaccatagggcaactcattatggtaactcaccttcttacctgggcgtaggtgcgtcgttacaagtacattacacttctcagtattcccatgtctgtatacccatacacatccatggggtactgaattctcggaaaagtaattactccacatcgcagccttcatatatacatatgtaaaacatgtatataatcaagcgccacaattaagcactcccctagaccgacggttgttcggtcatactctcacatctcaccttaccttgagcgtcgatccattcagaactgaatggcctcaaaaataacaatacacatgtatgcaatacccacccggttgtgggttagtggttttgaactaagccacctgatagtccttaacttagggcttaatagaggatgtcgctagcattatagttttttcaaaactattttttttcaaaaccaaacaatgtgtttagttgaaaataggttttctaaaaccaaaacttttgttttgaaaatacgtatgtgaccgtatatacttaatcctgctccgataccagctgtggcagaatctcccaagttattgggcccacatgcacctgtccttgtctcaaagacctcagacggctatgcatgtgcaccaaataacttaacaggatccgtccgattgccccaaggacaccggataaaccacttacaaccagaaccgcgggattaagtaacacaaatcacacaccaatatttttgcagcggaaatattgttaccaaattttacaagttacaaaaattttatattattttatcggagtgattgcaaaagtataagtttgaaatacatgctagctcaagggaccatcctcattaagaagtatagaagggttacttagacttataagaaggccgagcccaccggcacttatcaccatcatcagcaacacaaaactatgacctgaaaaacaacagggaataaaaccctgagtatggaattactcagcaagtcttacccgactaaagaaaagactctcaagggtatgctggatttgggaatcaaggagaggctttagcaagaatcaacttagatacttttgcagaaaaaagcttactaaagtgagtccttactttcaatattttaatgctagattaaatattaatagactctgtttgcatctggtctaatttcaccatcttatcaatgcaacatcatttttattcatgaggttcacatcctgacttaggttgcaggtcagtgatcaagtctccactctccggggatataacggcgatccgaatcgatttactcagctgaggatctctaaccacacgacatatgtagcacttaacccttgcatatgtcaaccgttcccacagatcctccacaacgtgaaccggtccgcgctacccgggagcacagtactcctccatccagcctctagccaggagggcacacgctactcccaccatctcccacgcccagtgcgcggttgtcttttcacgtatggaatagccgggttcaagcttaccctgtcccatttccagggcatgtggccagttaagatagtccttgatctatcaggcctacatatgcatccaatccttaattgacctggacggaacatcacctgttcctagcccaagtcccgatttaagtacttccacccttaggattgtttcgtgttcctatggatgaaaagagcattatagggaactttgcagtaagatcccaccatgctcccaaggaaaatattcttgcaggtagaagccacccttcctcaggataaccctgagctaggcataagtgcaaaggacaaactccacctgcctataagcagggctaagcattttgttgtaaatcatattttgatacttcactagaagtatctataaaggtatggatatcaaggaaggcaatgcatcaaagggttccaagcaactcctataaacctaatgcacatttcactagacttaaagtgtgcaaaaattatttaaaaacacaaggaaggggttgcatgcaccggggcttgcctggagtaacactaggttagtgttgttaggtggcgaccacttggtgaccatctcttgttctgatcttgtttcgtctatccatcttcagggtagttcattagcttcatcctgtggattaacccgcgtttggggtcgacttgggtcgtcttccgcatcacacgattatttatcgtcctgaatgaagtgcattatgcatatgaatgcatataaagaataataacactagatattacaatgctacacaaaagagaaataacctatttaatgacgagacattacggacactagtatcgatatattgttacttacgacgatcatgctcttacaacttagctaaatagtcgaggtcacaatcaccatccattccaattataaaagccactaacacacatagaatatgatatctagtttagagagtaccctaaacgacttataacttttaacttcacaatttttagacatctaatacttataaaatttgatagaagaacttttattaactttctaaactaatttaccggttaactcgtgtattatatatgtctaccaatatacttatcgcataaccctaaaattcaacttaatctctacatcgagtaataaaa

SEQ ID NO: 12410 - DNA, 1114 bp, Zea Mays
ctctaaccacacgacatatgtagcacttaacccttgcatatgtcaaccgttcccacagatcctccacaacgtgaaccggtccgcgctacccgggagcacagtactcctccatccagcctctagccaggagggcacacgctactcccaccatctcccacgcccagtgcgcggttgtcttttcacgtatggaatagccgggttcaagcttaccctgtcccatttccagggcatgtggccagttaagatagtccttgatctatcaggcctacatacgcatccaatccttaattgacctggacggaacatcacctgttcctagcccaagtcccgatttaagtacttccacccttaggattgtttcgtgttcctatggatgaaaagagcattatagggaactttgcagtaagatcccaccatgctcgcaaggaaaatattattgcaggtagaagccacccttcctcaggataaccctgagctaggcataagtgcaaaggacaaactccacctgcctataagcagggctaagcatttttttgtaaatcatattttgatacttcactagaagtatctataaaggtatggatatcaaggaaggcaatgcatcaaagggttccaagcaactcctataaacctaatgcacatttcactagacttaaagtgtgcaaaaattatttaaaaacacaaggaaggggttgcatgcaccggggcttgcctggagtaacactaggttagtgttgttaggtggcgaccacttggtgaccatctcttgttctgatcttgtttcgtctatccatcttcagggtagttcattagcttcatcctgtggattaacccgcgtttggggtcgacttgggtcgtcttccgcatcacacgattatttatcgtcctgaatgaagtgcattatgcatatgaatgcatataaagaataataacactagatattacaatgctacacaaaagagaaataacctatttaatgacgagacattacggacactagtatcgatatattgttacttacgacgatcatgctcttacaacttagctaaatagtcgaggtcacaatcaccatccattccaattataaaagccactaacacacatagaatatgat

SEQ ID NO: 12411 - DNA, 2288 bp, Zea Mays
ctcttgttctgatcttgtttcgtctatccatcttcagggtagttcattagcttcatcctgtggattaacccgcgtttggggtcgacttgggtcgtcttccgcatcacacgattatttatcgtcctgaatgaagtgcattatgcatatgaatgcatataaagaataataacactagatattacaatgctacacaaaagagaaataacctatttaatgacgagacattacggacactagtatcgatatattgttacttacgacgatcatgctcttacaacttagctaaatagtcgaggtcacaatcaccatccattccaattataaaagccactaacacacatagaatatgatatctagtttagagagtaccctaaacgacttataacttgtaacttcacaatttttagacatctaatacttaaaaaatttgatagaaaaacttttattaactttctaaactaatttaccggttaactcgtgtattatatatgtctaccaatatacttatcgcataaccctaaaattcaacttaatctctacatcgagtaataaacaagagaatcatcgcaatgaattcttctatttaatcctaccatttatttagtcgacaggaataataaatcaacttaccataattaactcgagctgaagttgcggggtcaacgatgatcttcgattgaagtcttcgaccgagtacttgataagcgatgcacagggacctcgcttatttttgtctaaagtctgggattcagggttcgacaaatcgagcatggaagaacgaggttcgacgggctcgacgacgatacgggagagcgacgtatatggagctgtaggtctggcgggctgatgcaagtgacagagacagccgcgtaaggcagcagtgcgtcgacagtctatggatttgggtggtttattgaatagatgggatgcgaggagccgaacaattacttgaacatggtcgacggcaaagtctgctgggagagaatatcagcacacgacgcggcacgacgaacgcgcatagcttcaaaaccacgcgcgcgagacccctctactgcgggatgcgcctaagaaacaagcgcacgcggtagcaaacacggtcaacgatcctaaggacacaggaccaaacgacgaacgcatttggcgagatcgacgatgcgacgggaattaagaccaagcgaagaaaattcgcgtgtgcgacagagacgaagaccgagcgcggcaataggcgtggctgtggcagcaaggcgagaccgtgaccacaggttcggcaaagggcgtgctactgcacggcgcgcgacaccgggaacaacgctagtaaaagaactcgcgtgttcagggaaccaggaacggcgcgacacgcagggagtgtgctgctctaaatccgaacacggcgagatggacaggactgagcgccgtggcgagctggaagggcgcgtggccaccagagaagaagctgcgcacggcgatgggagctccggcgcgacgagcaaaggaacaccgagcaggacgcgaactagacgggaaattccggccgggcgccatggctgcaggagattgcgcatggggaaactcgacggctgggcgagcaaaggggagctgcgcgctgccatggaaccgagctggttgagcagggaaggaggggagggagcggctgagcaggaacgaagaacagaggggctgaggccggggacgcgcagggaggtcgacgccgaggggaaaagccttggcaagcaggttgggcgctgttcgagcagaagtgtggtacaggcgagcacaccagggagagaaacccagcgcaagagctcggctgggagcttggcgggcggaaattcgagcagggcaccggtcaacagagaatcgagagggagaggaaggagctggggcgctcgacggccaaggctggtgagcggctggagaagaagagaagcctgcgtgcgttaaaaagaaaacagagggcggctgggcggtcgggcggccggggatagggatggtgagcggatgagatcggctgttgttccacgaactcaaacacagaggagattgacccgtagagcatgagaaaatatcgcccagggataggccgatggccaagggacggtggctagataaggctgatcgacatgcaggagatgaaaattcccatacgtgaaccaattggataaggaagaaatgactcgcttctagattgaccggcaacagcaaataagaactaggagattaggcggtggaggataagtctatggaaaacaaattctctccaatttcttttaacaaatggtgtgttcaga

SEQ ID NO: 12412 - DNA, 457 bp, Zea Mays
agaggagaggcctgggagaaggaggagggagaggagaaggaggcggtgagagggaagagggggatgagggcgcgacggcttgggcctaatgggttggtttcgcccggttaggtttctagggttttcattttttttctatttctttttttctttttttctttcctatttaaaaatataaataaatatattagataaattagcttcgtagtcacctgctcatatattttcaccaatgataactcaaagtggaaaatctagtggattaataaaatatttatgatttaaacattatttacaagtatcgttgcatgatatgtgattgattatgtaatggtgaatgttacccatgtaatggtgagtgtttatttatttggcgtatgtaatcttttgtatgtacgatacacgaatcgatgattagaatttgactgtgggctagacgaaccaaactcgttcgagg

SEQ ID NO: 12413 - DNA, 520 bp, Zea Mays
caatatagtccataatatcttgggaatcactgatctctaattatgtgaaaccctaacatttaagtctactctttatgttcatagtgtcttatcaaacttgtgttcacttgattgtacatgtttggtgtgctgttcatttttacttttgaaatgtattgaatgtatgatcgctttatttagacaatgagcagcccgtggttcctgagtgttttgccgaagatcttcctgagcaacaacctggtgaaggcaagtgtcctctgacctactatgtcctacatacttataattcatcgtcccgcattacattattgaaacctaaggattgactagtctgtatttaccttatccttgtttaccttttgggttatcatggttagctttatgctattgctttactttaatcaatgaacatgatgtgattacttatgatacaatgatgttatcccgattatgttcttgtgatactttaggggataggccattttcctgagtacctctccgtaaggacctatttggggag

SEQ ID NO: 12414 - DNA, 916 bp, Zea Mays
ccaaaagtccagaactgaaacgaccaaaaacgactagactgcgctcgactagacgactaatcgccccggtcgacgactagtcggacgactaggacgactagaaaccctaatcgcgtcgtcctcctaatcgcccatctccaggcgaccagcccgactaatcgcgattaatcgcgattagtcggacgacttgtaaacactgatttgaagtcgtccgattaatcacgattagttgggctggttgcctgtttgtgttcgactagacaggttggtcgacctagtcgtccgactagtcgccgattagggcgactaatcgtccgcttattgcttcctagtcgcccgactagggttttggtattgggccattttcaacccatctacaatatcctttagtctggcctctcctctcctctactaatacccagacggccagccgccaaaactagcgtacgcctcctctctcccccgacgtctagccttcagacctggtcgccggcggctgccactgcgccccagactagacatcctgctctggcatctgcgccacagaaaacctgtgactgctcacctgcaccccctgctggcctgctccaccagcgcctctgcctgcttggctgctgtcctgctgtagtcgagaagactagcaccggcggcgaccgtgacagagtaccagcatctccactctctagcagaccagcaccattgacgagatgagctcgtcatctcaaggttcctcttgctcccccgttcaccccttctttgtatttctgccagtgctgaagtagtggatatcaggaaagtcacaaatcacaataaagcaatatgttattttgtttatcctagctgtttgttctaaattatataatgtatatagttatatttatatatatatacctagtgctgaactagtggatgtcag

SEQ ID NO: 12415 - DNA, 208 bp, Zea Mays
gtcatcctcaccctacagcgaggtactcagtgctcctcgaacagctgcaccgcgtactagggaggcgtagcgtaacctgctccctgcagtacctcccacaaaatgaagggaaaaccctctcgtgcaagaccgtctgtgtgggaatgtgtgttctctccgtccgtgggtacgtgagaagtcatctgtgcaagggcaagtgtaagcaaaa

SEQ ID NO: 12416 - DNA, 150 bp, Zea Mays
gagctacttatcgttagaactcatctaaccatctaaaacttgctaagcaactccatttttcactaagtcattaggtgctttaatcacccagggtaaaactcttttcttttttgagaaataattaatttgctaagcaaattttgtctaaac

SEQ ID NO: 12417 - DNA, 782 bp, Zea Mays
taatttacccacctaactaaacttgtttcattattttagtaccttttcacaatttctggcgcaaataaacaaacatgagataaaagaaaattctaaacatatgaacagtcgcgaaccagaactgactcaaccggtccaactctaagcaaaactagcccagtgcgtgtgtaaatggtcagaatagaactattttagcacaatgcgatatccatagggaacgaacccgcaacctatacacatgcggcacaaattaccataaatattactacgacgacgcccaatgatgaagcgacgacgacttggcaataaggtgagtgagacgtcgcagcacatgaagtatgctcagggcgactttgagagcacctgctattgttccatggcgaggatgaggatggtgaattggtgataccaaaatagcaagacaacgatgattcccaaggaaactacaagcacgtagggtccgtggctagacggctagagcgagacggccgaaggacactcttgcacaacgaccagagaaggggctttggcacctggggcgacagcgacaagacgcgcgttgaggcttggagctgggcgtgcgagtggcaaggcaagcactgaggagaccaagcgcatagcaagagaagggtggcaattgacgtccagacatcaccgggtgtttgacagctgttgctccagcgttggggaggagagggagatgacgaggaggagctggggtcgagcggctgctgctacaccaagcgatgggatgagggagggagatggcatggaggaagaag

SEQ ID NO: 12418 - DNA, 351 bp, Zea Mays
ctaaaacgtcttcgggccctcagccgaaaggagacgacgaaataaaaaagatggctgaagatattatggacgaagccgtcaatcggctcctgaacgaggctgcagaagtcgttttgagagaggattaagtatttttgtgaaaaacttctgaaatgtaatatactgaaacattttgtaaccccaaatgtaatatacctatttttgttagtcaattctttacgatgcatgaaactttacagtaccgcttttgagtctttgacgaaaaaacaccttcccttcttttcatgcttcgtgaagaagaatttttctttgtcacaacaatatccaatattctgatgaataacatccagg

SEQ ID NO: 12419 - DNA, 485 bp, Zea Mays
gggacttgatggaggaagaggattcctccttgtacttgtgtgcggactcccttgagtgtgttctccccgagcttgcggacttgttgccggtcccgatctctctcatggcggatgctcccgacatcacttcgagcggttaggctctaatgaagtatcgggctctgataccaattgaaagttgcctagaggggggggggtgaataggcaaatctgaaatttataaacttaagcacacactacacgccggggttagcgttagaaatataaacgagtccaaaagagagggcgaaaacaaatcacaagcgaataatagcggatgacacgatgatttgttttaccgaggttcggttattgcaaacctactccccgttgaggtggtcacaaagaccgggcctctttcaaccctttccttctctcaaacggtcacttagaccgagtgagcttctcttctcaatcaaacgggacactaagtccctacaaggacc

SEQ ID NO: 12420 - DNA, 576 bp, Zea Mays
caaaatcttgaacctgcgcagcaaccaaaattcagtacaacatccaaaaattccccaaccctaatcacccactacgccacctgcgaaggccctgccgccacgggagcctccgccgcagcctccgccgcggcctccgccgctccctccgcccccaccgccacgggatcttcagtgctcggcacagcagctgcgggggcatcgggcgcgccttcggccacctttgggggcaggtcttcgccggccgcagcagatgtaagggcgcctggtgcgttttccgcagtctccggggtcggtcccggggcgactccagtcgcggcctccgcaggggtcgtctccgggtcaggcaacgcgctgttcagcgccccgaagtcctccacccgctcgccgcgctccgcctaagacaaaacgcacaaaaattcagcaaacacacgcacagaccgcatccagcaagtgccgaacaaacgacaacgttacctgagccctcgcagcctcggcccgcgccctgaccacctcacgaccgtacgaaccccacatccggtcatagagggccccggcggattccttcaccacggggtc

SEQ ID NO: 12421 - DNA, 1402 bp, Zea Mays
cgttaataaaattaattgaggggaaacacttgttagggcttgaattaggtctaagccgaagtagagcaccggtcgttgcgtgaatcggccggtgtaggctcgccggagctcggttctccgtcgctgcccgtcgtggactttcccttgtgaagattagaacttcaagggtcttagtgcaaacgtcagtgaaacaaacaaatagtcctctgggttattgttgcttattcaaaatgctggggtcgtctgtgtaaaaccgccactacgggcgcgcgcgcgggtgcgtccccatattcagttttgagttgggccgattgggtcagttttggcccaacattgtagaacctttttctttttccttttctgccagagctagagaatttccagaaaattataaaaaaatgctaaaaataccagaccaattttactaggctcctaattttctatagtatttaataaaaatagtttcatgatttttagttccaatagggaattatgggatatttaaaatagccaaaacacatacttctggaattttagagaataattaataatcccaaaattcaccaaactttttagataaactttaaatattatttagaagctttgggtaaaatttggtatgatttgaaccatgtttggtacttagaacccaaaaccctaacccctaccctatgaacttcactatagactccaaaaaccctagtttcccggagatccatgaaggtaagttatcgtaattgcttccgcattttcgtacctccgatgtattgtaatgtctgcgtgacgggtgaaacgctcttgggcaaggtaaagaaattcagataccgaactcgtcaagtgatcaggtgcacctgcagggttgtctgaggtcctttggacaaggacaactataggtgggcctaatgacttgggaggtcgaccacttcattttgaatttacactccttctgctgggagctctatatgaaatgatatgaatgaatgcatattcttgtgcaactacaaagaagatactttaaagcagtacaaactacacctcactatgcacacaaaactaaccaaacaacaggggagctaaacattctaatatcatcactaagctctcaaaccacactagtgaactctgcctccataaccaagaactctatgcttgccttaagtaaggacttacttttctaacttgaatcctacaacttgaacttgattaagacaatcttcaaactatgccaaaaatccagatcccactaggcactcttacttctttatccaaagatcaggtttcacttgttaaacttgttccttcttccaaagttctaatccacctgtgattatgttcttcttattattctaattagggattttacaaggatttttgagcaaatggcttacaaacagccccaaac

SEQ ID NO: 12422 - DNA, 395 bp, Zea Mays
ctgcaaatgagtctttgaaatttgataagccttatcttgattcccgataagccagcatatccttgagagtcttttctttagtcgggtaagtcttgctgagtacttgcgtacttagtgttttattcccattgttgctgcaggttacgagtcactttgactgtgattgatgttaagtgccggtgggctcggccttcttataagtctaagtacttcttctatactttttattgaggattgtcattaagctagcatatatttcaaacttataaataatttataacttttcaaagtttattcatttgaatcacttttgtaagcactccgataaatataatgtaaatttgttgtaacttgtaaaatttggtaataataattccgctgcaaaattgttggtg

SEQ ID NO: 12423 - DNA, 218 bp, Zea Mays
cgataaccatgcaccccaaccccacgacgagcaccgagcggcaatggaggcaaggcgaggggcgcgacgactttctttccttccaaggcgtaaacagcaacctcacaacggtacttggtgcttgtaatgctccggccagatgggtgagacagtcgcggatcccagactatatagcgcggagttcgatatgctcgaccggagcgaacccgagattttcg

SEQ ID NO: 12424 - DNA, 504 bp, Zea Mays
aaaagagtggagtgggtcgtgcgggatgaaatagttgagatgggccgagagagcaggaaggggagttggccgatggagcacttttgggccgagagagcaggaaggggagtgggccgacggagcacttttgggccgagagagcaggaaggggagtgggccgacggagcacttttgggccgaaacgcaggtttgatcttttcttttcttttctttttctttttattttctatttcaaagtttgatcttttcttttcttttctttttctttttattttctatttcaaatttcaattattcaaaccaaattctaacttctgttttgaatttcagatcttcaatttcaaatataatccaaatgtgaatataaatcatactattttcaatattattatttattctccttcccaatatatttaattctagcaataaatgactttattacaaatttcttcttttttattttttattttatatttttgttcataatttgaggtcaaatttaag

SEQ ID NO: 12425 - DNA, 293 bp, Zea Mays
tcgaacactacctttgcatgcataaaaggcttagtaagacgcaacagatcttaactgaatctagtttctgttcatatcacagttttttgcctagataatgcagtaatatctgttttgtaccgtagcagttcacagcaacaaaaggttttatccccttggatgactattgatgtaggtgatctgagacctttggtttatgatagaacatggtcttctacttgatctggtatgataatatggactctcagttaaagctataccaactttgagagttcatacaaagttagcttaga

SEQ ID NO: 12426 - DNA, 204 bp, Zea Mays
cttaaatgaaaatccaaataaataatataataattattagtccaaaaataaatattttatgtataaataattttggtataattattatgaattttagggttatttaaaaatatattttgaaattagaaaagaaaaaaaaagaaaaaaaaagaaaacccctaaccctaaggcccatgaagctagccgtgccttccctggctccca

SEQ ID NO: 12427 - DNA, 337 bp, Zea Mays
tgtaactgaaggagaaaaacaaggaagcggtcgttgactcggtttgttttttttctgtttttttttcgtaaccgaaggagaaaatcaaggaaacggctgttgactcggtttgttttttctgttttctttttgacgtaaccgaaggagaaaaacaaggagacgatgttgactcggtttgtggcgtgatcaaacgggagatggtggcggcgctaggatttgaatggtggaagaacacaatgcaaccagcaacaaggaaacgcgaaagcacacaaattcaacaatgcagattattgaaagaaagtgcgaggctcaaaagggtgctgggataagatctaac

SEQ ID NO: 12428 - DNA, 862 bp, Zea Mays
caccccctagccgccactcctctcccccaatagttgccagccatcaggctccctcttccccacatcgtcccttctttctccctattctctattccaaggtgcaggtgcagcagccccctcattccccatcgaatctatggtgctaggaagcctagagctagtgacctgtcccgttatctggtccaagcgcgtagggagggctcctctctgctccttcccagtgcatggcgcagggagctcttccaggtccacgcctccatctccatggctggccagcaaacctcaatggccgagctccccagcgccttcctcttccatggcggacgtgcatgtagccctactccaagtgcctcctgttgggggccttcctcttccgaaggtcctcaaaaacatgactaaccatctactttcagcataacatggattattacagggagcttcggcttcaggatggaagttttctactagggcaaaggtgtataagaagaagatatagcccgaagatgataagagtgaacgctgaagttatagccgaagagtaacatcttcggcttaagatgatgatgaagatcaaacatgatgctgccctgaagagaaaaagactagccagtccctaatgatttatgttataattatgaataaatgttgaggacacaaatgtacttttactcgggctgagtcccgtgcctataatagatgaacagtagcaacgtactgttcacgctgaattgtaatcactttcgcatcaacaccttcgaacaagtcgaaggtattagtgtaatataaattctgttaatgtacatatgcgtattatgaaatacatatgtggataagctgatagattacattcattgtctttaca

SEQ ID NO: 12429 - DNA, 329 bp, Zea Mays
gagagaagagatggaggggagtggggaggtggctgggccacagttgggctgatttggctgggccggttagggtttcgtccattttcttttttttctttttttcttcattagaaatataaataaatatatttttaaatatttcttaaatcataataattataccaaaattatttataactaaaatttttatttttggaccaatatttctatattaattaataggattttgacttagataagaagagaaataacacaagttctttcttgcaaggcgttgcttctaaatatgagaatttgacttgaagcaacacaaagtaaactcaacaaag

SEQ ID NO: 12430 - DNA, 116 bp, Zea Mays
tagctcctccgatacgtgcctcgccgtgcttcgcctcctcgtgatcagccccatctgggtcatgtgggcgaaagatctcaaaacctgtcagatgttcgacgacaagcccgaaccag

SEQ ID NO: 12431 - DNA, 684 bp, Zea Mays
cgtgtggaggcactatctcttcaccagtgcctagccatagcgctgctagagctcatcagcgcactctgctcccctggcgctgctctaggttctgccggtgtcctccttgctccctcctacagctcgcccctcaccaacgcttggatcgcccagctttttccccagctgctcgttcatgcaccagtacgcctggacgccgtcgtgtggcttgaccacgccctctgtgatcaacgccctggctccgtcgtcggccctacggtgccagggatgccgccctggcctcctgctccctctccagccgcgtctgaggtggtcgagcacgccagccgccgcgggctcgcctcacccagttgacgtctccaaccttcgcctcgacgtcgttgttccttgtactcagtatgggagttctccgtcggtccctactacaacgtcggctcgctatgacctgtgagatttcagaggagaaatccataaggattgatgaagagaagcagcccctgtacagcgtccgctagatgttcgatgaaatgtcgaaaccaataatcgtcatcatctccgacttccgcagcagcagcgtcgttccctccatggtgctcatcgtcgacttcgccctcacgtcgtcatggcttgacggtctcctaagctcgtccctgctcatctactcgtcctcaccattgacatgag

SEQ ID NO: 12432 - DNA, 592 bp, Zea Mays
aactgaactatctcctactccagagctcttcgagtcaatggccgacccagaagcagaaaaagaagatgaaattactaaagtggccgaaactattatggacgaagctgtttcttgactgctaaacgaagctgcggaaacagtttttaaaaaagaatagctgttattgtaaaaacatttggaatgtaatatttgctgaacaaagtgtgtaatattttatagttttgaatgtaatatataagctgtttgtaattcaattatttatgatgcatgaaacttttacgtacataccgtttttgagccttcggcgaaaaaacaccttcccttcttttcatgtttcgtgaagaatatccatattccgtgaaaacatgcaatctccgtaagcagtagatctcgtttcatattagagttgatgaagctgtacttcttcaaaacttattttgtgtcttggcacaacttcttcgaagcaattctcgaagattaacattgtatcccctttttgtgccattgatgcaatatgatgtatgatgttatgttatgcgaatgatgtaataatgttatgctatgcaaaatgatatttgtgccgaagattcac

SEQ ID NO: 12433 - DNA, 499 bp, Zea Mays
ggcaaaacttacgctgcgttccttagaacgactttttgttgcttcggcaaaacttaggctgcgtcccttaaaatgactttttgttgcttcggcaaaacttgtaatatgattgtgaaccccacgttctcttgaaaacaactttcgtggttcgtcgacttttggaacttcgtgagtctgtgaagaaggtttattatatcatgacaattacgaaggtattacaagaaattgaaaacaacaaaagaactagactttcaatgattgttccttattaaaaaagaaaatgatgacgaatgcaaaaactgttttagaggtaggatatctcttagtagatgtgctttgattctggcacagtactgttgactgtgtgagcttcggactgctccctaaagtctcgctactggtgagtgtgctgactcccttctggctgctggccttggggatatgcaggttgcattggtggtggaggtggaggttgttgccaagatgcctgaggtttgct

SEQ ID NO: 12434 - DNA, 333 bp, Zea Mays
ctttggaatgatttttgatttctcataattgattttggatatcgaataacatttcttgttaagtaaaaatccaaataaataatataataagtactagtccaaaaataactattttatttataaataattttatgttaactgttatgaatttcatggttatttaaaattatattttaaaattagaaagaattagaaaaaacaaaaaaaaaacaaaaaatgaaaccctaatccatttggcccactaggggcccaacttggagtgaccgcaccactggctccctgcttccccagccgccagggcgcccagcgcgccgcgcgcaaccccgacccacc

SEQ ID NO: 12435 - DNA, 331 bp, Zea Mays
cttttaagtgtttgttatttatttgcctttggaatgatttttgatttctcataattgattttggatatggaatagcatttcttgttaagtaaaaatccaaataaataatataataagtactagcccaaaaataactattttatttataaataattttaggttaattattatgaattttatggttattcaaaattatattttaaaattagaaagaattagaaaaaaagaaaaaaaagaaaaaaacgaaaccctaatccatttggcccactaggggcccaacttggagtgaccgcaccccctggctccctgcttccccagcagccagggcgcc

SEQ ID NO: 12436 - DNA, 604 bp, Zea Mays
cgtccacgtgcgccaaaagatagagaaagggtgagtgagggttggggggtcacgctcgtgctcgaagaccgggctgggggagctaggggacctctcgtactctacgcacggatcggagtcatgactgcggacagggcccaatcggaatcgctcaccggtgttcgtcatcgccgcgtttcagccccgcgctatggaccgactccatcaccacaaattcatgggtacgaccgcttccgttgatgtcactagttaatccttgtggtgtagcgtcacgcgggggaggaagttactcctcgatgggacaggaattgctcatcggtgccactccgatttcggtctgccgcggttcgctatggtcggggagctggacatgacaattggctatagtagattttcgagttcaggagggtcagggcgttgtgcgctggcaattaaacttggaatccaagtctgggggcgtcaggcggagtgcatcggtgacctgctccgccataggggggtctcagtggcgccacccggttgagtcaggggttagtggcgacccctagactgtccggtgtgccagcggagcaacggctgcttcacgccaacggttgtatgcaga

SEQ ID NO: 12437 - DNA, 50 bp, Zea Mays
attttttatacacataatcacatagatatacaaatttaattagtattgca

SEQ ID NO: 12438 - DNA, 272 bp, Zea Mays
gtcactttgctagagccttcacaagttgccattcgaccacaagttaatctgggctcgcaatatcgtcagtgaaaagttcccgggagtgtgagggaagttggtaggtaggcttggagggttcttttgcttgaaccacatcgaacaatgaattatgatctatgtgtacctagcagtgtgagggcagttagtagatatacttggacggttcttttgcttgaaccacatcaaacaatgaaatgtggtctaagtacgtcagcggattttgcttgaac

SEQ ID NO: 12439 - DNA, 686 bp, Zea Mays
ggcacggctagacacgggtacacgactgtgcgggaagggatgtgggcgttgagtggaaacgtcggcgctggcgacgtgcagcttgaaacgtggcggccggtgctcctgcgtgcaggcatgaacgaacgggaggggagagaagaccaacaattcctaaggcccatctgccatacgcataaagagaaaaaataaataaatggagtaggtcgtttgacgtgctgcttgggcaaagggccgagcggccgtgaccttttttatttgtttttatttttgtttttctttttttttcaatttagatgtgtgcgtgtgagttgtgttttacgttttggttttttttcttttcaaatttgtaatcgctttctcttttattgtttattaatatatgagtgttaatatatttatatttatttaaatacttcataaaaaactataataaatttagaagatgatattttatagataaaaatactcaattgtaaagaataagtcattttagtcaaaagtctattatttaaatagtttgggctccatgaaaaggaaatcaataaaatgaaatacctacaaacaaaaattattaatctatgtacattattttaacaatttattattattctataaaataaagttttcttcacaaaactaaattcaagaaatagatttataaatcaagtcaaacaaagcttgtg

SEQ ID NO: 12440 - DNA, 404 bp, Zea Mays
gcgacactcactcgtcggcccaagggaccccccggtctcgaaacaccgacaaccatgtttgtctgtattgctacgactagcagtgaggtcacgagtcacctgaagaacaagttggtacctggaatctgaagtcccaggcaagttgtgcccttgaccacttttattacccaataatgttctttagtatcgcttattcatgcataggtttaattttgatgggacccaataggtcaccctagactgattatcttgttaccttatttacccctaaactatttgggtagtttttgctattgctctatatgtttttgggtttaatattacattatgttcatgttcgaattatactgttatttattattcatgtcaagatcattatttttatttggaacatgaagcttaac

SEQ ID NO: 12441 - DNA, 299 bp, Zea Mays
tatacaataacagagtgtatagagataaatgtcacaataacatcagagtatttattacatagcgaaagtcttattacaaaataaaagataaatatgaaacgaactaaggatcatccttggcgccaataagtcaactaggaaacgccacctagatcagatcgaactcctcattgtgcggctcctcctgaaccacctgttcttctcctgtgggggtgagacaacaagggtgatctcacacatgatcatagctcaacaaattgtgggggaaccagagggcatgaactcaccgaaggtgggag

SEQ ID NO: 12442 - DNA, 265 bp, Zea Mays
ccgggttttatggggtagaggtcgtggctcccgttgagtcgcggaccagcggcaccgctcaattagcaacgagaaattcgggtcacaccgcacacttccttcccggaggttcgcacacccacgcgcctcggtcgaaccccaaaacacacgccgagagctgggtgatggtgtggccgcaatttccatggcagcacgatctccttccctgcgacaaggtcaattccccccggtcacggcgatgtaatgcgatggtggcctagttcta

SEQ ID NO: 12443 - DNA, 458 bp, Zea Mays
atcatatctcacggaagatcgagccgcgtcttctctcagacatcgaaccgaacaactcctttagtaggtgataccctaagaaggacttgatcacccactgcaaattccaagtcccgccttctcacatcagcataactcttctgatggctctgagcggccaaaatattctgacgaatttcccaaaccttctcagatgtctactaaacccaatcaggacaaaccagagatctctctcccaaagtctcccagcacaaaggggagatacaccgcctgccatataaggcctcatatggtgccatattgatgctagcctggtagttgttgttataagcaaactcagccaaggtgagatgatcctcctagctatccttccaagacagaacacaagcacgcaacatatcttctaaggtttggatagttcgctccgactaaccatcagtctgagggtgaaaagcaac

SEQ ID NO: 12444 - DNA, 312 bp, Zea Mays
cttcctgattcttttcgtgtccacaatgttcttgttgcccccaaaattatttagaatctttttatctattcgtcaatttagcactgataacccttattttaaggagttgacccctttggcttgttcgagagggatcttgccacttggagtctccttgtccgatgtgatagctttgagcccctatacactctgcttccggcttcctctactccatcctattggaataagtctcgtggtctgtgggaaggacaacaacagtacttgttggttttttgactgcaaggaacatcaacatcaacatcttagtttgtt

SEQ ID NO: 12445 - DNA, 221 bp, Zea Mays
cccagataggcgcagacgtgacgacggcgctctgggtgagaacgcacgcgacaacatcccagacgggcgcgaacgcgctgacggtgctcccggtggtggcgaccgggttgatagagatcgcggcctctacaggcagcgcgactctccctccccggatcggtaccatggtcaccgtggggtccaggtcgttatcagggacatcggtcccagcggtgggtggc

SEQ ID NO: 12446 - DNA, 257 bp, Zea Mays
attgaactagtttgcataatgtaagtgcaaaggttgcttggaattgagccaatatgaatacttacaagatatgcatggattgtttcttcatttttaacattttggaccacgtttgcaccacatgttttgtttttgcaaattcttttgtaaatccttttaaaagttcttttgcgaatagttaaaggtaaatgaataagattttgcaaagcattttcaagatttgaaattttctccccctgtttcaaatgcttttcctt

SEQ ID NO: 12447 - DNA, 159 bp, Zea Mays
agaactcatgcttgatgccctcctcctcaagtaagccttcaatttgtcagttcttgaactccgttccgttgtcgcttctaattttcttgatccttaggccgaactcattttgagcccgtctcaagaatccctttaaggtctcttgggtttgagatttct

SEQ ID NO: 12448 - DNA, 1935 bp, Zea Mays
ccgctcttgcgttggtcaagaaccccgtgttgcatgaacggagcaagcacatccgggtgaggtaccacttcatccgtgactgcttggcagaaaggatcatcaaaacatgctacatcaacaccaaggatcagcttgcggacctgctcaccaaaccccttgggaggatcaagttccttgagttgtgctccaggtccgggatggcccaattgtccaacaagacgacacataagacttagagggagaattgttggaataagtctcgtggtctgtgggaaggacaacaacatctgctgttggtccttgctgcagtggacaacaacaatcctttttggtctttgctttaggacatctccttttgtggaggcgtaggacaacagtcaacaactggttgttgtggaggaataggacagcaggctgggcagcacaacagcaggcagaacaacacatttccttactgcacttttgactgctttaaggacaacaggttgggtagaggacaacagtgcattgctgcagttcttttgactagaggacaacatctttgtgtagtggttagtgcagtttgtaggacaacatattcgcatctctaggaagcatatgttgcagccccttgggctataaatatgtatcccaacccttagacgggtatgacatttgagtagtgtgtgagaaataaatgaaaattgcctcaactcgtagtgtcatcctctcgatgagagtgagagtcccgttgcttacacacccaccgtttttgctacatcaccactttcgtttttgtcgcagtcgaacatattgactactttcactgcatccaactcttgtcattgtctacttggtcatcctagacagatatgttgtccaagttgtgtagtagttcaatcatctcttgtactaggggcactcatgagcatctacgtgacaggtacctgtcagctaagtcgtcatgttagactttccttccctaggtccccttaggttgtgcatgtttttgatctcatgtagtgtgatttatggacctctcctatcattagtgtttcaggctctaagtattacttggtgatactcgatgattgctcttattatttgtggatttttcccttgcacttgaagtctatacttttacgacttatttgcatttcactccattggttttcactcagtttggttgcaccattaaggtcgtcaagtgtgacaacaatcgagagtttgatgactcctctcgggctttctttctctcccatagcgagcggctacggatgtcttgcccgtacacctctccagaacggcaaggctaaacatatgattcacactactaataacatcatgtgctccatctgtttcagttgtcagttcttgctcgctactgggccgagccttcacactgccacctacttgctcaatcgcttccctaccaaggcgattagtgctcccacaccccactttgccctcttcagcaccactccattctgcaaccatctacgcatctttggttgtgcgtgctatcccaatctatctaccacaactccccataagcctgcccctcgctgctcctgttgtgtcttccttgggtactcccttgatcataaggggtatcagtgtcttgacctcactacccactgtttgttgatctcccaccatgtcttcgacgagatgaacatccctttctcctcatccccctccagctccaccaccgagttgaacttccttcttgagaccccatggctccctctagacaaccacctttgtttcccccctgcaggttcatctccgctgctcccacatgcggccctagtgccacatgtggaccttgcgtccctagacacgcctcgggctgccctactacacacaaccgagccgtgcgcggccccgacgtcccccgctaggccgggcacggccctagcatcacgccgtcatcggccgcgccctgaccctccc

SEQ ID NO: 12449 - DNA, 1126 bp, Zea Mays
cacccctccactttttccagccgccactctcttcttcctcctctcccacacgcacaactctctcctccttgctccatggcgcagcagcaaggtccttcttctccacatccggtcgtcgtccccctggtcctgctcggcgatgcccttctcccctaggccggtgagcaggtcttcttcctccctgcttcacggcagcaagcatggacgccgctgctctttttttcctctcgctctgctcgctcggccgccagcagccatggccgacctccacttccatggagcaggcgccgccaacagccatggcacccttccctgttctccagcgccctccctgccatcttccctcccatgggcgcgagctccaccctcggcaatggacgctgcgcgagatccccctggcgcccctgttttcccagccgtgcagctaccttttcgacttccatggtcgcccagctccctgtccacggcgcccaggaattccaacagcagctcattccctcccagcgcccccttctgctccatggctacaagaagcctctccatggctgacgcacaggtggccagcagctctgctcgccccttgtaccttgagcagcaagaagcagcgcccctatctccttttccccgcagccccaccaaatcgacgcgctgtaggtgctcgacaaaatgcgcagctccatttctccatggccgcgagctttcccttgctgcgactgcctcccaaggacagcgcgtagcagcctccccgtggccatggtctgcaacaagaagtcgtgcgctacatgttcgatgttttgcgcagcagctccgacgtctccgcgcggctcgctgctttgtgctacgcagcgaacagccgtcgacgcccgcagtgtgttcgttgttttgcgcagccccaatatcgtcgtcgttcaccccggtgagaccacgacaattcttgtttaatttcacatcgacattattctccggtgattaattgtgtatgtgttgcttgttttgttttgtggaggagacgaaccccgtgttttgcggggagaaggcaagtcgttcgacgctcgtcgacgttcgaagttatgtgcaaatcggaatcgccatcgtccttacaaacaccgattgggtttgtttatgg

SEQ ID NO: 12450 - DNA, 672 bp, Zea Mays
aagctcgcggccatggagaaatggagctgcgcattttgtcgagcacctacggcgcgtcgatttggtggggctgcggggaaaaggagataggggcgctgcttcttgctgctcaaggtacaaggggcgagcagagctgctggccacctgtgcgtcagccatggagaggcttcttgcagccatggagcagaagggggcgctgggagggaatgagctgctgttggaattcctgggcgccgtggacagggagctgggcgaccatggaagtcgaaaaggtagctgcacggctgggaaaacaggggcgccagggggatctcgcgcagcgtccattgccgagggtggagctcgcgcccatgggagggaagatggcagggagggcgctggagaacagggaagggtgccatggctgttggcggcacctgctccatggaagtggaggtcggccatggctgctggcggccgagcgagcagagcgagaggaaaaaaagagcagcggcgtccatgcttgctgccgtgaagcagggaggaagaagacctgctcaccggcctaggggagaagggcatcgccgagcaggaccagggggacgacgaccggatgtggagaagaaggaccttgctgttgcgccatggagcaaggaggagagagttgtgcgtgtgggagaggaggaagaagag

SEQ ID NO: 12451 - DNA, 527 bp, Zea Mays
gtggtttctacctgcgaggtgtggtagctaggagtgttgtacgttgtatacgtgctgcacctttgtaataagaaggttgtgaaatcaagtggtggtaaaacaatattcttatgtggttaaacagtttgatattattttacttgctgagatgtgtcatctcactcttgcattactcaatgcaggtacttgatacatgttgggaatgaggggagtagcagcacgtccactttcactctcataatagcgctgcccaggcgtagccatgatttaattagaaacttgttgtcaaaagaagtttatttttttgctagtcgtgtgcactggttaattcagttcatgtcgtatgcttaacttccctttgctagccgattaataatacttggtatgtttttgtcatgatatatgtttatacactgttgtccccccctcatttatgcaattttgcaaaggagatgctgccaaaattttatatagatgtcagaagtgtagttcagtagcattccggggtgtttgtggaccccggggtg

SEQ ID NO: 12452 - DNA, 1016 bp, Zea Mays
ataaaaggcaacatgaaggattatatattgttatcggacataaacaaaaacattgttaaattacaagagtaccttcaatcagaagatgacagtacaggcgtgacgcaaaaagcgaatgccaagtcagcgtgaacagtacgggggttctgttcacctatttataggcacgggacgcagcccatacaaaattacattcatgccctttacatttgacaataattctatagtaatctatcgaggtctgaatagccttttcatctttaagtcggtttcatttcctgcaaccacgccgaagctttcctgctgacatcttcggcgttgtatcaagaccttcgtactatccgggtcctctcccgccgtgataccaacttgagttcgaaggtacctgctcacacattatacttccagaaatactgttaaatcctgtttttgaggaccttcgaatgccgaaggtccccaacagtagtcctccactagctttcctagttagtcagccaaggacgtcccattccacccctatggtggcacgtgtttctcaagttaagttcgatgttccaattaacatagtggtcttatcatgagcagaagtagaacaataataaagaatgatcaagtgtaataattatctcaacacccaaaaccatatatagcaatagcaaagactacccaaaaattcaagggtaaacaaggtgaaaagataaccagactagggtggcctattgggtcccatcaaatttaagcctatccatgataaaataattatagataacattattgggtaaataagtggtcaagggcacaacttgccttcaatgagctcctgctcagcaacttctacctgctgaacaccagaatcctcggccactagctcgtctactcgccacaatacaaacaaacatggtacaagggataaattaacatcacaccaaacattaagacagaatacatattaataatctacgcatcgtaatgagatcgtaggaacaagaatcagtaaatttggagttacggttttc

SEQ ID NO: 12453 - DNA, 1000 bp, Zea Mays
gtcaaatctaatatgggtttcatgctaaaacagtgttactaagtgataaacaatattaatacaaaattaatgccactagaatgaattaaaaaggagtcaaaatgaaattttaggaattaaacaagttttggaaattatttttataatataaactcccttttccggtttatttatcattttgttctcgtgtttggaccgcggcactaatacactaaagtccaggggcttctacgcaaaaatcccgagacctagagcaactgacgttggatcgcgggttgataacctagaacgagagggtctcttatgcaatactgacacgcccgaaggggtattgggcatctgagccgtctgatttgattcaaaaggtccggattacattcactgagttatgaaacactatcccttcatagctcttggatcaaacattgatggtctgaggacccatcaatgctccacactgtccgatcgtcggccaacgtcatgaattaaatgcgctaaatgggtattggtatcttctaatcaccgccacccgcagccagatcaacggtctgcatgcatcttcccacaattctctctctcaccggcggcgaatggcagaagcctatgctgcggcgccattgtcagcccgcaatggcatgacactatcgtagcccacacttgaattaaattagtgctacatgatgtacaaactaaagggaagtatttgaagagagactcaccgacgattgtgcctcgcagtgccctgaccacggggagatgttgttctcctacagcggtcgcgctccggcgagcagttccccgaactctggtgacctacacgcccagggaatcaatcaccagcgatctccgcccgcgatagaacccatgtgacccctccctgagcacgggacaacgatgactacggaaattgagctcagcggcctccactccccgcacaaacgctctctgccaccggcggcttctttccacattagcttaattggatagacgagaaggcgtg

SEQ ID NO: 12454 - DNA, 112 bp, Zea Mays
cgatccgaatcgatttactcagctgaggatctctaaccacacgacatatgtagcacttaacccttgcatatgtcaaccattcccacagatcctccacaacatgaaccggtcc

SEQ ID NO: 12455 - DNA, 374 bp, Zea Mays
ggcattgattttaaagttggtcaaaattttattagcaattactaagtataagtaaataccaacccaattaagtagtagaacaaaagtaacaacaacacctgcgatgcaatgcatatgacaaattaaatttaagttccataaattaatcatgtgagggtacgagctgctcatgaccgtgagcacggctagtataccagttttacactctgcagaggttgcacatctttacccacaagtcatgttacccatctacgatggggttgtacgggccccatacacctctaccaaggaagcgaggcagggtaacactatgaggcctttacaaagttccactagtttcagaaaacccgctacagtttataggaagctccaat

SEQ ID NO: 12456 - DNA, 619 bp, Zea Mays
tcattgaagtggtatttgcagataatgtggttttatactctaagaggtatgaagtcagaggacttatacattgcattactatgcatacatcgaagtgatatttgcaggtattgttgacgaaggaaagtgttatacaacctattgtggttgttcgaggaaatgagatggcattggttattttgggactattgagttctatatctacaagtatttctgatctcaattgtgatccctttaaaatgttgattaattcaattttttttggtttaaatatctcgtcgaaacaattcacttgctgagatgtttcatctcactcttgcattactcaatgcaggtacttgattcacgttgggaatgaggggagtagcagcacgtccaccttcactctcataataacgctgcccaggcacaaccatgatttaatttgaaacttcttgtcaaaggatatttgtttttaactagtcgtgcacactagttaattcagttcatgtcgttatggttatcttcccattgctagcagattattaatgtctagtatgttttcttatcatgatatctgtttatactttgttgcttccacgtttatgcaaattttcaaaggagatgctgtcgaaatttt

SEQ ID NO: 12457 - DNA, 126 bp, Zea Mays
tccacagcagcacaaatctagtacctgcaataacatgggttcgaaaaccctgagtacaaagtgtactttcgcaagccttacccgtctaaggaaaaagactctcaaggatatgctggtttttgggaa

SEQ ID NO: 12458 - DNA, 314 bp, Zea Mays
aaaagacttggatatattgggcagaaagatgataacatgatcagatttgctggtgatgaaatcgttctagagccgaagaatgacgagattgatgtttttagaagcttcttccgggctaggctttgcttcccgatgtacgaaatgattgctgaaatattggagaggtttgaaatatatttgcacgagttgaccccaaatgtgattgttagaatcagcgtttacatatgagccctttagaactaaggtttgagtccaaatgccgaaggtttttgtaggattcatgaactccattatcagacaaatgtaagatctac

SEQ ID NO: 12459 - DNA, 8058 bp, Zea Mays
caagaatatctttaaggtttcttgggtttgatatttttcctgcaaaaagaatacccaagtgaagcacgaataatcatccacaattacaagacagtacttactcccgtcgatgcttatgtaagcaatcgggccgaatagatccatgtgaagtagctcaagcggcctttcggtcatcatgatgttcttgtgtggatgatgagatccaacctgcttcctgcttgacatgcgcacaaatcatgtctttctcaaaatgaacatttgttagtcctaaaatgtactcccccttcagaagtttgtgaagattattcattccaacatgagcaagttggcgatgctagagccagcccatgttagtcttagcaattaagcaagtgtctagttcaacattgttatcattgaaatcaactaaatatagctgaccatctaacactcccttaaaagctattgtatcatcacttcttctaaagacggtaacaccaacatcagtaaatagacagttgtaactcattttgcataattgagaaacagaaagcaagttgtagtctaaaaaatctacaagaaaaatgttagaaatggaatggttaggagatatagcaatttttatccaaacctttgaccaaaccttgatttccatcctcgaatgtgattgctctttgggtatcatcatttttctcatatgaggagaacatccttttctcccctgtcatgtggttttgtgcacccgctatcgattatccgacttgtcccgccggatgcataaacctacaaaacaaacttaggccttgttcttaggtacccaaactgtcttgggtcctttgacattagaaacaagcaccttgggtaccaaacacaagtctttggactcttgtgtttgtccccaacatatctgacaactatcttgtctgatttgttagttagcacaaaagatgcatcaaaagttttgaatgaaatgctatgttcattggatgcattaacaatcttctttttaggcattttgatatgagttgaatacctagagctagaagcttcattactatacatataagcatgatgggaaacaatatgagatctcctagcatgaatttttctaattttgtgctcaggatagttcttaggatataatatgtaaccctctctatcctgaatcatgggagccttgccctttacaaagttagaaagcctattcttaggggcattaagtttgatgttgctttgactcccttgttggaagccaatgccatccttaatgtcacagcgtctcccattatataacatgctacgagcaaatttaaaattttcattctctaattcatgctcggcaattttagcatttaatttagctatgtgatcattttgttctttaatcacggcaagtttatcattcatagcatcaatgttaacatctctacatctagtgcaaataatgacatgctcaacagtagatgtagaaacattgcaagcattcaattcttcaatcttagcaattaaactatcattttcatttctaagacaagagattgaatctgttgttcacttgttctcaaatgctgtgaatcaagaacaaggcaacacaattgttaagtattaggaaccttcgtcttccgaagcattatctcctcatggacataatgatcatcagacgaaggtcatgaagggtatgccttcatcatcttatagatgaaaaagaatgtaaagcgacgaagatagtaagtatatctcattgattcattcatatttgcattccataaaacatgtatgaatatcgatagaatttgtattacattgatacattcgacttgctcgaagatgttgatgcgagagagattacaaatcagtgtgaacagtatggtgctactattcatctatttataggtacaggacgtagcccaggtaaaagtacatttatgtccccaatattcacttatgatcgtaatacaaatcattgaggactaagtagtctttttccccttcggtcaacatcatcatcatacttcatctccgtcacgagccgaagctatcaatctggcgatagcttcggtgtttattcttattatccttagatcatatcttcatcttgtatgccttcatcatgaggaaaagacttgcatcctgaagacgaagctccctgtaatagcttatgctgaaaacaactcgttaattatgtttttgaggacctttggaagagaaaggcccccaacagtagcccctcacagtattaatttgtttttatgtaacaaattcaggctgcgacgtaaacgaaggcctttagccgaaggtccaaaaaaacaccttctcttcgctagaatagcgaaccattatgaaccgtgggacccacctagctgtggggctctgagtatatatatgggaggatgtgtcgcgaatatttttcgtgtcatctagctttcgtgctgcagttgtcattttagttttcatgttctctgagtgcaattgtttgtgagcttcggctttctgccgtgaccatcaccgaaatgtctgagtacaagaaaagcgctaatcccacactcgctggcttctacgaagccatggaaaggaccaacgtagagaagaccaccaacgaaatgttagcaggactttctggtgattcaagcgacagagaaagcttcgatattgagagtgagaatgaaaataccgaagatcggccgtggagaccaagccacgttgtttttggaaaatccacaatcagacaaggtcaaattgaagcgatgaaaggcaattcatgatgttgttatagtgagggctggaggagaagacatcgttcccctgccagaaggggatgaagtggtagtcttcaggagcttcatgaaagctgggcttcgctttccgctccacaagatgctggtcgaagttttgaagacgtttgaaatataccttcatcagattacccccgaagctcttattagagtgggagtttttatctaggccatgaggagccaaggactggaaccagatgcaagatgcttttgcaatattcatgagttgtcttatcagacgaaggcaaccagaaaggaacagtgtcataataatttttgtgatcagatcatttcttcatcctcaaagggtgatgtagagggttgatcatcttctttatcatcaacatattcttcggattcttcctcttcacttgaggaacttgagttttctgcctccttcttacccttcatcttcttatattcttcacatccaaaagcatatggccttgacgaagtaggctcttcttgacccatctttcatgacatttcaaatgccacaatcttttcgatcaaaatcgcgggagtcatttggctcaagtcctccaagttgtgaaggatggtgatgatgctcccatatttttgttgtggtagcaaggtgatgatcttcctcataatatctgcatcacctaacttattaatgcctattggagacttgttctcaaatgctatgagttaagaacaaggcaacacaaaatgttaaaggttaaggtccttcgtccttcgaagcattattcccctcaggatataatgatcttcaaacgaaggtcatgaaggacataccttcatgatcacaatatacactaatgaaagaagtatgtaaaacatagaaaacaatatgaataattatgaaatattatcaactcatcttctattctattatcatgaataaacagaagtaatatagaattacatttgtaccttcggcttgacagaaggagatagtacaagtgtaattcacatgcgagtacaaatcagcgtgaacagtgcgggggtactgttcatctatttataggcacaggacgcagcctgtgagaaattacattcatgccctttatatttactattgacatatggacaactctatgaggactagatagccttttcccctttaagtcggttcctttttcctctatttagccaaagctcccttgcgcgtagcttcagagcaactccagtcgtcgtcatgatcatgccttttacatcgtatatgcttttaacccgagttcgaaggtacctgttcatatgtcacacttggaagacattgttaaatcacgtttttgaggaccttcggaggatgaaggcccccaacagtagcacctcgcagtattaatttgtttaagataacgaattcagactgcgacatggacgaaggccttaagccgaaggtctaaaaaaacaccttccctttgctagaatagcaacagtcaatgacggacgggccccccaatttggagcgtgctgagtgtataaataagaactcacaccagctacatttgatacactgcttgtgccatttgctttattttctcaatttcatagctcttgctcactaacgcttgctagtttttaagctctctgagcttcggttaaaaagacgcattttcgtcatttctgaagaagaaatgtctcaagacaagaagctgactgaagaggagaagctttttgaggagaaagaaggctgtgaatccttatattgctggatttattgagtcaatggcaaaaacaaatacagagaagattactaaggagatactggagggcctgtctgaaggtactggtgatagtgatagctacgatgtagaaagtggggacgaagattctgaggatcagccctggaggccaagtcattcaatcttcggaaaatcaaccatcaaacaaagtcatcttgagaacatgagaggaaggtatttccgagatatgtctattgtgagagctggcggagacaacaatgtccctacccctgaagaaaatgaagttatgatctaccgaagcttcttcaaggctggacttcggttccctttgagtaattttgtagttgaagtgctgaagacgttccaaatctttcttcaccagatcaccccgaagccataataaggatggggatttttgtctgggcagtaaggagctaggggttagaaccaagtgcaaagtgcttctgtaatatgcatgaattgctatatgagacgaaggccatgggtaaagaacagtaccacaacaacttcggttgttatggatttatcgcccgttccaacgcaagccacccagtaccaacatttcggaagagatggcccgaagcttggatggaagaatggttttatgtgaaaaatgatctgaaagcaaaggaagatattaaggaaatcattatgcgccccatctcgtcccgcttcggcctccaaaagccgaaggtcgaaattgatgatgccgccgaagcgtgtcaaaaggccttcagtacagtctgctccttcattggtacaagagatttaattcagagcatatagcattcagagtatggccgcttgtagaaagctgggaaatgccgaaggagaccatcaccaggtctagcgaaggtgatttggtctggctgaagtatacattcaggtttgaggataagttcgatgaaccaaacgatgactagctgaaatgcatcgaagctacaagtgatgaactgcttggagcttattccaaggcagaagataatgtgctatctgtagccttcggaggtcggggaaaaaagagaatgaacagagtttttgacgccatcggtttcgtctaccccgactaccgctacccgttgcggggacgggggaagaagagaaaagttgttgctttggccgcctcagctgagcctgtgccgaaggctgcggtcaaaaagatgaaggttcttacccaccggccacgttacattgaaccggctgtggtgcctgagtttggcggggaggcctcttcagctgctaaaacaagagaaactattcctcccgcgcaaaggactgaagagccgactataatgtcgaaggcaccttcggttgagctagttgaaacgaaggttgacaaagataaggctgaaaggtcaaaaactaaagaagtaacaaagatgtcagagattttaagcccttcaacagaagcaacagcgccgaagacacaaaagagttctgccacaactcctaagaggaggaggatgtcaaatgtgctagatgttgtattagaaacagcaaaaaccttgaatcctgctcctaccagaaaaattgccgaagcttctaaggcacaacctgaagctgaaacgaagcaggcagaagtcgaagctacaataattcaaactgaaaccgaagctgggccttcagagcccgctgagatagagcctgccgaaattgaagaaaaggcaacagaagaaaaggccacagagcaaatttcgtctgaaaaggttgcaactcctgctcccgaagctttaaaagagagcattgattacatcattcgccatgcttcgggaaagggactatctcaagaagaaaaacgagaagcacaacactatgcccaaaattgaaatatccgaagggggcattagtgtttaatggcagtggggaagaagattttttgtactatctcccggataataaagagatatctgtctgccgggagataggtagaagcatcggattcccgaagctggaagatggcctttcaatattatcaaaggatgagctctctgacagtttggcgtataatagtataaaggtataaaaactaattttgtattttgaaaacaaaatattttatttgtttatacttaattttgtcctcctcttgcagggcttaatccttagcaatgcccttagagcacagaaaaacattgaagatgaaggatatacaatggctctgaacaactttcgtgcagaggtaatcgaattaagaaacgaaggtcttgaaaaagacaaaatattgatttcattggtaaacaaagtgaaagaagatgaagctagtttcaaggctcaagctgaaattgaaaagaatgagatcgaaaaccttcggaaacagttggccgaagccaaagaaaaatgtggtctcacagaggctaaccgagatattagtgaatattggaaaaactatttagaaaaaacagttgaagaacttcgcgcatccaaagaaagatgcttcgaaaaatccttgggctgcgtggagaagataaaggctagattcgccaacgtgggtgcctattccaacgaagataacttcatacatggcgaccctgaaggtgttattgaatggataagtggagaagccgaagctttcgaagaaattttaagtgatcgcggggatgtctgcgcgttctctagtgcgagaggaatttcagccatcctggagaaggcggggtgcgaccatgtcaagaccctggcccaagccgaagctgccttctctgtggatgatataaaggatccctcagctaaagcaagtttaatgggcggaaaattttacagtgacatctgggtaaatggtggccgagaaatggctcacgaaattatgaagaaaagtgagaaagacattcacgacgcacgagtacaagcaaaacaagctgaagaagctgcagagcgcgagagacgcataggtattgtttcgcagcacctagcttcggcttttgtttttgtgacttcggactgactaattttttcattgtagctgaattatctccgccaccggaaccattcgatccactagctgatccagcaacgaaggaagcactagaaatcataaatatgcccgaatctgttgttgacaaagttgttaacaaattgttgaatgaagttgcggagaaggtcctgaaggaagactagtacttattgtaaaaacatttttagatgaacaatgtaactttgctacaacaaggttgtaatattccatgtgtaaagttttgaatctaatatgtaaattatttgtaattctcttctttgtgatgcatgaaacttttatacacaaaccatttttgagccttcggcgaaaaacaccttcccttatttttcatgcttcgtaaagaaaagaatccatgcttcgtgaaaatatccatacttcgtaaaaacattcatgcttcataaaatcatccatgcttcaaaaacaatggatcccttcttttgcaacatagctgatgaaactgcattgctcggcttacttttgtgccttggcacattttatttcacaaagcattctccgaagatcgaatttgtattcaattcgtgtcattagtgcgatatgatgtatgatgtgatgctatgcaggatgatgtgatgatatgatgcaaaat

SEQ ID NO: 12460 - DNA, 1526 bp, Zea Mays
cagaagtccaagtgtgacgcgcgagtgaatacaagtcaacgtgaacagtacgggggtattgttcatctatttataagcacagggcgcagcctgtgtaaaattacattcatgtccttcacatttactattgacttaaggacaatctatcgaggactagatagccttttcctctttaagtcagtttctttttctgttactgagccaaaacttccttgtgcgtagcttcgggactggttcagccttcgtcccgaccatgcttttcatattgtgtacaacttcattccgagtccgaaggttcctgtacatatattacacttgggaaacattgttaatcatgtttttgaggaccttcgaaagacgaaggcccccaacagtagcccctcgcagtattaatttgttataacaacgaatttagactgtgacgtgaacgaaggccttaagctgaaggtccgaaaaacaccttccctttgctagaatagcaacaatcaatgacagacggggtccaccaagttgcaaagcactgggcgtataaatatgaaccatagcggcagcatttgatacgtcatttctgccatttgcgttattttctcaaacttttagctcttgctcattagctcttgcctgattttcgagtttttagagctttggtttaaagacatgtttgctccaaatttgaaaagaagaagatgagtggagagaagaagatgactgaagagaagaaaacaaccaaggagacgaagctgtaccaagagaaaaaagttgcagatcctttcattgctggattttatgagtccatggcaaagacaaatacagagaaaattactaaggagatcatggagggtttatccgaagattctgatgacagtgatagttatgacgtggaaagtggggatgaagactctgaggatcgaccgtggcgcctaagccatactatcttcggaaagtcgactatcaaatagagtcatattgacgccatgagggggaggtattttcgcgacatgtctattgtcaaagttggaggagatagcactgcccctactccggaggaaaacaaatttgttatttatcgaagcttcttgaaggcaggccttcggttcccactgagtaaatttgtggtcgaagtattaaagatattccaaatctttcttcatcagattacccctgaagctataatcaggatggggatatttgtctgggctgtaaggagccaggggctagagccgagcgcaaagtgcttctgcagcatgcacgagcttttatatgagacgaaggctattggcaaagaacattaccacaacaacttcggttgttacgggtttattgcccgttctaatgcaagccacccggtgccaacattccggaaaatatggcctatgacctagatggaggagtggttttacgttaaaaatgatttaaaggcaagggaagacatcaaagaaataattcagcgccccatctggtctcgcttcggcctccaaaggccgtaggtggaaattgatggcaatgttgaagcatgtcagaaggcc

SEQ ID NO: 12461 - DNA, 406 bp, Zea Mays
aaaaaggtgaaggttctgacccaccggccgcgttatattgaaccggtcgtagcacctgaatttggcgaagggacctcttcagctgccgaagcaagacaaactgctccggttgtgcagagcgctgaagagccgaatgtagtgccaaaggtgcctacagtcgggccaatcaaagctaaagatgataaggccaaagagccataggtggaaaaagtgataaaagtgccagaagtcctgagcccaccgacagagacagattttccgaagatgcaaaaagctcctggtgcaactcccaagaggaggaggatggccaccgtgctagacgttgttatagaggccacgaaggccttaactcctgctcctaccaagaaaactgccgaagctaccaaaatccaagtcgaagccaaag

SEQ ID NO: 12462 - DNA, 90 bp, Zea Mays
caggagaagaacaggtggttcaagaggagccgcccaacgaggagttcgacttaatcttggtggcgtctcccagtcagctttgtggcgagg

SEQ ID NO: 12463 - DNA, 649 bp, Zea Mays
ggcagatgtgcccaaattgtacacaacaaacgaaaccaagcagttaagttgactacaaaactttttatttcagaaatgaaaccaaagaaagcttgtatcactgacatgtatgagataatgtaaacatagcacattcctaactatgaagttgacatggaaaattttaattttagaaactaacacaattgaccaaaaaagacatccacttcatttcagtaatctaagccaaactctcaccaccacttctagtagctgtataggaactccaaccaaccaagaacaacttcatctcatcgccccacttgctgaagcctaggaatagagttgagtcgtggagtcatcagcgcatgagagatgagcgagttaatacccggaggttgccggtaccatttgtgttgccgtggatggagcggtgcccggggcgacggctggccgcctcctcctgcagttcagggctcatcaaatcgtctagcccgcgtggacctaccagatgccgacggcgacgaaggtggcgaggtcctgtttgcttgtccatgaaaagaggtgggatgtgtgagcgcgccctaggatcagacggatttcgcctcacgcaaataacgcgggtgcgatcgcccccgacgtgtcacgacgaaaaaactttggaggaaag

SEQ ID NO: 12464 - DNA, 260 bp, Zea Mays
cgaaggtcctcaaaaacacgattaacaatgtttcccaagtataatatatgtacaggaaccttcggactcggagtgaagctatacacaatatgaaaagcgtggtcgggacgaaggttgaatcagtttcgaagctacacgaagggaagcttcagctcagcagcagaaaacggaaccgacctaaagaggaaaagaccgatcagtccatgatagtttgtgtcatgtttatagttatttgttgagggcatgaatgtaatttcgac

SEQ ID NO: 12465 - DNA, 2482 bp, Zea Mays
cgacagcatctcctttgaaaatttgcataaacgtggaagcaacagagtataaacagatatcatgataagaaaacatactagacattaataatctgctagcaatgggaagataaccataacgacatgaactgaattaactagtgtgcacgactagttaaaaacaaacatcctttgacaagaagtttctaattaaatcatggctgtgcctatgcagcgttattatgagagtgaaggtggacgtgctgctactcccctcattcccaacatgaatcaagtacctgcattgagtaatgcaagagtgagatgaaacatctcagcaagtgaattgttttgacgagatatttaaaccaaaaaaattgaattaatcaacattttaaagggatcacaattgagatcagaaatacttgtagatatagaactcaatagtcccaaaataaccaatgtcatctcatttcctcgaacaaccacaataggttgtataacactttcctgcgtcaacaatacctgcaaatatcacttcgatgtatgcatagtaatgcaatgggtaagtcctctaccttcatacctcttacagtataaaaccacaccatctgcaaataccacttcaatgaatgcatatgaatgcaatgcatatgtcctctgccttcatacctctaagggtatgaagccgcatcgtacccctcctcgggcaacgtacgatgctaagttgtaccggtacggtcggaccataggtcacgacaaaacttcagatgcaagtgaatcatgcaatgtatatggcatgctgcatttatcaatatacttcacttccttcacatacaatacaacctcaaataatacttcatttaccttcagatacaatatcaacctcaaataatactttatttaccttcaaatacaataccaacctcaaataatacttcatttaccttctggagtgtgaattaatctcacgagtcatactcgaattatcatcaacatcaatatatgattgagcatcagcataatgcaagcaagtaaagcatcaccatagagtccaattatgaaagaatccaatacttctgaatattagagtgtaggcaatagaaataacaggacagaatggaagcaaccactgctacattcacttgccttcatcgaagaagaagaaatgtactaggcatgatctggagtgtagccacctgctagcgggcataaaacttagtacaaatatttcacaaacatttgccaacaatcaacaaatcgctcctacacttgaaaccaagacctggtggaaagactcccaccctgaaccacatgacatacagcagcagcgctgtttgttaattttgtatctttaaaattttaacagttgtgatatcaaacaaataatctaggagtatctacacaaaatactctacaacttcggtattcaatggataattaaaatctgccatctacaagttctaaaatctctaacaagataactgactgaatctgtttcaaatagcagcgtaattaacttcaaaattcgatatctcacaaactactcaaccaaaaatcatggaattctactggacgtaagaaattttatccctctacagaagtctccatagttggaagagccaattcggccatttacctgatgaaacctaccagcgaacagatccgctcatttttgtcaggcaaacaggaacagacacagtaaaacaaacataactggagtttcacaaatcatatgaatgcactctttaacaatctggaaagtttatgaaattatctacaacttcttttaccaacccatagtttaattctgttgataaaattgcctaactcttaagagaacagattctgcacagaattatgagactgaaaaactgctataatcaaactgcaataactttctgatctgatgtccgattgaggtgttcttcgcggacacgaaaagatctacaaattatctacgactcatatataaactttttatttttttgaggccactaagatcatggaaaactggtatgaatagaaactgtcgaatctgccattctgcagaaattaaattcgagatcaaaacctaaccccacatctaatccaacctctaatccttcaatccacatgatccacaacctccaaaagcacataattatatggaggaacaaggatcccatccttacctagggtttccccaagaaaatctgcaatagatgggggggtagaacatctccttgatcctctcttcctcttcaatccatcttgctcctcctcttctcgatccttgctgcgtgggagagggggagatctagggaggaagaagaaatggtgggtggctgccatcggaggagagggggaggccaaccaagggaaaaaggggggagggtggcggccaagagaggggggtggagggaaaaggggtggccacctagggttttgtgggagaaaagaaccgacgccccagatgacttctgcctttgcatccaacggcccacaaccctttcccacatcc

SEQ ID NO: 12466 - DNA, 1001 bp, Zea Mays
cttcgatgtatgcatagtaatgcaatgggtaagtcctctaccttcatacctcttacagtataaaaccacaccatctgcaaataccacttcaatgaatgcatatgaatgcaatgcatatgtcctctgccttcatacctctaagggtatgaagccgcatcgtacccctcctcgggcaacgtacgatgctaagttgtaccggtacggtcggaccataggtcacgacaaaacttcagatgcaagtgaatcatgcaatgtatatggcatgctgcatttatcaatatacttcacttccttcacatacaatacaacctcaaataatacttcatttaccttcagatataatatcaacctcaaataatactttatttaccttcaaatacaataccaacctcaaataatacttcatttaccttctggagtgtgaattaatctcacgagtcatactcgaattatcatcatcatcaatatatgattgagcatcagcataatgcaagcaagtaaagcatcaccatagagtccaattatgaaagaatccaatacttctgaatattagagtgtaggcaatagaaataacaggtcagaatggaagcaaccactgctacattcacttgccttcatcgaagaagaagaagaaatgtactaggcatgatctggagtgtagccacctgctagcgggcataaaacttagtacaaatatttcacaaacatttgccaacaatcaacaaatcgctcctacacttgaaaccaagacctggtggaaagactcccaccctgaaccacatgacatacagcagcagcgctgtttgttaattttgtatctttaaaattttaacagttgtgatatcaaacaaataatctaggagtatctacacaaaatactctacaacttcggtattcaatggataattaaaatctgccatctacaagttctaaaatctctaacaagataactgactgaatctgtttcaaacagcagcgtaattaacttcaaaattcgatat

SEQ ID NO: 12467 - DNA, 2022 bp, Zea Mays
atttttttgaggccactaagatcatggaaaactggtatgaatagaaactgtcgaatctgccattctgcagaaattaaattcgagatcaaaacctaaccccacatctaatccaacctctaatccttcaatccacatgatccacaacctccaaaagcacataattatatggaggaacaaggatcccatccttacctagggtttccccaagaaaatctgcaatagatggggggggggggtagaacatctccttgatcctctcttcctcttcaatccatcttgctccgcctcttctcgatccttgctgcgtgggagagggggagatctagggaggaagaagaaatggtgggtggctgccatcggaggagagggggaggccaaccaagggaaaaaggggggagggtggcggccaagagaggggggtggagggaaaaggggtggccacctagggttttgtgggagaaaagaactgacgccccagatgacttctgcctttgcatccaacggcccacaaccctttcccacattccacgctgtgaagatcaacatttggtcaacattttttttgggatattacactctaccccccttaaaaagaattcgtcctcgaattcggccactccaatcaaaacacccaaggtaccccatatagcaccaccattcaaaacatgggtccattattggtcttaattaacacaagaacttctaccttagactaattgtctaaggaaactacacaacctgacatcaagcatgaaacaacatgcaatgaagctcatagatgcaatcaacactacaatttcgcaccatcgaatttggatgcaactatacatcaacatcaatgtcttaagacaacactcttttatgaaggggtaatatgcactaagcacaacccttacaaacttcaacaattaatttcaactaaatggtgaaacatccacacccgacgaatgtataagaagatcaaacacctcacctcaaagcaccgcgaaacaagtagttctattgaaataaaactcctaatcttcctaaaccttattcttgccatcataaaaagataatcatgtaatctaacattctttgcaccctgcaaaagggagaaaacctacagaactaatggagcaataaagcaaacaagaagccaataacattctgtgtggcacaggtcatcaaagaaatgccaaaagctccacaaagagcactgacagcacaacaacacaatacttggttaaccaatgtcactatacttcatccaacaactcaactaagaaaaatatccaaactagtgaggctaacctacacataatataagtcttcatctactatagttcataaacttacatttcattctatcatacgatgcactcaaagtaccagacatacaaggtcaataataatcctgtaatccttcacacatttgacaaacatctcaagctgatgtaaaaaccacatcatttaggaataggcgactaaccacacacaaccaactctaggctaggcactggcttcattcaaaccaatagataggtggtccaacaatggatccacaagcatgcatcggggagagaaccatctgatcctcaacatattaataaataatccatggatccaaaaaatcaaagatttattctacaactagcatgactaacatgcaaccactttaaaccacatctaggctttgtggctactaaaacacacaatagaagagagacatgtaagccattctagctaggtaaagacttccgccaaaattcctataaaagtaccaatattcatttctttcagaactggtttctcgacataaacaatcattctttgcaaagatggttggaactatccaccaaccgctcaacaacttaaattcaaattgatggttaccttgtaacccaaaacacgcaattcacactcctcttagaaacatcctcaatcaagcatatataacaatattattgtaataaaactcaaccatggaaaacatggtgaaaacaacataggcatacttgtatatcacatgcataataacaa

SEQ ID NO: 12468 - DNA, 635 bp, Zea Mays
catgcatcatgattgtcgcatcattgtctcttgtgcaccaacatgcttctctcgcctttattccaggaataagaaattgtgaataatatgttgtattgctattttatgaactgcaaaaaaatgtcttatcctgtgtgtcatgatagttttgactaggttgtgttatgcgtttctcttgtcttgctatctaggtggtattgtaattgttcaaccccttttttttaaaaaaaatgttgtatgttctgctcatgaaaagaccccccccaaacaaccttttggttagcaagtaaaaccttataaaaaactatcatatgcttgtgttggtgtttctgacccttgtgtgtttcacacttgaatttacacctacacaacttgtagattcccatagcttgacctctaaatcgactaaagcttccttgtgcacttgtttatgtaaaaaaatgtttattgtctgttcgcgcaaaccatgtctagcctcacattctttttttttgggaaaccttgtccaaaatcctcattaaattctcctctgctcaacctagaagccatctgagttgatgatctctcttttcgcctggatctagtaatcttttcctttgcgaatcatgttgtggccttatcatccgaatatctgg

SEQ ID NO: 12469 - DNA, 525 bp, Zea Mays
ccccggggtccaccaacaccccggaatgctactaaacaacacttctgacatctatatataaaatttcggcagcatcccccttgcaaaattgcataaatgagggggcaacagtgtataaacatatatcatgacaaaaacatactaagtattattaatcggctagcaaagagaagttaaacatacgacatgaagtgaattaactagtgttgcacgactagttaaaaaaaacaaacttcctttgacaataagtttctaattaaatcatggctgcgcctgggcagcgttattgtgagagtgaaactggacgtgctgctactcccctcattcccaacatgtatcaagtacctgcattgagtaatgcaagagtgagatgacacatctcagcaagtaaaacaaaatcaaactgtttaaccacctaagaacattattttaccaccacttgattccacaaccttcttattacgaaggtgcagcacgtatacaacgtacaacacacctagtcaccacacctcgcaggtagaaacc

SEQ ID NO: 12470 - DNA, 315 bp, Zea Mays
cacccactaaaattctggacagcacatctaccaaatcgcataggtaaacatgtaaccaattagattgcagcacaaatacaacaaaatgatcacgaaaatcaccttgggttcctcctttcctccttcttttcttccttcttcctccctccaaactcccatggaagactcgcacccacacgacggataccaagcggggaggctccaccttggagaggaagaggtgggggggggctagggttgaggggtggcgctgcaatcacttggggaagaaggagagagattggggcggctgcaacagtggaagagagaggggag

SEQ ID NO: 12471 - DNA, 261 bp, Zea Mays
atccgtttgtagcaacagtctgttggtcgctaaaagtctagaaatttaacaacttatggttggtcgctatagatctcgttggggaccaacggttggtcgctatagagaagatgttactcactaaaaattaattaaaacattgatcgctaaattatagaaaagaaaaaaagatttgtataaaagaaaaaaaaattatagaaaagaaaaaattataaaaataatatttctaaggtttgaaccgtagatctatatctatatatt

SEQ ID NO: 12472 - DNA, 381 bp, Zea Mays
ctatgttaatcttacattactagtgatgtacaatgataaattttaattaatattaaaaagtctaatttcgaatacattagattattggagttttagagtccaaaatacaaatatacttctatagggtgggttacttatgtgcatggtccttacgtcacggagtttgaataaacaaaaacaaaaaatatctagatgaataaacaaattagtcacaaaaacaaaaaaaaaatctagatcagaaataaatctgaacggacaaatcaacgatataaataaaaaatatggataataaaaaaacaaattagtgacaaagacaaaaagtattgaacacccataatggggcttgaacccacaactttaaggttaaaagccttgcactct

SEQ ID NO: 12473 - DNA, 70 bp, Zea Mays
gcacaccatcctttcttctaatttggtttagatatttatgaattcacatacaaaaatatataatatcaag

SEQ ID NO: 12474 - DNA, 469 bp, Zea Mays
ctatgttactattgtggtttctacctgcgaggtgtggtaactaggagtgttgtacgttgtatacgtgctgcaccttcgtaataagaaggttgtgaaatcaagtggtggtaaaacaatgttcttatgtggttaaacagtttgatattattttacttgctgagatgtgttatctcactcttgcattactcaatgcaggtacttgatacatgttgggaatgaggggagtagcagcacgtccactttcactctcataataacgctgcccaggcgcagccatgatttaattagaaacttgttgtcaaaggaagtttgtttttttgctagtcgtgcgcactggttaattcagttcatgtcgtatgtttaacttctctttgctagccgattaataatacttggtatgttttgtcatgatatatgtttatacactgttgcccccctcatttatgcaatttttcaaaggagatgctgc

SEQ ID NO: 12475 - DNA, 1063 bp, Zea Mays
cacaacctatgcagagtgtttgaaaagtgatatatcagccgtgctcacagttatgagcggccaagggagcttcagtgattagtgatatttgatcagagatgttcggattacaggtggcaacgggattgatggtttttggtattgactctggtaatggtaagtggtactctttttggaaaggagtatgtttgggttaataacgtgggttaactctaaaacttggctttctctactagtaataataatctgaccaactaaaagcaactgcttgacttacccccacataaagctagtccactacagccaaacaagacacatgctgagtatgttgatgtggtggatctccaggagttccaggacgtcgacgagttcgagggttaggctagcgacctcccccagtcagctgcctgtggtgggttgtttacgttggctacgtttcgactctgtgtactttgatttatattatgtaaatggctctagtctgtaatattattacttactttttattgtaatttgaagcattgtgctatgattagtcatttatataatcgctttgtacgtgaattactaatcctggcacatacatggttcgcattcggtttaccttcaaaaccgggtgtgacagtgggtgatcagacgactgtgattagatgataccttgggtcgtggtaattttacttataaaacctcgaaggagatacgaattcacccgtagtccaaacagaaataaagattagagcacatgatccctagaatttgtggttttgactccgggctctttggttttcatggtcccagtccagaaagctgtgtaattgattaaaataaatacagaaatcatttttagtgtaaaagtaaagtcctactcttagaaaattcataactctatgaatttaattcaattttgatccattccagttgcattagatccataataatattgtttatcccctggtagctttatttggttatgaaacctaaattcaaattatgtacttagtttcttttgtaccccactcctaaatctttagaaattcataactttacaattgtaactccaaat

SEQ ID NO: 12476 - DNA, 240 bp, Zea Mays
tgtggttccttggtcggactccggtatttcttattcttatatacaaaccgcgacgtaaaagaccaacgtcgttcgtccatgtctgctctttttctctcgtccgttccattcggtatctatgttctgcggttcgtctggcatccaacgaagccatttgctgagtctccacatcgctacagccttccagaaattactactacgaacgaatacctcacctctgtccccaaaagggcgtcctct

SEQ ID NO: 12477 - DNA, 410 bp, Zea Mays
gaaacccccacccttccaacacctcaccagaaaccctaattcggagtccaaacttaaaacagccgtaactttcgcctcgaaactcgaatcgggcccatttgttttcaaatcgcacagaattaaatttcgcatccgattctttcccgcttcaccagattcgctgtttttaaaatttctaaattcggcttggaaataggacttctcattttccaaacatttattctgattttagggcaaacttttagaaattccagaggccgcgtctttgcacaaaaaaatctgaaacttggtgtgttttcttcttatgtgctgctgcaaaagagaaaaatataaaaaaatatttgaaaaaatagcaaaaaaagaaaaaaagaaaagaaaagagtagcacataaatagaaacgccagtgttt

SEQ ID NO: 12478 - DNA, 175 bp, Zea Mays
ctctcccatcttcttcctcctcaaacctttgcagccctcaccacccaaaaccctagctgcccccccccatttctccccctcctccctaggtgcagccctcccgtgtggttctccgtcgtgtggctgcgatctcaattggagtttggagggaggaagaaggaaggagtaagggaag

SEQ ID NO: 12479 - DNA, 101 bp, Zea Mays
gttccggtcaacaatcgggtgcgggcgacagtggattgaaggaaatttgacgccggagacaacacgccgccgcgaatccacctatcaccgtgggcagagct

SEQ ID NO: 12480 - DNA, 936 bp, Zea Mays
ccggtccttatatgaggggacaatccttctgctcacacctaaaccggctgagccatcaccttaggctctcccctaaaccagggagtccctgatcatcccactcacaaggtgatgagggtgaatacccttcatcatacactttttgaaaacatcgtttagaagaaacactgtccttttcccattccacatttggtactcaaaatatgtttgttaatgtgggctatctctctgcccataatgcaaaagatccatcccttaatcccggcttaggtagtggtagaaagaataggtaatttatgcatcaagggaagaatggacttgcctttgtcgactggcgggtggggccgggctggcagcgacggaggggagcacggtcgcgcgggagagagagagaggggggtgtgggccggaaacggcccagacgagggggagtgttttctttttataatttctatttcctatttctatttcttttatctctttttcttttaaacaaataattagctaaataatcttaggtgctaaaaaatattctatgtgaggtgcttctaacaatcataatgtatgcaaatgatgagatgtcctatgaggtggagtctagggagcaattagggggggttaggagattagggttcaaaccttggggttaaattttgggatgttacagcacagtagctgtcccgtgaacgaccggacagcgcacaagaaagaggagttctgcgcgcgtggccggtgcaccggacagtgcatagtgcagtgtccggtgcacaccggacagtccggtgagcccagacagagggaattttgaaaattttcaaaattttctatctagtttccaaccaaaccaaatcccaacttataatcacataaaataacacttgttgggataggtattggaaccctcatatattttctcataatttttcaaaatatttt

SEQ ID NO: 12481 - DNA, 2147 bp, Zea Mays
gtctctccaaaatctaagccttcaacttgagagaatccctttgcaacaagtcttgccttgttccttacaatcacgccttgatcatcttgtttgtttctgaacacccattttgttccaatgattcttgcgtcttgtgagggcttctccagggtccaaacttggttacaggtgaagttgtttagttcttcatgcatggcattcacccagtccggatcctgtagtgcctcatctatacatgtaggctcaacacaagaaacgaaagagtgatgttcaataaaagaagcatgcttatgtgatcgagtaataaccccttgtgaaggactcccaatgatttggtcttgtgggtgtgcttgaagtagtgatgagtttctcctgtcaaccacttgggaagaagatcctcgagcatcagcatcttcggcttgtacccttgcttgttcatgagagacaaatgtatcttcatttgcatgcctctcatctttttcatcatcttgtggtacccttgatgaagaaggcatgtcaatgttttgcacctcttcttcatcttcttttggtttgatagctccaattggcatgttcttcatggcttccctaagtggctcatcacctacatcattaagattttcacgtgctccttgggagccattagtctcatcaaattccacatcatatgtttcttctaccacgccagtggtatgattgaatactcgatatgctttggactttgatgaataacccaatataaaaccaatatcacaatgtctttgaaacttccctaggtgatggcgtttcttgtaaatgtagcatttgcatccaaacacccggaaggagacgtctggctttttcccatttagcagttcatagggagtcttcgcaagtagccggtgaggaaatagcctgtttgacgcataacatgcagtgttgacagcttcggcccaaaacctctccggtgtgttatactcatcaatcattgttcttgcaagtgtgatcaaggtcctattttttctttcaacaactccattttgttgaggtgtatatgttgcagatacttcatgcttgatcccaatctcatcacagtattcatgaatgttggtgttgtcaaattctttaccattatcacttctaatcttcttgatcttgcaatcaaattcattttgagctttcttggcaaacttcttaaatatagatgcaacttcagatttatcatggagaaagaacacccaagtgtatcttgagaaatcatcaactatcactagacagtagagattgccaccagcacttacataatttgtaggtccaaataaatccatatgaagtagttccagtggccttgatgttgacatgaaagcttttgtaggatgtgtgttagcaacttgcttcccagcttgacatgcactacaaggcttgtccttttcaaatacaacatcctttaatcctctaaccatgtcctttttaatactttcttgagtgtgctcatccaaacatgtgcaagcctcctatgccaaagccatccaagtgatgctttggtaaagaggcaagttcttaagtctgcatcttcagaggtgaaatccactaagtagagattgttgtatctaaatcctttgaataccattgattcatcatccatttttgatacaataacctctgttggagtgaataagcattgaagtccaagatcacagagttgacccactgataataagttgaagctcaaaggtgcaaccaagagaacatttgaaattgatagatcatttgaaattgccaccttgccaagtccttgaactttcccttttgaattatcccaaaatgtgatttagtcttgaccatcaacattctcatcaagtgaggtgaacattcgtgggttgcctgtcatatgttgtgtgcatccactgtcaataacccaatggctcccagcgggcttgtagttcacctacatccacaaacaaatcaagcttgagttttgagggccctatatttcataggaccagtgactttctcaatcaaggactttgcaacccaaatttgtctaggtctactcttgcttggtggacctaggaatgtaaccttgacttttccatttgctacttttctgagaacttaatgagcattgaaagcaaatggtcttgagtgcttaggcaagggagttggtg

SEQ ID NO: 12482 - DNA, 462 bp, Zea Mays
cttcctcttgaagaatctcttttcttttttctcatcatcgatgtcatcttctttcttgcccttgaacttgttcttcttgggcttgttacattgatgagcaagatgaccaagctctccacagttgtagcaatccatttcagaaatgggctttcttttgctggaaaagaatttcttctttcttgaatcaaatttgatgccttctctattgagcttctttaacatcttggtggtcttcctcaccatcaaggcaatgttagtatcaaggtcatcatcacttgaggattcttcctcaatttgtactttagcttttccttttctttcttgatttgctttgagagctaaatcctttctcttggaagatgactcatccttgtcattgatgtgcatgtacatctcatgagcattgatctttcccaatacctatgtaggtgtggtaactgaaagatccatctgatgcagcac

SEQ ID NO: 12483 - DNA, 1477 bp, Zea Mays
tcatccacgcaccagagattaacttttggtcaacatttttttgggatattacactctaccccccttaaaaagaattcgacctcgaattcggccactccaagcaaaacacccaaggtaccccatatagcaccacaattcaaaacatggatccattattggtcttaattaacacaagaacttctaccttggactaattgtctaaggaaactacatgacctaacatcaagcatgaaacaacatgtaatgaagctcaaagcatgtcatagttgcatcaacactacaatttcacaccatcaaatttggatgcagctatacatcaacatcaatgtcttaagacaacactcttttatgaaggggtaatatggaccaagcacaacccttaccaacttcaaccattaattttaattaaatggtgaaacatctacacccgacgaatgtataagaagatcaaacacctcaccttaaagcaccatgaaacaagtagttctattggaacaaaactcctaatcttcctaaaccttattcttgccatcatgaaaagataatcatgtaatctaacattccttgcaccccaccaaaagggagaaaatctatagaactaatggagcaataaagccaaaagaagccaataacatcttgtgcggcatagttcatcgaagaaatgccaaaaaactctacatagagcactgatagcccaacaacaacacaatacttgcttaacccatgtcattatacttcattcaacatctcaactaataaaaatatccaactagtaaggataacctacacataatataagtcttcatctactgtagttcagaaacttacatttcattctatcatacgatgcactcaaagtaccagacatacaaagtcaataataataacccctaatccttcacacatttgacaaacatattaagctgatgtaaacaccacatcatctaggagtaggtgactagccacacccaaccaactctaggctaggcaaggtcttccttcaaaccaatagataggtggtctaaaaaaatggctccacaagcatgcatcgaaaagggaaccatcagatcctcaatgtatcaatacataatcaatggatcaagagaatcaaagatttattctacaattagtatgactaataggcaaccactttaaaccacatctaggctttgtggcaactagaacacacaatatgagagagacatgtaagccattctggctatgaaaagacttcccccaaaaatccatataaagtaccaatattcatttctttcaaaactggtttctcaacataaacaatcattctttgcaatgatagttggagctatccaccaaccgctcaacaacttaaattcaaattgatgattaccttgtaccccaaaacacgcaattcacactcctcttagaaacatccacaatcaagcatatataacaatattattgtaataaaactcaaccatgaaaaacatgatgaaaa

SEQ ID NO: 12484 - DNA, 2163 bp, Zea Mays
cctagctcacgcgcgcgtcgttctcgccaactaactcgtgtgatccgccggttgttgcgggtccggttggagccctggacaccaggttgctcctctataaaatcggacaccgagccctttcggaaacacccttcgcatctagctcagactattttcgccacaaggagtcatggtgcagggagatctgctgtccgccgccatgactaggcatgcacacgctgtcgtacggacctggcaagggcagtagggtattcgctggtagtcggggatggtgcgcgttgcatcatcaggcaaagcgcgacgatctcggttgatgaattcctcaccgggatggagctccaccgcaggtctgtcgcgtgtcgtggccatggcattagcgctgctagaatcacagtgagcaacccttcaacagtatggtatcgttaccctctatgtgattactttctttgattggagttcgaacatggaagtcaagcttgtttagaggtcagccatggcgcctccatgggcactctgtgccgccgtgtgcggagttggggaagagagagttgagggtgatgtggtagaggagcgttgaccatgggatcttgatcctgtgatcaggactgggtaccagttcgtggggggatcctgggcattgaagtttaatctagcggacaggatgggtgagggagctatacggatcgtggtcattggatcctggatgaagagtgcagatgagatcccaggttaaccgttcgactttttaatctgggcggtcgggtttagatccgacggttgagatgtgcccatacctcttcgacctggcaaaatcactaaagataccctggactttataataactaacccgccatccagtccaattgggaagtaattacagatagatacgattttattcaaaatagaccctgcccaatagaacccacagtacatataagctttgaaatttataaaataaatctgaaattgatttttaataaaaaaataattccagaaccttgtataattcatatttaattaattttaactccaaattgattcattccagtggcattaattttgttttaatgttgtttatcaccaagtgactctgtttagccatgaaatttggattaaaattattcacttgaatttagtctatactaagcactagaaacttaaaaaatcataactcgataaccgtaactccgaatttagcgattcttgttcctttgatcttgttacaacatgtagaatattcttacgaattttgttcttatgcttggtgtaatgttaattttgcctatgccatgtttgtttgtatttctacgactagcgcgaggttacgagccacctgaagagcaagttggtacctggaatctcaattcccaggcaagttgtgcccttgatcacttctttttacccaatcatgttcttattaatcataatgatctgcataggttaattttgatgggacccaataggttaccctagtttggctatctttataccttgtttaccactgaatttttgggtagtacctgctattgctttatatggttttgggtatagagatatacattattcatgatcacacttttattatcagttgttatttactgttcatgataagatcattatgttaactagaaaatggagaaccacccgagaaaacagtgctaccacaagggtggcatgggacgcccttggctgactaattaggaaagctagtggaggtctaccttacccgaaaggggcaagggcagtaggggagtggtcagtgtaaggaggcccttgggttgattttgttgcgatggcggttaggcgaggggtccctgcattggagcttcatagaaactgtagcgggttttctgatgctagtggaactttgtaaaggccttgtagtgttaccctgcctcgcctcctcggtagaggtttatgggaagtcgcaatcccttggcatatgggtaacatgacttgtgggtaaagatgtgcaacctctgtagagtgtaaaactggtatactagctgtgcttacggtcatgagcagctcagacactcacatgattaatttatgaaattaaattcaatttgtcatttgcatcacattgggattatttattattttgttctactacttaattgggttggtatatacttatacttagtaattgctaataaaatt

SEQ ID NO: 12485 - DNA, 223 bp, Zea Mays
ctcacaccccccacaggtcaagaacaggtatcgcaggatgaggcgcatgaaggatgctgtgacgagttcgtgagaggtctaggcggtcgtctcccagtcaactttgggttgctggattgttgtctccttatgatgtaattatttatttattttgtacagaactcctattatttagtaatgatgtgatattcatttctgtaccatgattcattatatgtgtgag

SEQ ID NO: 12486 - DNA, 1487 bp, Zea Mays
gtgatatacaagtatgcctatgttgttttcaccatgtttttcatggttgagttttattacaataatattgttatatatgcttgattgtggatgtttctaagaggagtatgaattgcatgttttggggtacaagttaatcatcaatttgaatttaagttgttgagcggttggtggatagctccaactatcattgcaaagaatgattgtttatgttgagaaaccagttctaaaagaaatgaatattggtactttatatggatttttgggggaagtcttttcatagccagaatggcttacatgtctctctcctattgtgtgttttagttgccacaaagcctagatgtggtttaaagtggttgcctgttagtcatactaattgtagaataaatctttgattctcttgatccattgattatgtattgatacattgaggatctgattgttcccttttcgatgcatgcttgtggagccatttttttagaccacctatctattggtttgaaggaagtcattgcctagcctagagttggttgggtgtggctagtcacctactcctagatgatgtggtttttacatcagcttaatatgtttgtcaaatgtgtgaaggattaggggttattattgactttgtatgtctggtactttgagtgcatcgtatgattgaatgaaatgtaagtttatgaactacagtagatgaaaacttatattatgtgtaggttaacctcactggtttggatatttttcttagttgagttgttggatgaagtatagtgacattggttaaccaagtattgtgttattgtgctgtcagtgctctttgtggagcttttggcatttcttcgatgacctatgccgcgcagaatgttattcacttcttattggctttattgctccattagttctgtagattttctcccttttgcggggtgcaaagaatgttagattacatgattatcttttcatgatggcaagaataaggtttaggaagattaggagttttgtttcaatagaactactttgtttcgtggtgctttgaggtgaggtgtttgatcttcttgtacatttgtcgggtgtggatgtttcaccatttaattaaaattaattattgaagttggtaagggttgtgcttagtgcatattaccccttcataaaagagtgttgtcttaagacattgatgttgatgtatagttgcgtccaaatttgatggtgtgaaattgtagtgttgattgcatctatgacttgctttgagcttcattgcatgttgtttcatgcttgatgtcaggttgtgtagtttccttagacaattagtccaaggtagaagttcttgtgttaattaagaccaataatggacccatgttttgaatggtggtgctatatggggtaccttgggtgttttgcttggagtggccgaattcgaggacgaattctttttaaggggggtagagtgtaatatcccaaaaaaaatgttgaccaaaagttgatcttcg

SEQ ID NO: 12487 - DNA, 1291 bp, Zea Mays
ctttccactgggtcttggtttcaagtgcaggggtgttttgttgattgatggcaaatgtttgtgaaatatttgtactaagttttatgcccgctagcaggtggctacactccagatcatgcctagtacatttcttcttcttcgatgaaggcaagtgaatgtagcagtggttgctttcgttctgacctgttatctctattgcctacactctaatattcaaaagtattggattctttcataattgaactctatggtgatgctttacttgcttgcattatactgattctcaatcatatattgatgatgattatgattcgagtatgactcgtgagattaattcacacccctgaaggtaaatgaagtattatctgaggtcgtattgtatctgaaggtaaatgaagtattatttgaggttgtattgtatgtgaaggaagtgaaatatattgataaatgtagcatgccatatacattgcatgattcacttgcatctgaagttttgtcgtgacctatggtccgaccgtaccggtacaacttagcatcgtacgttgcccgaggaggggtacgatgcggcttcatacccttagaggtatgaaggcagaggacatatgcattgcattcatatgcattcattgaagtggtatttgcggatggtgtggttttatactctaagaggtatgaaggcagaggacttacacattgcattactatgcatacattgaagtgatatttgcaggtattgttgatgcaggaaagtgttatacaacctattgtggttgttcgaggaaatgagatggcattggttattttgggactattgagttctatatctacaagtatttctgatctcaattgtgatccctttaaaatgttgattaattcaatttttttggtttaaatatctcgtcgaaacaattcacttgctgagatgttttatctcactcttgcattactcaatgcaggtacttgattcatgttgggaatgaggggagtagcagcacgccccaccttcactctcataataacgctgcccaggcacaaccatgatttaattagaaacttcttgtcaaaggatgtttgtctttaactagtcatgcacactagttaattcaattcatgtcgttatggttatcttcccattgctagccgattattaatgtctagtatgttttcttatcatgatatatctgcttatactctgttgcttccacgtttatgcaaattttcaaaggagatgctgtcaaaattttatatatgaatgttagttgtgtagtttagtagcatttcaggatgtttg

SEQ ID NO: 12488 - DNA, 266 bp, Zea Mays
cgaagacgaactatagggacttgcccttaccagcgtttagaggctgctcccagagaatgactgcgcgacggtgttctttcaaggcgagttccggcgcccaaacctgatgccgcagaggacgccgcccacggtacggggagcgccgcagtcgccacgggcgtcgagaacccgggcgaactcctccccggcactccaagtttgctctctatttctctcctcgacgggtaacatcgcgtttctttctctctcgcggggcgatcgatggc

SEQ ID NO: 12489 - DNA, 365 bp, Zea Mays
atcgagtgctgtggctgacgcccatataaaaaatcgtccataccagagatgtactcaagcatgcacccgccagcaaggaaaaaacaataaattaaacaactaccaatgcttcaggcatcatcttctcaacaactcaatatttatttaattttttctcgagtttaatcattgccgtgagtattttgtcattcatgaaaggattatatgagcttttgatcaactataagggccttttaggtaagtggctaaattatagattatctgtataacaccgactccctttgtccacaagacattgtcatggtaatattttgtcctaagtcaaataaacttaaggttgactaataaatttgtccatatttttc

SEQ ID NO: 12490 - DNA, 894 bp, Zea Mays
gttggaagagccaattcggccatttactagatgaaacccaccagtgaacagacccactcatttttgtcaggcaaacaggaacagctacagtaaaacaaacataactggagtttcacaaataatatgaatgcactctttaacaatctggaaagcttatgaaattatctacaactttttttaccaacccacagtttaattatgttgataaaattgcctaactcttaagagaacagattctgcacagaattatgagactgaaaaactgctataatcaaactgtcataactttctgttctgatgtccgattgaggtgttcttcgcggccacggaaagatctacaaattatctacgactcatatatagactttttatttttttgaggctactaagatcacagaaaactggtatgaacagaaactgtcgaatctttcatgctgcagaaaactaaattcgagatcaaaacctaaccccacatctaatacaacctctaatcctttaatccccatgatccaccacctccaaaagcacataattacaaggaggaacaaggatcccatccatacctagggtttccccaagaaaatatgcaagaagagatggggaagaacacctccttgatcctctcttcctcttcaattcaacgtgctcctcctcttctcgatccttgctgcgtaggggggagatcttgggggaggaagcaatggaggatggctgccatagggggagggggcggccagccaagggggagaaagggggtggcggccaagagggggttgtgaagggaaaaaaaggggtggccacctagggtttttgtgggagaaagaaacgacgcctcagatgacttctatctttgcatccaatggcccacaaccctttacctcatccacgcaccaa

SEQ ID NO: 12491 - DNA, 226 bp, Zea Mays
ctccttgatttggttgatggtgtgacttggcctccatccctgccaccgggacagacggtcgagtgggttactgcttccgtaggagaggaccaggaggagtagcgtggccaggcttcgccatgttactcggttttctccgttagttatttccgctacattaaaacttattgttactatttctgaaactccgataatgtaatcactattgatacttattaaatttgtg

SEQ ID NO: 12492 - DNA, 156 bp, Zea Mays
cccccattgagggcttgttcggttattttcaatccatatggattggaagggattgatacggattgggagggattttgacttactagagattaaaaccctctcaatccccctcaatccatatggattggggtagaaccgaacaagccctgaggaggc

SEQ ID NO: 12493 - DNA, 516 bp, Zea Mays
gaaggccacggcagcgacggatccggacggggagacgcgatccagccaaagggacggcggatcgagccgagaaggacgcagcaacgtggatccggccgggaaggccgcggcagcgacggatccagcgaaggcgaagaagggggtgggcggcggggcgtgtccagccgggcaggggtctgcgtcggacctggcaaagggtgttgacggcactggcgacgggagaagcttgaagtgggaggcgctgctggggcgtcagcgcgagcaattaggaggtggctagcgcgatgaggagggcggcacgtgggagggtgccgacggaggacgtagcgaagaggagggtgcacgtgcaagggacacagcgaaggggaggacagggaaccgagcataggggctgttcgcgccctgccccgcggctggagtagagacttggctggcgacctgggagaggtagtagtagcgggaagccagctggagaccgcggccgccatgggggctggaggcagagcgccggtcgcc

SEQ ID NO: 12494 - DNA, 322 bp, Zea Mays
catttggttactggtagttataccaatgcagaataacaaagttttatggtgactaacaaaaacaaaggatgcccaacatatactttcttgtagataggaatagtagataatctccggtatatttggtagtggtttaaactaatgtttgttgttgtcttgtctaatgttctgcttgtaactgtctgtcaagaacatgacttgaccttatgaaacatatttgactgggtatctttagggctgatattgttgttgatagcattatctaatgtcatgcttgtaactttctgtcaagaacatgacttgaccttatgaaacatatttg

SEQ ID NO: 12495 - DNA, 324 bp, Zea Mays
agaggagcgagggagtgaaggagagagtaggagagagagcagtagggagcggcggcggcgggagagaagagaccaggggcgtgacggctgggaactggaagccagggcgcctagggttttaggtagttgggcccttgttgggccgatttggattaggagattttgttttttttttctttttttctaattctgaaatgtatttttaaagagctcgaaaattccctaaaaattcaccaaagttatttataaataaaatacttatttttagactaataattattatattatttaattattatattaattactagttttttctttaaa

SEQ ID NO: 12496 - DNA, 1323 bp, Zea Mays
cagcacttagacacaatacattagtctccaaaacaatgtactaagtcttagaaacatacctttttacttgatttgcactttgtccatcactttgcataagtccacttgtgttggcactcaatcaccataatacttagaaatggcccaagggcacatttccctttcaatctccccctttttggtgttttatgccaacacaataaaaccaactaaagaaagtgcaacatcaatacaaatgagaactcaaaattgttttgattcaaatttggcatatatggatcattctttgccaccacttggtttgtttttgcaaatcaacctcaatttcctatctctaagtcaaacacacttgttgagacatagagatatttcaagagaaattgatcaaagattcaaaaactcccattttttcccataatcaagccttctccccacaagagaccaatggtttgagaatgagagacaaacaaaagtattttgacaaacaaaaactctaactctactattttggccttattttctccccctttggcatcaagcaccaaaacgggatcaattttggccctttaaccccattgcctcaccaaaatcttcaactaagagtaaaaaggcaataagagtacaaagatgaacttggaatcagttactctttcatcggagtgcagtggaagtcttgcatggtccaagtccaccttttccctttcaaaccacctttgagactaaattaagcaaactcaagcacacagttagtctcaaagggtcaagttgtagcacatctccccctaaatatgtgcatcacttgcaaatggacttttgaggtccggggagtgcttgtacaacttgagcaccataaataaacaacaaaatgcattaaggaacatgatcaaggcataaaacacatgtatgctataaatcaatccaggttccgcgaatctaagacattgagctcactacgcagcttgcaaaaggtcgactcatctagaggcttggtaaagatatcagctagttggttctcggtgctaacatgaaacacttcgatatctcccttttgctggtggtctctcaaaaagtgatgtcggatgtcaatgtgctttgtgcggctgtgttcaacaggattatccgccatgcggatagcactctcattatcacataggagtgggactttgctcagattgtagccaaagtccctgagggtttgcctcatccaaagtagttgcgcgcaacactgtcctgcggcaacatactcggcctcagcggtggatagggcaacagaagtttgtttcttagaactccacgacaccagggaccttcctaagaattggc

SEQ ID NO: 12497 - DNA, 1270 bp, Zea Mays
cttggatcggattgaaatctagcacacatgcatacgctaagcataatattcggtctactagcacataaataaagtaaagaccctatcatagaccggtatgccttttgatcaacagacttacctcctttgttgagatcggtgtgtccgtcggttcccattggagtctttgcgggcttggcgtccttcatcccaaaccgcttgatcaagtcttgcgtgtacttcgtttgagagatgaaggtcccatccttgagttgctttacttggaacccaaggaaatagcttaactcgcccatcatcgacatctcaaacttttgaatcatcaccctgctaaactcttcacaagacttttggttagtagaaccaaatattatgtcatcgacataaatttggcacacaaaaagatcaccatcacaagtcttagtaaagagagttgcatcgactttcccaaccttgaaagcattagcaattaaaaagtctctaaggcattcataccatgctcttggagcttgcttaagtccatagagcgccttagagagcttacatacgtggtcggggtaccgttcatcctcgaagccagggggttgctccacgtacacctcctccttgattggcccgttgagaaaagcgctcttcacatccatttggaacaacctgaaagaatggtgaatagcataggctaacaatatgcgaattgactctagcctagccacaggagcaaaagtctcctcaaagtccaaacctgcgacttgggcataaccttttgctacaagtcgtgccttgttccttgtcaccaccccgtgctcgtcttgtttgttgcagaacacccacttgattcccacaacattttgctcgggacgaggcaccagtgtccaaacttcatttctcttgaagttgttgagctcctcttgcatggccaacacacagtccggatctagcaaggcctcttctacccttaaaggctcaatagaagagacaaaggagtaatgctcacaaaaataaaccaatctagaacgagtagttactcccttgcttatgtcacccaatatttggtcgacgggatgatttctttgaatcgtcgctcgaacttgggttggaggtgccggttgcgcttcttcctctatcacatgaacatcttgtgctcccccttgatcacacgcctcttcttgatgaacctgttcatcgtcttgagttaggggatgcaccattgttgaggaagaaggttgatcttgctccttttgttccagtggcctcacatctccaatcgccatgg

SEQ ID NO: 12498 - DNA, 2747 bp, Zea Mays
tagagacttcaaccaaacccgatgatttgttgaagaccctatacgcctttgtatttgagtcataacctaacaaaaacccttctacaactttgggagcaaacttagaattcctacctttcttcactagaatgtaacatttgctcccaaatacacgaaagtaagacacattgggtttgttaccggttagaagctcatatgacgtcttcttgaggaggcgatgaaggtagacccggtttatggcgtggcaagccgtgctcacggcttccgtccaaaaccgttcgggcgtcttgaattcaccaagcatcgtcctcgccatgtctaatagtgtcctgttcttcctctctaccacaccattttgctgtggtgtgtagggagcggagaactcgtgcttgattccttcctcctcaagatactcctccacttgaaggttcttgaactcggacccattgtcgctccttatcttcttcactttgagctcaaactcgttttgggctctccttaggaagcgcttgagggtcccttgggtttcatatttatcctgcaaaaagaatacccaagtgaagcgggaaaaatcatcaactataacaagaccatacttccttctatgcttagatagacgacgggtccgaagaggtccatatgaagtaactccaggggtcttgatgttgtcatcacatttttggcatgatgagagcttcccacctgtttacctgcttgacaagctgcacaaggtctatctttttcgaaagttacattagttagacctatcacgtgttctccctttagaagcttgtgaaggttcttcatccccacatgagttaaacggcgatgccacaactagcccatgctagtcttagcaattaagcatgcatctagaccggcctcctcttttgcaaaatcaactaaataaagtttgccgtctagtacacccttaaaagctaatgaaccatcacttcttctaaagacagacacatctatatttgtgaataaacagttatatcccatattacaaagttgactcacagacaacaagttatatccaagcgactcaactaagaacacattagaaatagagtgctcggatgaaatagcaatttttcctaaccctttcaccttgccttggttcccatcaccgaaaattattgaatcttggggatccttgttcttgacgtaggaagagaacatcctcttttcccccgtcatgtggtttgtgcatccgctgtcgataatccagcttgagcccccggatgcataaacctgcaaggcaaatttaggcttgggtcttaggtacccaactcatgttgggtcctacaaggttagtacaaatagccttagggacccaaatgcaagttttatctcccttgcattttgcccctaattttctagcaaccaccttcttatcctttctataaatagaaaaggaagcatttaaagcattataaattgtagaaggttcattcattactttcctaggaacatgaacaatatttcttctaggcatatgatgaacaacatttttcctagccacatttctatcatgcataatagaagaactagaagcaatcatggcatgagaatcaaaagcatcataacttctataaacattcttagaatgtctcctatcatgatacatgaaagcatggttcttttgagcactactagccataggggtattccctttctccttggcggagatggaagccttatggcttgttaagttctcgacttccctcttgaagccaagaccatcattaattgaggggtgtctaacaatcgtgtaggcatcccttgcaaattttagtttgtcaaattcactcttgctagtcttaagttgggcattaagactagccacttcatcattcaatttagaaattgaaactaggtgttcactacaagcatcaatattaaaatctttacacctagtgcaaactacaacatgttctacacaagatgttgatttattagctatttctaacttagcactaaaatcatcatttatgctctttaagctagaaatagagtcatgacatgtagacaattcacaagaaagcatttcattccttttaatttctaaagcaagggatttttgtgcctctacaaacttatcatgttcttcatacaaaagattctcttgcttttctaagaatctatttttatcattcaaggcatcaattaattcattaatcttatctaccttagttctatctaggcccttgaataaacatgaatagtctatttcatcatcgctagattcttcatcacttgaggaagcgtaagtactagtatcacgagtgcttaccttcttttcccttgccatgaggcatgtgtgatgctcgttagggaagagggccgacttgttgaaggcggtggcggcgagtccttcattgtcggagtcggacgacgaacaatccgagtcccactcctttccaaggtgtgcctcgcccttagccttcttgtaagccttcttcttttccctcttgttcccttgttcctgatcacaatcattatcgggacaattagcgataaaatgaccaatcttaccacatttgaagcatgatcgcttcccctttgttttggtcttgttaggatgctccttgcgaccccttagcgccgttttgaaacgcttgatgatgagggtcatcgcttcatcattaagcccggccgcctcagtttgtgccgccttgctaggtagcgcctccttgctcctcgttgctttgagagcaatggtttgaggctcttggattggg

SEQ ID NO: 12499 - DNA, 1121 bp, Zea Mays
ctcattgataaacataggactatcagtactatcaaattgcattccactctctactatctcccatatgcttggatggagagagaacaagtgactacgcattttgtgcctccaaaatccgtagtcctctccatcaaagtgaggaggtttaccaagtggaatggagagtaaatgagcatttgtactttgcggaatacgagaataatcaaaagaaaagtttgaattgaccgttttctttttctcgtagtcgttatcgtcgtccttttgggaagaggaagattcgtcgctgtcgtagtagactatctccttgatgcgccttgttttcttcttcctcccatcttttcttttgtggcctgagcctgagtgagtagacttgtcatcctttggatcattgacgaaggactccttctccttatcattgaccaccgtccccttgcccctaggatccatctcttcgggcgattagtccctttcttaaagagaacggctccgataccaattgagagcacctagaggggggggggtgaataggtgatcctgtaaaacttaaagcttaacaccacaaacttgattaagagttagaacaatgaaatcgagtagagaggagagctcttgtgaagcacaatagacacaataaggacaagcacaagagacacgaggatttatcccgtggttcggccaagtacaaaacttgcctactccacgttgtggcgtcccaacggacgagagttgcactcaactcctctcaaatgatccaatgatcaacttgaataccacggtgttcttctttactttactttttcccgtttgcgaggaatctccacaacttggagtctctcgcccttacaataagaatcacaatgaagcactagagtaagggagggaagcagcacactaaaatccacagcaaatacgcacacacaagaccaagacttgagctcaagacaatatctcaaggttctcactagaacggagctcaaatcactaagaatgtcgaacaagtgcgcaagaattaagtgtgagtgatcaacaatgctcaaggaatgcttggtgtactcctccatgcgcctaggggtcccttttatagccccaaggcagctaggagccgttgagagcatttcaag

SEQ ID NO: 12500 - DNA, 406 bp, Zea Mays
ggagcagcagaggagcggcagccgccgtcttgacctcgttggcgaggcggagctccttgagtttcaggagatcaagagcagcggcgaagtcggggaggacggtggagttggcgatgtcgtttgcggtgttgctgaagcggggattgacgctgcggagaagattgaggatgagctgcgaatcctcgacgggatggccgacgtcccggagatcggcggccttccgcttcatgatctcggcgtactcgtcgatggaggagtcgccttgggtcatggaatggaagtcgtggaggtggagaatagcccgcggggccttgttggcgcggaacagaccctcgatggcgacccaaaggttgcgggcggtctggttgtcgccgtcgacggcgaggctgaggatggagtcgtcgac

SEQ ID NO: 12501 - DNA, 1298 bp, Zea Mays
atcgatttgaagaaggatgcccaccgggagtagttggaggccttcatctccagcctggtcggtacatgagattgaaccgagacggtggcatatgagggcaccatgagctgctggatggcgccaaggtcggcgctggtgcctaaggtcggctcagatggcatcccagacatggaggagaggcgccagcggcgtgagaggaagcagagggcagcggaaggaaggcctggatcgaattgatcctggttctccgataccatgtagagagttggtttagggggagagcacacacacccaatcaggggggtgacttctcatatatatagccaagtggtctggtgtacagggatacaatctcctaaactaggaaggttatcacctatacaaggtatggctaaactaggaaggttagtcacctatacaaggtaagacaaccggctatacatatatgcctaatagacacacttttccctaggccaccaaacaatgccctccccttgctttctttctacctctccatagaaaaccttttcttatcttatcaattgcatctaaggcccattggggaatgtcaattgccattgctaaataatccgtcatgcctgtgagaacatgttgcacttgaattctccttcctgctctggtcatcaagtcagctttccagttggggagttcatctgcaattctttctacaaaggcctagaaagcttatgcaaggatagagggagccccaaccctaacgggcactctaacacctatgtttccatggtccaaaacccaaggatgattaaggaattaagccccttttctgctatgccttgcacctgctcactcgcccttctccaccattccatagtgtaggatgaagtgaagtggatgttctattgcatagagaaggggttacaatatatagactcaaccctaaccctaatgggccggcagcccaacactggtgccggcccacacacactcacacacacacagtctaacatccccccgcagtcgcaacgggggcaccacacacgatgagactggagtagaggtcgaaggtaggagccgacgggttgagatcccacgcagtcgcagcgtcgtgatggtgcgaatgttgcggctggagaagagaccggtgtgtgctccaagatgatagcctcgagatgccgaggtagccgaagttgatgtggtcgcagtcgggagacacgcagcagaagcctgatcttcgggaggggtcgatgttcgagcgtcaacgatcggcagggcgacacaacaaaagagcaccggcaggccgaccttcctacctcttc

SEQ ID NO: 12502 - DNA, 384 bp, Zea Mays
tgagccaccatgccacaggaaaaaatggcacttgggtggcatccaagatttccatatccttttatgatggtgaaaggagcatgaaccctagaagagaccaacataagcagttttagccgagtaaataccatctgtcactatggagaaaatgtgcctaccttcaatatcaggatgcaacgttgaatctgataaagcttcccagaggtgcagataatcaatcaaggcccctgctgatagagcacccctaatatcaccaatccatcttctattgaccatagcctcttgcactgttcttttgttgataattcttttaggtatggtgcagatcagccttggtgcgatatcagcgacctttccattgatccatttatcaacccaaaaaag

SEQ ID NO: 12503 - DNA, 528 bp, Zea Mays
cggggatgggaaggaatagaggacgtggagagagcagcggctgcgtgggggagctcctggccagaagaggatgcgcggacgccagggcctgcctgcctgcacacgcaagtggcgtcggccagagaagagcaaggggaggagagaaggggagaaggagtggaggcttcctggcggcggctgccagggagagtggcgcgcgctagggttaggcggtggccggttagggttaggagagtgcggctgggccttaatgggtcgatttggttaggttttatttttttctttttttattttcttttctaaatttgaaatatattttttatataactctaaaattcatagtaattaaaccaaaattatttataaataaaatattgtttttgaggttaatacttttttttatttactaggatttttcatttaagaagaaatgttattcaataaccaaaaatcaatcatgcgcaataaaaattttttttcaaatgcaaatacataacaaacacttaaaagaatcaatcatggtcgcta

SEQ ID NO: 12504 - DNA, 926 bp, Zea Mays
gaacagtaccctcgtactgttcacgctaaattgtaatcactctcgcatctacaccttcaaacaagatgaaggtatcaatgtaatataaattttgttaatgttcatgtgcgtattgtgaaatatatatatgtaagagccaatatattacattcattgtctttatgtattcttattttcaggaatcatgaaggcatgtccttcacgaccttcgtctgaagattattatatccgagaggagataatactttggagaatgaaggtccttcatctttaacaattgtgttgccttgttcttgattcacaacatttgagaacaagtgaccaacactgccatcgctggggatttctcttcaccaccactatcaccttcatgcacttcacacctatgcctcatggctaaaggtgaacggaaggtacaacctaaaaatgatattattgatgattgtgaaagtgatagtgatgacgagtatgcttctcctacctatgatgaattagctgacttacttaaagaatatattcaaatcattagaaagtcaaaagctaaatgtgacaagttaaaggatgaaaatgagttctttactgccaagtatgacatagttgttaaagctagtgaagaaatgaaggaagaaaaaaaaactatgtcatccaccaaatatgagctcgaaacctcccttgaagatgccaaagataaatgtgaaaaattaagtgaagcaaatagggagctgaaagatagacttgtaaaagtaaaggaagattatagaaaaattaaaattgactatgataatcttcttattgcaaatgagcttttatcttgtaatacacatgaggctattaaccctgttgttaagattgatgtagcaacctcatgtgatgatttgagccaagttgacccgtcttgtctccatgatgaattgattgaaaaagtt

SEQ ID NO: 12505 - DNA, 417 bp, Zea Mays
ttgctacccaggatgggatacagagagaccgccacgcatatccagctctggctgaaagtcgcctagagggggaaaataggcgaaacctgaaaattataaactttgaacacgcacttcacctggggttagggttagaaataaataatattgaatttagagtgcggaagatagttcttcttgctatgagttgctcaatcaatgcagataactttggaagcaaactcaaaacgatgtgagcaagataactttagagagagagagaggagaggggagaaacaaatcgagtgatgaagatcaacacaaatgaacacagtgatttgtttcccgaggttcggttctaaataacctactcctgttgaggaggccacaaaggttgggtctattccaaccctttccctctctcaatcggtcacttag

SEQ ID NO: 12506 - DNA, 873 bp, Zea Mays
atctttagaaattcgtaactcgataaccgtaactccgttttgatctattctagttgcattagtctcgtaataatatttattatcatctagtaactttgttttgtcttgaaatataggttaaaatgttgcatttagtttattctatatttaaccacgtggctcttcggaaaatcataactcggtaaacgtagctccaaatttagtggttcttgtttctacgatctcgtagcaacacgtagattattattacacagtttatttttatgtttggtgtgatgttaattttgcatgtaccatgtttgtttgtattactacgactagcagtgaggtcacgagtcacctaaagagcaagttggtacctggaatctcaagtctcaggcaagttgtgcccttgatcacttctttttacccagtcatgttctaattaatcataatgatctgcataggttaattttgacgggacccaataggtttccctagtttgactatctttataccttgttcaccactggatttttgggtagtacctgctattgctttacgtggttttgggtatagagatacattttattcatgattatatctttattatcagttgtttattactgttcatgataagatcattatgttaattggaacatggagaaccacttgggaaaacagtgctaccacaagggtttaatgggatgcccttggctgactaactagcaaagctagtggaggactaccttacccgaaaggggcaagggcagtaggggagtgatcagtgtagggaggtcctcgggttgattttgctacgatggcggtcagacgagggattcctgcattggagcttcctataaactgtagcgggttttctgaagctagtggaac

SEQ ID NO: 12507 - DNA, 597 bp, Zea Mays
tttctttctaaagaccaatgtggatttcacactttgagatctggtgcctaaagtgactttaggaataggagacctactcttaggaacaaaaacaaaattatttttttatgtatccatgcacttgaatgtttgttcttatgatacttgtctgatttggatctttgattgagtgtgatcggttgtggagtaatgtccacaattatatctacatatacacctagacataagggaaaatatttacaaaatagacaacacagaatatccctattaaaaatagatctactaaactagatatatttataagataaactagattatcctccaataaagtgtatctatagatccatcttatcttaaagaattctgtattatctcaatagattcatcttatcttatcctaaccacttttgcttatcccatcctagtgtaacaaccatgatctagtccaaaataaattaagtagatcttatctggtctaatctagttatatccaatccaatctcaaccctacctaatctaaaggagttacttaaacaagttggataatgctggtggcataaattagaccctactcctataaacacgattaacctaaac

SEQ ID NO: 12508 - DNA, 1330 bp, Zea Mays
aatatgcatatcatgctgtggttattgtatttctacatttgtattcaaatttgtgagacattggttgtggatccaatggtcccggcgcagcgataccccttcgttgtggcaggttaacatatgagtccctgagcttcgtagaaataaacccgcagtccaccacgtgggtagtctgtgtctgggaaacatttcgatttagcccctgcgcttctctggaattgtggccgcagcccagggattgattaaatcaagtaattaagttaggaaaatgatttttagtttaaaaataaatcaagaagcttgtttaattcatattaaatccattttaactccaaattaattcattccagttgcattagacttgtaataatattgtttatcatccagtaactttattttgttatgagacctaaactgagattttgtacttaatttcttttatacaccactgttaaatctttagaaatttgtaactcgataaccgtaactccgttttgatccattctagttgcattagtctcacaataatatttattatcatctagtaactttgttttgtcttgaaatataggttaaatgttgcatttagtttattctatatttaacaacgtggatcttcggaaaatcataactcggtaaacgtagctccgaatttagtggttcttgtttctacgatctcgtagcaacacgtagattattattacgcagtttatttttatgtttgatgtgatgttaattttgcatataccatgtttgtttgtattactacgactagcagtaaggtcacgagtcacctaaagagcaagttggtacctagaatctcaagtcccaggcaagttgtgccttgatcacttctttttacccagtcatgttctaattaatcataatgatctgcataagttaattttgacgggacccaataggtttccctagtttgactatctttataccttgttcaccactggatttttgggtagtatctgctattgctttatgtggttttgggtatagagatacattttattcatgattatatctttattatcagttgtttattactgttcatgataagatcattatgttaattggaacatggagaaccacctgggaaaacagtgctaccacaagggtttaatgggacgcccttggctgactaactaggaaagctagtggaggactaccttacccgaaaggggcaagggcagtaggggagtggtcagtgtagggaggtcctcgggttgattttgctgcgatggcgatcagacgagggattcctgcattggagcttcctataaactgtagcgggttttctgaagctagtggaactttg

SEQ ID NO: 12509 - DNA, 2699 bp, Zea Mays
acactaccgaggtgtggaggcatagggacgctatgagtcctttgcaaagttccactagcatgagaaaacccgctacagttttaggacgaaggaagcataggccttttccacggtatataaccccaccgcagtaattatagccagcactatactctgcagcgacacctagccgcttgccgctcactagctttcataattaattggccaagaatagagccatatagtcctcgtggttacactgttgtctcatgtggtcgctctatgttccaattaaacaatatgatcttatcatgtatcataataaagcgaatagtaataactaataagggaacatgagcatgaatcataagtagcattaacaaaaaaccaggtagagcaatagcaagactacccaataattcatttgtatgcaaggtgtggggtaaacaaaactaggtaacttattaggtcccatcaagttaacctaagcatgtcacggtgattatcatgaacattattaggtaaaaaatgtgatcaaggacacaactttccttatatttgtgataaccttgttgtctagatgatgtcccaaaagttgggcttcagattccttgacacctcgcctctactcgtagaaatacatacaatcaaacaaataatggatatggtaacattacaccaaagcaaaaaaaacaaatcacacaataatcttctacgtgtcactagaagatcgtaggttcgagaactactaagatcggagttatggttaaaaagatatagttttctgaagttttagatgtttaaacaaaactatattctatgttgattaatataaatcatgtgagaaagataatctaaagaaatgattaattcaactttaatctaaattataacttaattagagatcatcttttaatctagagagacgattagggataagccggcggccgaaaataagagtcgaaacctcctcgagaaggtgacagcattggagaaggagaaggaggacctcggttgccaacttactgatgaaaaagagaacacatagaacgcccgcatggaggctcaggatgcccgcaggcatgctgctaacttgtagctagagctgaagaatatgcgtgggcaccgcgagaggatagagtcttccacccgtgctggggttgaacgggcgcacacgcttttcgtggatgcgtaccgtgaccttggcgagcaaactgccccttttgacaaatcgggggaggaggtggggacccgctttctagggtggctgcaagatgagctagagtcgctcccgtccattgtgacgggtctcatgtcctatgcgtctcttatcacttgcgaaggggctgcgaatgatttgtctcgagaggtatgtaggcatttcgaggtctttgaccaagcgaacgaggacttcgatcgtggtgtgttctagattgaagatgacgtgttgaagcgctctgttggggcgctttttgataggatgtggggccctcacggccgcggcatcgaccgagagaggtcagaccgagcgctggcacaggtatgttatggtttggagaggggtgttgtgtgtgttcgttgttttgaaacattgttgtgctatcttcgcaggcgatgaatgaagaagatgtggaggacctcgccggccttgacagttcggtgacccggagtgatgcttcggcggaggcgggagccgaagagtgaaccatgctccaaggaggtgtcactaagggtcctacgacaacagatgctttggcgtaggttgagagagtgtaatagggaatagactgatagtgttcgttttgtgtgatactgaagatcggttgctgcgcaggttccggcgtctgggcctgcgcaagcaaaccctgatgatgacatgaatgatgatattttgatggatggaaatgtggtgtctcttagtagtaacgcgtctgggaatctgatgctgggtcgtggtcttcggagggtggaaagttatggagccttttttcttggatagatgacgaatcctcggaggatgatttagatttttttgcggcgttggatttagctgcagcggagtctccattgagggtcgctcccccgtgaagcgtcgatgacttcggatggtgcactccaggtgacccgcgggggcaaaaaagatgggggtatcgaaacaaaacgtcagtgagtcttcgcaaggtgttagaaggcatcgtcgaatgggtatggagaggtcacatctttggatcagaacacagcttgatcaggggcctatcgtgacttgctggcgccgacatccgggtcgtgtatgggggaagggatctgcgggacctttttgatggggaagagttgaggttgatgctgtttaatttccgataagctggtcttatcccgaaagaagaaccaatgtaatgatgagtgttgccatcgctgttctttggcgacgatgagcgaaaatgctgccctcgccccccttcgccaaaggacggcgatggggacatctatgaggggtggatatcttgtgtatagtgtacatcatgtagttgtaacataatgtgtttcatttgtgttttgcgctgaattgcacttggtggtgtcttcatgcgctttatattgatctgttggtaatcttttgtgacgacttcgcttgctgcgcctagtgtgaatccagctgcacccttaggcaacttttgcatggatagaaatatgtgtgttgtagatgacttcgcgctcttttg

SEQ ID NO: 12510 - DNA, 1127 bp, Zea Mays
gccactgccctgttgtgtggggtactcctggcgacaagctgtgtctccggtggggtgttggtgacgatgatgttcacttgttgctggttgcggttttgtcacacccgaattaatggacaaagctgggtgcatctcatatatgcgccaaagaagacaacacatataatacagaatgtatagagataaatgtcacaatataatcagagtacttattacatagcagaagtcttacaaaataaaaaataaatataaaatgaactaaagtccatccttggtgccataaagtcaactgggagacgccacctagatcaaatcgagctcctcgctgtgtggctcctcttgaaccacctgaacttctcttgtgggggggttgtgagacagcaagggtgagctcacacatgttcatcgctcaacaagttgtggggaataatgtggcatgaactcaccaaaggtgggagttcatgtgatgtgtaaagctgatcaacaataggggttaaagctgagcattgcttttaaagttggtcaaaattttattagcaactactagatgtaagtgaataccaaaccataataataatagaacaaaattaataataaatctcatgcaatgcaaatgataaattgaatttagttccataatttaatcatgcgagagtcctgagctgctcttgaccgtgagctcagctagtatactagttttacactctgcagaggttgtaccctgtacccacaagtcatgtatccaatattgccagggttagctagactcttagacactaccgaggtgaatggatagggatccactacgaggcctttacaaagtttccactagcttccgaaaactcgctacagtttatgggaagagcacttacaagaacctctcgtctgacctccatcgtagcaaaatcaacccaagaacctctctacatgcaactcccctactgcccttgcccctttcgggtaagatagtcttccactagctttcctaattagtcagccaagggcgtcccaatccacccttgtggtggcacgtgtttctcaagttaagctccatgttccaattaaagataatgatgatcttgacatgaacataaataacataacagaataattggaacatggatata

SEQ ID NO: 12511 - DNA, 182 bp, Zea Mays
tagacataggataaataaatataaaagtatgcgacatagtataattaatggtgttactgtgtagtaaatatttatacgaagctaacacaactggaacaagtcaattcggaattaaaacggagaagttataaattttcgaaggttttatgtatttgatacaagattaattaagatattaattt

SEQ ID NO: 12512 - DNA, 267 bp, Zea Mays
ctaaaaaggatttaatatgagttttctatgatttatacaagtttctatcattatttttgtataaaaaatggttttaaaatgactttctctgattttattcgctgtctagactagcgcatgaattcagagaataacaggggctaacacgtaaatttcctaagactcagtgagcagtattggtggacggcgggttgatttctgttaatctgagggactctttagcaaatcttccaggtcgaaaggttatcaagcgaacacagccgttgg

SEQ ID NO: 12513 - DNA, 686 bp, Zea Mays
atctgttgggtgcaccgaaggtgcacccaataggtgtagcccctaagctttaagtggattttagaaataatccattcaaaggtcttcattttatgcttttgaaatcaacatttttctgaataaccaagtgacgccatctatccatgccttgttaggtcttaaatcaatttgatcggtgacaggttggacatctggctagttgagacagatggccttcggttggacatcaccctgctctatgcttcaatgctttttgttgattggacttgcgcttcagtaaccacatttggacttcctcctgtctcagccgatctcctccttttgtcatggtacattcattgcgtatattttgtagatattgttccttcacgaagacttgaaaattttgggtgacacacccaatgggtctcttggtacgcatagtgtttatcatgttgtcctgaagtagtaacttgatgtgacgtagaggtgtaatcatttgcatgaacatttgactcaggtccaactgatgccgtgttacgcgaaacggcgccagttgcctgacttcttttcaagcggcttgaattgcttattgaattcttgcgactgttcggcaagcagggtaggaagtggacggtcacccttcggcccctttaaatagtctgcttgccctggctgtttactttacttgctcttgatcatttgct

SEQ ID NO: 12514 - DNA, 398 bp, Zea Mays
gaagatcccgttcacggcgcagagcggaccgcgacgacaatttccggccaccaattccgggggcccggacgctccccacccgttcgagctccacggtgaagtccccccggcaagcaaagaattgagtccatctacttcgcgcgcgagaaatatccgcacagggcgtttcataatctctctccctcaccgctccgctcgatggaggtgctccatgcccgattctctctctccggcgaggtagccatcagctacatcattggctccctcgaggttggatgaaaggaggtcctgcagtcgcatttataggttgggaacgaagtcaatccgttggcgaagatcccggtctgttaccataatcccagggaagatcagcggcggatgagggaaggagtccgtgg

SEQ ID NO: 12515 - DNA, 250 bp, Zea Mays
caggttctctagaggaaatggttgctggagtgacttggccgtccatcttgccaccgggttggactgttgagtgggaccctacctcggctgaggaggagcatgaggagtgatgggacaggcttccccatctctctgtttaattactgttagttttattccgctgcacttcgaacactgatggctacttttgaaaaactccgatgatgatgtaataacttaatactctgtcatgcatggttttatgctttat

SEQ ID NO: 12516 - DNA, 235 bp, Zea Mays
aaaagatcatagctcaacaagttgtggggaataatgtgcatgaactcaccaaatgtgggagttcacctgaagtgtaaggctgatcaacaaataatggttaaagctgagcattgattttaataagttggtcaaattttattagcagttactaaatgtaagtatataccaaaccagagtaataatagatcataattaataataaaccacaatgtgatgcaaacgaccaattaaattt

SEQ ID NO: 12517 - DNA, 377 bp, Zea Mays
ggaatgcgcgcgttccagccaggcacaacaacggcctcccaaccaccccgcatcgagctcgggcctacatgacccatgccaccggcccaccgcaaccctgagcccttgattcgggcggatcgaagttagcctcagccttgcacgcggaaaggggcgtgaacggagaaattgggggcaggcgccgcagtcgattgcgcccgtacaccatcggagggtccatgggccgtgtccggggagcttccttaagcccaccgcggggggtgctcgtctcatctcgggcgtgtgcgacggtcggcgagcagcaatttctcgccgaactttgacttcgccgcacaactacgtatcgtcgtggattacgccgataccgtctagctccc

SEQ ID NO: 12518 - DNA, 1014 bp, Zea Mays
ctcagacttatgatgtaatcgactattattcccttttttaatactatttgagcactgtgtgatgatgtccattttatgtaactgctgtgtacgtgaattgctgatcctggcacgtacatggttcgcattcggtttgccttctaaaaccgagtgtgacatggaggaactcatgagccaacaagggttggggttgttcgtctgcagggtctggaccccacatcttctttgagtagtattgcttgggagtctctatgtgttgtttgagtctcagttggccctcgcccagacttagtcgaacttgtttccaaccttgttcgggtctgtcctctaccgtgtatgtcctcccttttatagcccaaggcaggcacacacatggtgactaagccccgacaagtgggcccaataatctattgctagatatggggtaagtggagcgtcgatctatggagaacgaatatcttcacttggtcttagtgtagatctcctggcttgtcgtgccctggccctgtctaattggagtagggcgcgggtgtaggttgtggcgtaggttgacgcgctaccgctcgtagggatgatcaggtggcgtcctgtcttctccatctgtcacccttcgtctcggtaccgtgtgggatacagtgggagtcatgatgatagcagtccatgcggcacaaagagtcaatgatcctgcctcggtaacacgtgagttactatgcgacctgcgtactatggatgcaccgcctgccactagggcgagcaggtatacgtcttgtccgcagtaaatgtagaggcacactatactcaaaggctgatgtcgggctctccccgatggcttatgtcacacgtcgtagaacacgtggcagcactaggcctcgccttgttaggggagtagtgactaggaccgtccttcctcacgacagctctcgaccacccttggttgggggtccggatggtgttcgggggaggtcccgtctcgtccggagctggtcaacacgtggcagcactggaccctcttag

SEQ ID NO: 12519 - DNA, 829 bp, Zea Mays
ctttcttttaaatatagagaactttcctttgttctctatatacatatagaatctttcctctcttctcattctattttaatattttaaataacgaaataagtctaactaaaatatttataagccatttaagtgtataataaatatgtacgtaaaaaaatctagagcaaatatgtagatgactgagatataaaggaaggaatttttttagaaagccttgtaaagagggatataaatgataccgttggagatagtctaaaccaccatagtgaatactctatcaaacttagtcaattttgaatgggacatatcatatgcaatcatccatttagtgcgagtgagcaatcaaacaatttataacatccaatctagatccaactatttcatatggaatgagttaaatataaataggagctaggtttaaaggggaaggaattaaatatcaaataatactaacagttggattttaattgaatacactagatcgctttattgtgcacgatattttctcattttgaactgacctaaaagatggcgcgaacaacttatctatatctcgtatttcaaactctatatataaatagtgcaatctatataatgcaaaacagtggtttgcacaatcatatatatgatctgctggctatagccttaggccatcttcaacagacttcgatcatgtgtgaatgcaatagagctaatagttagctcgataaaaagttgttagtaaattagctaactaacagatagttggctacctattagttgatttgctaaaagtagctattagctgaaatattagctagactgcttgtatgtctgcagctgatttgag

SEQ ID NO: 12520 - DNA, 454 bp, Zea Mays
gttcaggccgccggagcgtaataccctactccaatgtgtgttgtattgagtctgtgagcttgagagcttgtatgaacttgtgagtctgaaagtctgagtgaatctgccttataacgtcgtgtgccttcccttttatagctcaagggaggcacttacatggatgttgagccccgacatgtgggcccaggaatataacggaaggaatatattgtaggagtaactaacgtctgtgcaatctcctgtgcgcctcgatgtccgcagtccatgcagtattggtatgcggtggctgcttccttggtaacgcgcgagtgatgatgagcatagtgcacgcagcagtatggatgttgtcacacccgtttccaagggcagagccgggtgcatcgcatatgtgtgccaggatctatttccacacatatgttgacgtcacaagtgtaatatatcaaaagaacaatgc

SEQ ID NO: 12521 - DNA, 2667 bp, Zea Mays
cttccttgaaatacaatacaaacctcaaataatactttatctgccttcagatacaatgcaatcctcaaataatacttcgtatgcctttagatacaatgcaaacctcaaataagacttcatctgccttcaggggtgtgaattaatctcatgggtcatacttgaaccataataatcatcaatatatgatagagcatcaacataatacaatcaagtaaaacatcatcatagagtttaattatgaaagaatccaataattctgcatattagagtgtaggtgatagaaataacaggtcaaaatgatagcaaccaccgctacattcacttgccttcatcgaagaagaaaaatgtactaggcatgatctagagtgtagccacctgctagcgggcataaaacttagtacaaatatttcacaaacatttgccaacaatcaacaaaacactcctacacttgaaaccaagacctagtgggaagactcccaccctgaaccacatgctatacagcagcagcgctgtttgttaattttgtatctttaaaattaaaacattggtgatatcaaacaaatactctaagagtatctacacaaaacaatctacaactttggtattcaatggataattaaattctgccatcaatatattctaaaacatctgacaagataactgactgaatctgttttagacagcagcctagttaacttcaaaattcgatatctcccaaactactgaaccaaaaattatgaaattctgctggcagtaagaacttttatccctctacaaaagtctccacagttggaagagtcaattcggccatttactagatgaaacccaccagtgaacagacccgctcatttttgtcaggcaaacaggaacagccacagtaaaacaaacataactggagtttgataaatcatatgaatacactctttaacaatctgtaaagcttatgaaattatctacaacttcttttaccaacccacagtttaattctgttgataaaattgcctaactcttaagataacagattctgcacagaattatgagactgaaaaactgctataatcaaactgcaataactttctgttctgatgtccgattgaggtgttcttcgtggccacggaaagatctacaaattatctacgactcatatatagactttttatttttttgaggccactaagaccacggaaaactgacatgaacagaaactgttgaatctgccattctgcagaaattaaattcgagatcaaaacctaaccccacatctaatccaacctctaatccttcaatccacatgatccacaacctccaaaagcatataattatagggaggaacaaggatcctatccttacctagggtttccccaagaaaatctgcaagagatgggggtagaacatctccttgatcctctcttcctcttcaatccatcttgctcctcctcttctcgatccgtgctgcgtggggggagatctagagggaggaggaagtagtggagggtggctgcaaggggaagggggaggggcggccaagggtggggaaaagggggggttggcggccaagaaaagggaaaaataggaggacgaccactagggttttatgggagaaagaaacgacgcctcagatgtctcttgactttgcatccaacggcccacaactctttccccacatccacgcaccgaagataaacctttggcaactttttttttgggatattacactctacccctcttaaaaagaattcgtcctcgaattcgaccactccaagcaaaacacccaaggtaccccatatagcaccaccattcgaaacatgggtccattattggtcttaattaacacaagaacttctaccttggactaattgtctaaggaaactacacaacctgacatcaagcatgaaccaacatttaatgaagctcaaaccaagtcatagatgcaatcaacactacgatttcacaacatcgaatttggatgcagccatacatcagcatcaatgtcttaaaacgacactcttttatgaaggggtaatatgcactaagcacaacctttaccaacttcaacaattcattttaattcaatggtgaaacatccacactagatgaatgtataagaagatcaaacacctcacctcacagcaccacgaaacaagtagttctattgaaacaaaactcctaatcttcctaaaccttgttcttgccataatgaaaagataatcatgtaatctaacatactttgcaccccaccaaaagggagaaaatctatagaactaatggagcaataaagccgacaagaagccaataaaatcttgcgcggcacagttcatcgaagaaatgtcaaaaactctacatagagcactgacagcccaacaacaacacaatacttgcttaacccatgtcactatacttcattcagcatctcaactaagaaaaatatccaactactaaagttaacctacacataatatgagtcttcatctattgtagttcagaaacttacatttcattctatcatatgatgcactcagagtaccagacataaagggccaatactaaccccgtaatccttcacacatttggcaaacatcccaagctgatgtaaaaaccacatcatttaggaataggtgaataaccacacacaaccaactctaggctaggcaatgacttcattcaaac

SEQ ID NO: 12522 - DNA, 548 bp, Zea Mays
attgtcatctgcacttcaaagtcactaatatatatcaaagatacttgaacccatgtccttcctatatgtgcaagtgtgtcaaatttatcttcaaattgctaagaatctaaagcctaagctttgataccaactgtaacaccccgggatccacaaacaccccagaatgctactaaactacacatctaacattcatatataaaatttcgacagtgtcttctttgaaaattgcataaacggggaagcaacgaagtataaatagatatcatgataagaaaacataatagacattaataatctgctagcaatgggaagacgaccataacgacatgaactgaattaaccagtgcgcacgactagttaaaaacaaataacctttgacaagaagtttctaattaaatcatgactgcgcctgggcagcgttattatgagagtgaaggtgtatgtgctgctccttcccactccccttgatgagcaacaagcacctgcattgagtaatgcaagagtgagatgaaacatctcagcaagctaattgttttgacgagatattt

SEQ ID NO: 12523 - DNA, 2489 bp, Zea Mays
gcaataactttctgttctgatgtccgattgaggtgttcttcgtggccacggaaagatctacaaattatctacgactcatatatagactttttatttttttgaggccactaagaccacggaaaactgacatgaacagaaactgtcgaatctgccattctgcagaaattaaattcgagatcaaaacctaaccccacatctaatccaacctctaatccttcaatccacatgatccacaacctccaaaagcatataattatagggaggaacaaggatcctatccttacctagggtttccccaagaaaatctgcaagagatgggggtagaacatctccttgatcctctcttcctcttcaatccatcttgctcctcctcttctcgatccgtgctgcgtgggggagatctagagggaggaggaagtagtggagggtggctgcaaggggaagggggaggggcggccaagggtggggaaaagggggggttggcggccaagaaaagggaaaaataggagggcgaccactagggttttgtgggagaaagaaacgacgcctcagatgtctcttgactttgcatccaacggcccacaactctttccccacatccacgcaccgaagataaacctttggcaactttttttgggatattatactctaccccccttaaaaagaattcgtcctcgaattcgaccactccaagcaaaacacccaaggtaccccatatagcaccaccattcgaaacatgggtccattattggtcttaattaacacaagaacttctaccttggactaattgtctaaggaaactacacaacctgacatcaagcatgaaccaacatttaatgaagctcaaaccaagtcatagatgcaatcaacactacgatttcacaacatcgaatttggatgcagccatacatcagcatcaatgtcttaaaacgacactcttttatgaaggggtaatatgcactaagcacaacctttaccaacttcaacaattcattttaattcaatggtgaaacatccacaccagatgaatgtataagaagatcaaacacctcacatcacagcacgacgaaacaagtagttctattgaaacaaaactcctaatcttcctaaaccttgttcttgccataatgaaaagataatcatgtaatctaacatactttgcaccccaccaaaagggagaaaatctatagaactaatggagcaataaagccgacaagaagccaataaaatcttgcgcggcacagttcatcgaagaaatgtcaaaaactctacatagagcactgacagcccaacaacaacacaatacttgcttaacccatgtcactatacttcattcagcatctcaactaagaaaaatatccaactactaaagttaacctacacataatatgagtcttcatctattgtagttcagaaacttacatttcattctatcatatgatgcactcagagtaccagacataaagggccaatactaaccccgtaacccttcacacatttggcaaacatcccaagctgatgtaaaaaccacatcatttaggaataggtgaataaccacacacaaccaactctaggctaggcaatgacttcattcaaaccaatagataagtggtccaacaatggctccacaaacatgcatcgggaagagaaccatcaaatcctcaacgtattaatacataatcaatggatcaagaaaaatcaaagatttattctacaattatcatgactaacatgcaaccactttaaaccacatctaggctttgtggctactaaaacacacgatagaagagagacatgtaagccattctggctatgtaaagacttcccccaaaatccatatacaagtaccaatattcatttctttcagaactggtttctcaacataaacaaccattctttgcaaagatagttggagctatccaccaaccgctcaacaacttaaattcaaattgatgattaccttgtaccccaaaacacgcaactcacactcctcttagaaacatcctcagtcaagcatatataacaatattattgtaataaaactcaaccatgaaaaacatagtgaaaacaacataggcatacttgtatatcacaagcataataacaacttcattctcacaaatgaccagcgatatctaccacattaataaacaatatcaaaatttcagaaataaattatatcaagcattaagccataaacaacttaccacatcaccgtaaaggaatcgggaggggtgaaattattgtcatctgcacttcaaagtcactaatatatatcaaagatacttgaacccatgcccttcctatatgtgcaagtgtgtcaaatttatcttcaaattgctaagaatctaaagcctaagctttgataccaactgtaacaccccgggatccacaaacaccccagaatgctactaaattacacatctaacattcatatataaaatttcgacagtgacttctttgaaaattgcataaacggggaagcaacg

SEQ ID NO: 12524 - DNA, 1852 bp, Zea Mays
gcgcacgactagttaaaaacaaacatcctttgacaagaagtttctaattaaatcatgactgcgcctgggcagcgttattatgagagtgaaggtgtatgtgctgctccttcccactccccttgatgagcaacaagcacctgcattgagtaatgcaagagtgagatgaaacatctcagcaagctaattgttttgacgagatatttaaaccacattgaattaatcaacattttaaaagaatcacaatcaagatcagaaatacttgtagatatagaactcagtagtcacaatataaccaataccatctcatttcctcgaacaaccacaataggttgtataacatttccctgcatcaacaatacctgcaaatatcacttcaatgtatgcataggaatgcaatgtgtaggtcctctatcttcatacctctgagggtataaaaccacatcatctgcaaatatcacttcaatgtatgcatatgaatgcaatgcatatgtcctctgccttcatacctctaagggtatgaagccgcatcgtacccctcctcgggcaacgtacgatgctaagttgtaccggtacggtcggaccataggtcacgacaaaacttcagatgcaaatgagtcatgcaatgtatatggcatgctgcatttatcaataaatttcacttcctttagatacaatacaaacctcaaataatactttatctgccttcagatacaatgcaatcctcaaataatacttcgtatgcctttagatacaatgcaaacctcaaataagacttcatctgccttcaggggtgtgaattaatctcatgggtcatacttgaaccataataatcatcaatatatgatagagcatcaacataatacaatgaagtaaaacatcatcatagagttcaattatgaaagaatccaataattctgcatattagagtgtaggtgatagaaataacaggtcaaaatgatagcaaccaccgctacattcacttgccttcatcgaagaagaaaaatgtactaggcatgatctagagtgtagccacctgctagcgggcataaaacttagtacaaatatttcacaaacatttgccaacaatcaacaaaacactcctacacttgaaaccaaaacctagtggaaagactcccaccctgaaccacatgctatacagcagcagcgctgtttgttaattttgtatctttaaaattaaaacattggtgatatcaaacaaatactctaagagtatctacacaaaacaatctacaactttggtattcaatggataattaaattctgccatcaatatattctaaaacatctgacaagataactgactgaatctgttttagacagcagcctagttaacttcaaaattcgatatctcccaaactactgaaccaaaaattatgaaattctgctggcagtaagaacttttatccctctacaaaagtctccacagttggaagagtcaattcggccatttactagatgaaacccaccagtgaacagacccgctcatttttgtcaggcaaacaggaacagccacagtaaaacaaacataactggagtttgataaatcatatgaatacactctttaacaatctgtaaagcttatgaaattatctacaacttcttttaccaacccacagtttaattctgttgataaaattgcctaactcttaagataacagattctgcacagaattatgagactgaaaaactgctataatcaaactgcaataactttctgttctgatgtccgattgaggtgttcttcgtggccacggaaagatctacaaattatctacgactcatatatagactttttatttttttgaggccactaagaccacggaaaactgac

SEQ ID NO: 12525 - DNA, 368 bp, Zea Mays
cttcaatccacatgatccacaacctccaaaagcatataattatagggaggaacaaggatcctatccttacctagggtttccccaagaaaatctgcaagagatgggggtagaacatctccttgatcctctcttcctcttcaatccatcttgctcctcctcttctcgatccttgctgcgtggggggagatctagagggaggagtaagtagtggagggtggctgcaaggggaagggggaggggcggccaagggtggggaaaagggggggttggcggccaagaaaagggaaaaataggggggcgaccactagggttttgtgggagaaagaaacgacgcctcagatgtctcttgactttgcatccaacggccc

SEQ ID NO: 12526 - DNA, 411 bp, Zea Mays
gttgctgttttctactacttgccacccccaaacgtatggacaaacagaggttgtgaatcgcacattgtctacagtgttgcgagcgatattgaagcacaaattgaagatgtgggaagagtgtctgccacatgtggagttctcgtataataaggcggaacactccaccaccaaggtaagtcctttttaggtagtgtatggctttaaccctcgtgtgcctattgatcttttgcctctacctactatggagtgtgtacatagtgatgcaaaggagcgtgctgattttattttgaaattgcatgcttcaactaaagagaacatagaaaagatgaccgagaaatataaacttgctggtagtcatggtagaaaggtagtaaaacttgaaccgggtaatttagtgtggttacatttacg

SEQ ID NO: 12527 - DNA, 484 bp, Zea Mays
cttaggaatgaaggagaggaccagctaggacgtctggatcaagatggaggcccaaacctattcaagttcatttcagtttcggattccaggaacaacctgtaataaaatgggcgcccaagtcgcatacggggtcggatttggaagttctttatatggatggaaagataattttgaggagcttccaatgacactggtttcaggtccaaattcatccagaatccacgggaattgtctaaacaagttgacattcagaatatgttccggcgctgcgacgccgtcttttggccttttggcctgtgtatcttcgttgagcccattaggggcgcatctagggttttgcataaccctagagtctttattaatagccgccacattcttgttagaggcaggtttttgcttaagttagatctgtcaagaacagttcgccgtagatcggtttgtgagaccccaactcgagagcttaatcatccatccacaattttcc

SEQ ID NO: 12528 - DNA, 1580 bp, Zea Mays
gccaaatatcattaataaaatcgttattacagaccacattaacatggtaagaagaatgattgttcaaaacagaaaggcggaacaaaccgcctgactcatatgactttccaacaaaaagtaccaaacttagataggaccactttattagactcaaacactaatttgagaccctgtcgaagcaacagcgacacagatatgaggttccggctcatcgagggcacatagagcacgtccttcagcacgagcgtcttccctgaagttaacttcaggtagacctgtccagtacctcgaactgctgcctgaacaccatttcccatcaagaccggtgcgctgttgtatcactggaaagaagagaacatggatcgatcagcacaaatatgaacagtggcacctgaatccatccaccagtcatctcatggacttgccataaaggcctgagtgcatacctggggtggagttaaccaccacgttctcttctttgcactgaggtggaggaccttttcccttccttagtttgcacctccgagctgtatgcccggagacaccacaaacgtagtagataaagtcctccttcttcatcatctttttggacttaggttgttttagattcttctgtggagagttcttcttcttctggaattttctatctccgcccttctcaacaatgtgagcttggagttgctgggatgacttgttactggcccttgcacgctcttccacatttatagcagcagacaactaagtgagagtcatttgtttcttcatgtggcgacgtgaagtcacaaagtctcgccaaaaaggcgggagatttgctagtattgcactcacctgaaaactttctggtagggtgcaaccatattggaccaagtccctaacaaggagttgaatctcctatagttgctccataacaaaccttccctcagccattttatagttgaggtagttttccgttgtgaatgattcattgccattgtcaacttcagagaactcattatcaagttcagtccaaagacccttagcggaggtaaaactagagtacacgtcaaataagcggttcgacaagacgttcagcagacgagacatgcatgcctcattggctttgtcccacttggccttcttcgctagtctggcagcctttgctgcaacatcagcatcatctgatgctgcctcgggaacatccgacatcattacccaaaatagttttaggtcagtgagccacatacgagtcttaatatgccagcgcttaaagcttgcgccgtcgaacgtttcaggcttaatgaaatcagaactagaggccattgtacgaattggttttctagattgttgaagttttatagaaataagtgacatgcttctaacatatttaaatatattaaatattctaattccgaataaaacatgcatataactcagataaatgtcatacgtaaatataacagtaatgaacagtagcaattttagggcatgaaaacatgtaaaatagctactcaggtttatttcaacaataaacatgtctagtagatgaagaaggcagattatgcacataaacattaaagtttatcctttgatattgctctcaa

SEQ ID NO: 12529 - DNA, 1163 bp, Zea Mays
ggacgatgcggcaaaattattggaacggtggagtcttggatgtggttgttgtcgagacgattgacgactggttcgagctttttgtcgcgcactcggtgaatattactcggctagcttcgtcttcacccgacgcacagaacgacgacgggattatgtctggagcgagctggcggggtggggttgagcaggggatgacagaagggagggcgacataagagcgagctggatatcgacggtgaattcgcgaagatggggatccggtcgagctcgtgtaggtagaggtggtgtccgggcctatacgtgatgacggtcagcacaggcaaggtgcggcatctagcgaccagagccaggatacgacatccacgggctagagcagattgtgcctaacgatggacggcgcgagggcgaggcgactgaacgacgacgacaagacaaagaaaaccggacgcgtcgtggatgaacagggagctgagtattgagaggtcctggccgacggccagaccgaggcgatggcgcgacagcacaacgaacgacgcgagcttcgggagaccgagcgatagagcggagctcgcagctgcgcgcaggaagcagaacgcgcgcaggggcagtagggaaatccgggcgccatggggagcttggataagctatagcgaatcgagcagaggaccacggcgagggagctcggggaaaatccgcggcgcgtgcgcagggacaagcaggagatcgacggtgttggggtttgggaaggtcgagcagagagagagaggaagttgccggcctgccgcgagggagcagagagcagggaagtccggcgcggtggaggagagaggagcgctacgctgggagcaggagcctcggcgagcagggagaagaaggctgggcgagctgtagataggagcggccatggcaggaagggggaagagcgcgcgcgcacggagctaagctcgacaggacgcggctgggaaggggaatagatggccgggcgaccgagcgccatcctaggcgaggagccgggataccgcgacagaggagggtgccatggtcgaacctgggcagggcgctggaggagatgggcacacgacgcgcagggaaggaactcagggagaggaagaggagcgccaggagcagacgcggctgggaagaagctgcgcgcgcattaaaaa

SEQ ID NO: 12530 - DNA, 343 bp, Zea Mays
tatcatacaggtacagacagttgcttcggctctaatgacaaggcttcgtcgagaggaaaaagaaggcgaagaactggagcgaaggttatcagtactctgtcgaagagtattggtttcccgaaggttgaggccgatatcagccgctaccgacgacagcatatcgtcggtagtttattctattctaatttaaaggtaaaaacttttcttcggcttttcattgttttaacgacgaaggtgttttccgacgaaggttgtttttgcacagagtatgcttttaagtaaggctttaaggatgcaacaggaccttgaagataaaaaacatgagattataattgaaggttta

SEQ ID NO: 12531 - DNA, 186 bp, Zea Mays
cggcgagctccaatccagcacgcacgagactggtgaccactacacaacacgcaggaggcgacggacggatttttttttttttagcggaagagaacattcggctcttgtacagaaaaggtggatgagtagataccgattttccagtacaaaatcgtactactaccacgattctttcgaaaagctggg

SEQ ID NO: 12532 - DNA, 375 bp, Zea Mays
cgacctttggtgcaggatcaagcacgtagccggagtaggggtggtgcgccatggagcggagggctgtagggccttagcagcttagggcacgtgttgggctgtagtggcatgggccaggaaagagtagtccgatgtctgtattccttattttctttttttttctgtttgtcttccttgttttttttttctgtttcttatacttttatatttattaaacacatacgtttaatctacgtttgctctgtctaactgttgggcgaaggcattgtatggtgttgaaagtattgatggaacttttcctttttgtcttatggagcatggtaagataatttacacatgaatccaactatactatctaatgagaatacattccag

SEQ ID NO: 12533 - DNA, 355 bp, Zea Mays
agggtatgcgcgagatagaggttgcgagttcgaatctcaccattcacaaaacatataactttgattcaaaataatagtaaaaattgatagggtaataggtagggttgtggagagttgttcctaaaattgatagggtaataatgttttgctgttttttttattttttttattcttaatttgccgagtgcttttcggtagggttggagagttgttcctatactttaaaaaaatgttttgctgtttttttattttttcgattattaatttgccgagtgcttttcgacactcggcaaagactttgccgagtgtccgaaaaaagtactcggcaaagaaccctttggcgataaaatatttg

SEQ ID NO: 12534 - DNA, 1178 bp, Zea Mays
ctccgtcgcaggctggtagcggttttggcctgcatgtttggggggaagaagcggttgcttcacctccgggctcttcgttgcctcattccgcgttttggagcggtttttctgtgcttttgtttaatttcctgtcgactagacggttcctttgttttgggtggagtgaatttaccgtgcaattcaactgttctttgcgctgaagaactgtaaacacccccccccccccccccccctctttgaaataataagcgttcaggggaggaaatttcccccaggagcaatcgggcggtttgtgccgtgctgtgctcatgccatggcattattctcgcaatgaagcaatggagaggcgtgtcctttttggccatttctgaccctgtgagctcatgcaaaagagcaagacaagatcggggcgagaaaatgtgtgcttgccactacctttattgttgatgtgcatatgttccttccctcctgagtcctgactcctgtcatggtcattgcgtaagtgcatcctgttgtttaataataccctttgctcctcactgttgtatgatgcctacctgattgtgacggtgatatttcggttaggtgtcacttggagtggggacttaggccctgtttgtttcctcctaggattatataatccagcttattaattacataagcaccttatgatctacttatggattatcataacctatgcatatagattatataatccatctaataatctatgttgtttgtttgccttttaacttatttaagctgtattatataatctagagggtaaacaaacagggccttaatcactagagacatcgacaagcagtctctttgaaaattattcagtttctgggtggaattctgatgttggacatttagaacacaaggagatatcagttttagtgcacccgcattccgagacagtgacaaaggggtttgtttgaaaattattcaggttttgggtgggattctggtgtgtgttgagggattaaagaggatatcatttctttctgcaacttaggccctgtttggaaacacctagtttttaagaaactgttttatagaaattgaggtcgttccaaacatactagtttatgactcagtttatagaaattagatgctcagtttttttaaaaaaccaataagctggcctcttctagcttaaagataaaaactgg

SEQ ID NO: 12535 - DNA, 461 bp, Zea Mays
ggctgctagagagtaccctccaaaaagaatatgattatttttcgtagctaggcaaccaccatagaaaataaacatatttttggcagctactctctagccgccgaaaataatatacttatttttgggcaactactatagagctacaaaatattaatgtgacttcctaaagttccttgatttactgtagtgacttcatattacttatgagaaactaaacttcactcaatgatttaggtgggagttatggtcatgcacttagccatattggttgaaatcctcattaactcaaatttgggtcgcaattttcatcttattgaatattgcaaaaccatgtaattctttcttgattgcttttatttctctacatagccattatagtttgtcgatagcaacaacaaaaaatttcatgctaggatggtaaattaattctaataatagactaacaggaaagcacattgtca

SEQ ID NO: 12536 - DNA, 766 bp, Zea Mays
attcaagccattcaacaacctacaaatcaatatgacaaaatacattgatatacaaaacactaattgttattttattcttttgttagcattactaaagtgaatgtttacataccttaatagatgtgagtgagagaaacaatggagaagagatctagatgattcaatgtgatagataaggatttcttatgtgtacaaaatggggtgcacaaaaaaacacatctcagtgagggtcaattgttgggtggatctagattaatttgaactgatattttatttagggatatagatttgacaggtgagagaacaatagtttctacaaattgacaaggtaatgaaaggtgtactcactcatgcagatttccatgcagatcctaacattgcaagaagaatatgtacaagtatgctacaaacaaaaaggagtgacacaaaaagagaacaactttaggtttagtcctttattttactgttgcactgaaagtttacccgaacagcaaatatataccttcttttgaaggtagtcacattgacttttccactgcaatgataactctagattggggaataatggtttacgggtcatcagaagataatgatgatgtcagcttctccaaaactgttgctctacttttagttattggtgatacacacgaaacaacaccagtgatgcaatttatattacagtaaaatactactgaaaattcttgagttatgttcaaactacattatgaacatttgatgtaatcatgcaaaagtacatactaccaac

SEQ ID NO: 12537 - DNA, 57 bp, Zea Mays
tccactggtactcctagtcgatcaacttttgccaaggttatctggaagtggatgcat

SEQ ID NO: 12538 - DNA, 195 bp, Zea Mays
gacgatttccgggtagtgaagaagtttctgcgcgtggcgccatcacggttctcacagattgtggtgtccatcgagatgttcgtcgacctcaagaccctgacagttgaagagctggtcggtcggttgagggcggtggaagagcgttttgatgacaagatcgatcagatcgtggacaaggcagggcggctgctgctg

SEQ ID NO: 12539 - DNA, 637 bp, Zea Mays
cggaggcgaacgtggtcatcggcggcggtgaccactctggcgctttgatggtggcaacatgcgacatcgaagaggagccgtcccaggttcatctcactgagaaggtaacacctgtacttgttcctgatggcgtgtgggttttggataccggcgctagtaatcatatgacagggaacagatcagtactgtcacagctgaatgagggtgttaaaggctcagtaaggtttggggatggctctaaggttagaatccaaggcatgggttcagtggtgattcaagatcgccaaaagggtcacaaggtcctcactgatgtgtatttcatccctgaactgaaaagtaacattgttattttgggacagctggaagaaaaggggttcaaatatgttggggagaatgggagattgtgtgtgtatgatcaggagaaaacactgctaatctctgcacctagagttgggaacagattgtacctagctaagtttgggttagactcaccagtttgcctgcaagctcaagtggatgatgtttcctggaggtggcatgctagatttgggcatttgcatttcaaagccctgagtgatctaaaatccaaaaacatggtcactggtttgccaacagtaacaagggtagagaaagtgtg

SEQ ID NO: 12540 - DNA, 1781 bp, Zea Mays
atgtgaagttggttggacctggtctgacaaagctatctgacagatcagccaagatgattttcatcggctatgaaagtggaaccaagggctatagattttttaatcctgctactggcaagctagtggttgggagagatgccatatttgatgaaaatgtgtcatgggactgggccaatgcagcaggcaacacagatcagctgtcaggagagtttattgttaattatgaagattctgacagtaactctacaataggagaccctgaacccacagaatagtcagctgaagatgcagtttcagaagatcaagggggtgctgctgattatgatcaagctgcacctggcacacctgtcacaccacagtcgagtgttgcacaagggcatgtttttgtcacaccaccgagccaggattcagctttttctgatcaagggccgcatagatacaggctaatgtcagaactgttggatacaactgatgaagtgcaggactatgagtatagtggtatgtgtttactggcagcagatgaacctgctagtgttgaagcagctcttgaagaaggttgttggagggatgcaatgatagctgaactgaagtctatagaacagaacaagacttgggcttatgctgatttgcccaaggatcataaggctataggccttaaatgggtgtttaaggtgaagaaagatccatctggcaagattgtcaaacacaaggctagattggtggtgaaaggatatgctcaagttcagggagtagactatgatgaggtgtttgctccagttgcaaggatggaaacagttaggctgttgttggctcttgcagcacagggtgaatggcaggtacatcatatggatgtaaagtcagctttcttgaatggcaatctggaagaagaggtgtatgttcacccaccgcctggattctctgatcccaaacattcagggaaggttctgagactcaagaaagcattgtatggcctcaaacagcccccccgagcctggaatgcaagacttgatcaagagttgaagtttttgggtttcaataggagtgttgaagagcatgctgtgtacagaagaggtacaggcaactctctgatcctagttggagtctatgttgatgacctgatcatctgtgggccagacagcaagaacattgttgaatttaagcagcagatgaagaaaagttttgacatgagtgaccttgggctgttgacctactatttgggtctagaggtgaaacagaagccaggggaaatcactgtgtgtcagagtgcttatgctgaaaagattgttgagatctcaggaatgaaaggttgtaaccctgctgacacaccaatggaacagcatatcaagctgttgccgggcaagccagagctggtagctaatgcaacaaagtacaggagcctagttgggagcttgagatatctggtgaactcaaggcctgatctagcttattttgtgggcataattagcagattcatggagacaccgaactctgaacattggggggcaatgaagagaatcattagatatgttgcaggtaccaccaagcttggttgcaagtatgtcaaaggagcactttcagacttggttgggttcactgacagtgatcacgcaggtgatctggagaagaggaagagtacatcaggggtgttgttcttctatggtggcaatgcagtttcttggagttcacagaagcaaaaggtggtgtctttatcatcttgtgaatctgagtacatagctgcagctacaggagcctatcagggagtgtggcttagcagattggtg

SEQ ID NO: 12541 - DNA, 360 bp, Zea Mays
gaaaaagtaccattgagcgagtctagcgtctgtcttttgccaacgatatttgcccaagacttgatatatggagctagaaaagtcagaagatatgcatatggctatcttcctatctagaaaaattagcgctagacttgtagaagcagtgccagcacatgcatgcatctagatgtgctgaacaaaaaaaaaaaaaaatccaagttgacaaggacaacacaacacattattggtcagcaaagcaaagatagatagatatacagcatgcattgcatgaaaacgattgttctacgaccgaatctgagatagccttcaatttccgcactgtcgtccaaactgtgcttcctgaattttttctatctt

SEQ ID NO: 12542 - DNA, 4151 bp, Zea Mays
tgcttctacttccgctctcgctgctgccagttccgctgccgctagccgtgctgccctcgccactgctgctgctcgctctcgttcttgtgccgcggcgacctcggcttcctgctggcgccgcgcactcgaagtgaccgagcgtagggacatggtgagctagtgaggggtcgctgcgtgtggaagaggctgtctcagacgaaaggttgctcgtctgaacaggagaggaaggaacagttggagctcttgctgctgactgagtgtggggagaggcgcgggaaggagataagcaagagatgtttaggctacaggatagtttggctttgataccaattgtaagtagagggactctaactctcatcaagaggatgacactatgagttggggcaattttctgtttatttcctcaaacactacacaatgccatacccttagaggggttggggacacatatttatagccctaggggctgcactacacactacacaccgcagcacacagatgctgtcctctagatactaaagtgctaaagtgtgcagtcaaaaactgcaactgccagctactgctaaagtgcagtcaaaaactgcaactgccatctactgctacaacagtcaaaaggtgctgctgtgctgcagcagtcaaaaggtgactgactgtctccaactgcactcaaccgcactgctgctgtgctgcagcagtcaaaaggtgactgtctccaactgcactgctgctgtgctgcagcagtcaaaaggtgttgttgtgctgcagtcctgtactgctgtgctgctgtcctgttcaccacaaaacagagaccacatgacttattctatcattcgacgactctctcctcatcgtaggtgtcgtcgccgaacttcaccatcttctgcaacagagtgttgaggcgaagagcaaagtcatcaacatcctcacctggcttgaaggccaggttctcccactccttgcgaagtgtctgcagcgtggtcttgcgggcacggtcgctagcgatgcgggtcgcagcgatggcgtcccaggcttccttggcagtccgcttctgggaaagcgaaaattgcatctcgggcgggactgcagcaatgagggcatctagctcgggcgggactgcagcaatgaggtcgcgttcttgtgccgcggcgacctcggcctcctgctggcgccgcgcactcgaagcgaccaagcgtagggacatggtgggctagtgaggggtcgctgcatgtggaaaagcctgtctgagatgaaaggctgctcgtctgagcaggagaggaaggaacaattggagctcttgctgcagactgagtgtggagagaggcgcgggaaggagatgagcaagaggtgtttaggctgcaagatagtttgactttgataccaattgtaagtagagggactctaactctcattcagaggatgacactacgagttggggcaattttcgtttatttctcacactctactcaaatgtcatacccatctaagggttggagacacatatttatagccctagaggctgcactaccacactacacaacacactacacaacaagattgtcctctagatgctaaaagctaaaagagactaaagaggacaatcaaaaagctcctgctgttctctagatgctaaagagactaaagaggacagtcaaaaagctcctgctatcctctagatgctaaagagactaaagaggatagtcaaaaagcttatgttgtcctctagatgctcaagacttattccatcaggcacaacgaggcgggtgacgaagctctatgagcaattggcgcagccatgtagcttcaccaatgccactaaccacaactcgatatttagctttggttaaaaaatttagggcaaaaggagccatgagtgtggtagacatgtcagataaaggaaagaaagattcataaaaaacaacatgtatagaaacgatgatgtagatcgactgaagctcgagacaccgatagcatttgtgttgagaggaatagccgagaaagacgcataggcggggcgagtttctgaggcgttgtggaggatatgttgggataacaagtgcacccaaaaactcgaagatgaccataggagggttgggtgttgtagagggaggtatgtggtgtcgagaaggcgtgtgttttagtggggagccgattcacaagatatgtcacagtgtgaagggcatcaacccattagaccggagggagacttgcctaaaacaagaggggacacaaaatgttattgatggtgcgaagggaacattctgctttgccattttgttgagaagtatatggacacaatatgtggagtgtaataccatgggagagaaaatttgtgtgggcctaacaattatcaaattcatgaccattatcgcactagacgctctttatcgtggtgcccaattgtgtgcgaatataaaaaaatagaaagagtggaaaatgtctctgattctaaacggagtggaaacgtccaaatgttgtgtgaacaatcatcaacaataaaaaggtaatatttttatctagatacactaacaatgggagatgtccaaggatcacggtggattaaatcgaacttatgaatacctcaaaagctagatgaaccgaaaggtaaacatatatggcgaccgagttggcatgcatgacatatatggttgatatcatatttatgacaagaaatgacactgaaacttaggagcttggacaaagcttcacgaccaagatgcccgagacgatgatgccaaagggaggtgagtgcagagatgaatgcggaggcgctagtgggtggtagatagaatgggtagaggtcacccaggctattacacctgacgatcacatgcctagtatgcaagtccttcacagaatggccaatagtatcaaactcaatgaagcaattactatcgatggcgaaacgatgaattgaaatcagattcttagtaatgttgggagacaccaaaacattgttaagaacaagattgtgatgtggtaaagtaaaagtgtgtgatctagtagtagtgataggaagacaaacaccattgaccacattgatagatggaggagtgaatcaagatggtggcgaaatagtggagattttaccagtgtttgttgtcatgtaggaacttgcaccggaatcagcataccactcggaggaagaagctagcgagtttagagtcatggtgttgaaagagtgcatgagggactcctaatgccatgatccaccgtgagtagggttctagggcgcagctggaaggatctggtagcctagtgagggtgcctagaagcccaaagatgtacctccctcgtcatacacgatgtactaaggaggttgagggttttaggtgctgccatatgtgcaggaacaccaccaaaattaccatgcatgggcacagctgaatgcaggtggaggcgatggaggaccccaaactggccatagggccgcattcgcactatgccataccactggtgctagaaggatggccggacgctggggatagcactgtcatggccatgatgacggttggtgagctggccaccactaggagcaagagggcgtgtagtaggaggcactagcgaggaatcaactagacaaggtgccacaacaacgagtgcggacgacatggatggtggacgggcatcgatgaggtgtgtctaggcatgcacgaatgtcagcaaaggctggtgtagcttgaggatggacaccatgtggctgaggccacgaaggagcatgagcaccatctattgatccttgatggggtctctgaattcggcgagggaggcaaccatcaatttgagacggcggtagtagtcgatgatgcttagagaatcttgtcaaaggttccagaactacttctttaggaggagtgcatgggactcatttgggtagcaccaaccccgtgagcaggacgttgccacatcatcatgaacttctggaggtcgcttgagacagtgtcgtagatccatgtcactatgtagttgtccgcctgtacccatgttggacacgaggggaaagcctcatcctaaaaaatgtggcgagttagggcatattttcctagagcaataaggaacatgccatgccacttagtgtagttgatcacatcctgatcgagggtgacgaggatgagggccttcacatgatgacgatagtgcctgcacccagagtg

SEQ ID NO: 12543 - DNA, 275 bp, Zea Mays
atggcgatctgatcggcgatgagcgctggttgcaaaagagtagcggattggaacatcgattgatatcatgtgagagttgagggaataattgattgtattacatatgttgtacagaggtacatataggcactaggatggcatgcaaccaatcacacaagtaagattacaaccacaattaaggggttactactataaatacaatatgtgctaacaatttttgtaaatgaaacggtgggagatctgcatgttatattaaaaagagaggtgcacataag

SEQ ID NO: 12544 - DNA, 913 bp, Zea Mays
ggaagtattaattctcaattgtctaatattgtggatgatcataatttggtaatgatatatgtggttgattcccattttggatgaagttgaagtattttttttgaatcacgttatatgaagtgttgtaagcatgacatgctcatcgcatcatccatcttgcattttgaagttatgtcgtgatcttatggtccgaccgtaccggtacatttttagcatcgtacgttgcccgaggaggggtacgatgcggcttcatatccttagaggtatgaaggcagaagtcatccttgcatttgcagacatttgcactcatgaggtatatatgaagtgtgacattactatgttactattgtggtttctacctgcgaggtgtgatgactaggtgtgttgtacgttgtacacgtgctgcaccttcgtaataagaatgttgtggaatcaagtggtggtaaaacaatgttcttatgtggttaaacagtttgatattattttacttgctgagatgtgtcatctcactcttgcattactcaatgcaggtacttgatacatgttgggaatgaggggagtagcagcacgtccactttcactctcacaataacgctgcccaggcgcagccatgatttaattagaaacttattgtcaaaggaagtttatttttttaactagtcgtgcgcactagttaattcacttcatgtcgtatgtttaacttatctttgctagccgattaataatacttagtatgtttttgtcatgatatatgtttatacactgttgccccctcatttatgcaattttgcaagggggatgctgccaaaattttatatatagatgtcagaagtgttgtttagtagcattccggggtgttggtggaccccggggtgttacactatcagtggccatatcctgtaggctacatgtt

SEQ ID NO: 12545 - DNA, 582 bp, Zea Mays
agacaacatatataataacagagtgtatagagataaatgtcataaaacatcagagtatttattacatagcggaagacttattacaaaataaaagtgtaaacataaaacgaactaaggatcgttggcgccaatgtcgactgagaaacgccacctagatcagatcgaactcctcggtgttaggcggctcctcctgaaccacctgatcttctcctgtggggggggtgtgagacagcaagggtgagctcacacatgatcatagctcaacaagttgtggggaaccagtggacacaaactcacaaaggtgtgagttcatgtgatgtgtaaggctaatcaatgataggggttaaagctgagcattgcttttaagtagttggtcaaaattttattagcagttactaagtgtaagtaaataccaaaccataataaaataatagagaacaaaattaataataaacccatgcaaatgcaaatgacaaattgagtttaggttccataatttaatcatcagagagtcctgagccgctcatgaccgtgagctcggctggtataccagttttacactctgcagaggttgtacccttt

SEQ ID NO: 12546 - DNA, 166 bp, Zea Mays
catactagtatttttaaattgtacattcaatccatgtacaaaattcacaacaaagttggattcaaatttgagatttaaaaataaaaagaaaagaaaacaggaaagaaaacgaaaaagaaaagaaaaagaaaaaatccgcgcctgggctcaaaaccatagcctcgac

SEQ ID NO: 12547 - DNA, 697 bp, Zea Mays
ccacctgggaacttcggccccatgaccgcggatggttgcgctgggttagctataattgttgacccccttgggaggccccacccatctacccgaccacagaagtcgtcggtgcaccaccttgaacctagagctctgtcaccaaggaccgcagggagaagagaatccgctcactgctgcagtgctcgggttgtgtcggcgttcgggcaattgcacaaggcgggggagcttaaccatggttcgtgggaccttgtggtggcggcgttgggctcggggcgtcactggtgccagctcaattgctccctggagacacctcaccaccgcggatccacgcatctctatgggcagggcacaacaccatgtgattcacggtatggactcctcccccgtgctcgcgttcatctatattgtgtgtagcatcgtctgaagcatagttgtggggtacctgggttgttggtggctcttgccggcgatggccgctgctggggagagtctggtgccgttgtccgccaccgtcgggggagagggagatgtctgggtcactcgatttagatgaaatggccaggattagcgatatgatatcgattgggggcggtttggcctaaaccgtttgacgaagatcggacgcataaatgtgcgcctcggtcactttaaatcctgaccgttggggtaatccgagggatggcactgcataccgttt

SEQ ID NO: 12548 - DNA, 290 bp, Zea Mays
cttttgtgagctcactcttccgatatatataccgccccccacaggagaagaataggtggtccaggaggaggtctacaatgaggagtacgagcttatctagctagcgtctcccagttagctttatggcgtcaaggaataatatttagttcgttttatggttatcatttgtttttgtaagatacttccgctatgtaataatgattgtgacatttatctctatacactttgtcgttatatgtgatattcttctttggtgcacatatgagacgcacctgggtttacccattaaa

SEQ ID NO: 12549 - DNA, 136 bp, Zea Mays
gggggccttcatcttccgaaggtcctcaaaaacacgattaacaatgtttcccaagtataatatatgtacaggaaccttcggactcgtagtgaagctatacacaatatgaaaagtgtggtcgggatgaaggttgaac

SEQ ID NO: 12550 - DNA, 1791 bp, Zea Mays
agtccctagaaaccaaacaccctctaaggctattcacatagtatcacacctatttaatatcttttgtgtacgatgaaaagttaatatggtatgtgagtaaaaaagaaagaggaaaaaatagtattttcaaagagatactatttaggtacgagatcatatccattaatttttaatcatctaagtgatccacaatttatactcttgtacatatgtaacgtttaattgttttgtgaaaaaaatataaaataacatatgatattacacattggaataactatatcttctagaataatatacattttgatgcccgtttggacagaggggctaagttttaatcctatcacgtcagatgtttgaataatagttagagatattaaatatagtatagttacaaaactaattacgcatataatgacatataatgtctaaacggtaaaaacgagtctattaagtttaattagttcttgattcgatcgtatagtctaattataaaaactaattatgcaaataatgattaaacggtaagacgagactactaagtctaattagttcatgattaaatcgtgtcatgctacagtaaatatttgctaatcatgtattaattaagctcaataactttgtctcatcgtttaatatttatctatgtagttggttttgtaattcgattgtacttaatactcataattgatattcaaacatctaatgatacgtggactaaactttagttaaagcaagtttaataatacagcgaactgtcggctataaggacctttgcagcctacatatcatcccacttgtatactacatgacccccactttcttgtttttttgtctaaaccggctataaatttatagtccgcttctcctctctttcctcatttctctcctccacataagtatctaacctacttaacgagcaagtttaataatatagcctacaacgagttatataatgttgccatgtcacatatggccaattaaaagtctactcatataataactctcgtacaatacaagttacacatttaatatttggtccacctctctctcatatagagagccttggagtccgcgtgcaaccgacacttaggctatttccagtagcttactactctcatatctatattcaaactccactctgctacaatgcaaaacagtaccaaccaatgttttgggtaactatatgggtgaactgctaaacacggtcttagctagctaccaatgagcatcttacttttattatatcatcgtttatctttttccacgtcgccataaatttgatgtggtatgtactgtaacccgtctacatcatttattaggattgctcaggtctgtttgtttagaattataataaaattagattatataatctaacttattttaaactggatctgacttatttgaaaataatacttagtttaaaataaattagattatataatctaaatagattataatatcaaacaaagaggctagggaaaaaaggagccaaaagtgagggagccatatgtgtggtgtcaggcgcgtgctggctgaccacgtggcaaaaaatgggttggagtggcacaggccgaggagccaaagaattgtggtgttatccgctagccgaccccgccgctgctgacgtggcgtgcggccataggctagacagcgtcacactcacacccccgcgtggaccgtagcaaggcccgtgggccccacctacgtctccggttggcagaaaccggtgccctcttcctgccccgttttgacgtttggggatctcgaaacccccgcctcggttcctgtttt

SEQ ID NO: 12551 - DNA, 298 bp, Zea Mays
ctcgcaggtgccgctctagaggcggcggcgcgattccggacgcagcggctgcgagctatggcagcgtgggccaggcggccacgcgcgcaacagccgtggacgccggcgcctcctcgcacatagcagccacggacgcactcggttggggcgttgggccaacgcgagtgtgcaagacgtggattagctagacggtgcaagtacaggctgcagcttccttgatttgcttgcttcggtccattttccttcttttggtggttgccgtaccgaaacacaaacaacagatactgcacgatatttc

SEQ ID NO: 12552 - DNA, 1841 bp, Zea Mays
tctggtattagtctgcccgaggcaaagcttacccatgacgaggcatatgaccagttaaagggtcctcggtcagcaagcctacatcgagacggtacttaatcgactcagacggagacactacaccgagactctcttctcgtgcaagtcacccgcccggtctcagctttatcatttcagcccaaagtttggtacctggcagaggtacatcttttccgatgttgaacccatcatggatccaccatcaagttttattttcgaaaacatcccaacccctttgaagcaccatcctttgtgaaaacaaattattttgtttttctaaagcaaggctaagcataagaaaaaccttttgtgaaacagggatttaagaggtaatcaaatccaaggaaggaaatgcaggaattggtttagcacacaactcctattacctaatgcatcaagtaagtgagaaagattttaaaagcaacaaggaggtggcaaatgcaccggggcttgccttgtgttactggtgaatcaggctctgttccacagatatcaaaataaaagcagttgcctgcctgatgttcctcaggtggtggtgaagtcttcgcttcttcgacttctacttactcttcgttttctaaatatagccatacataataatgaatgcccatgtaatgctcatgagagtgcaaagataataaaagtttattatctaaagtcttgaatacaactttcctttacggatctccgagaacttagtgttttcggagttaatagtgaggttcatagggcaggggatagggttttgggttctaagtatcaaacatggtccaaatcataccaaactttacccaaggcttctaaatattatttagagtttaccctaaaagtttagtaaattttggatttattatttatcctctaaaaatccagaagcaaggtttttggctattttaaatactctataatttcctttttggactaaaaatcatgaaactatttttattaaattctatagtaaattagaagtctagcaaaattggtctggtatttttaggatttttctacaatttcttatagatttccaaagtccaatagaaaaagaaaaaggaacagttctgggctgaatccgacccgaaccggccagctagggcagaagcgcgcccacgcgcgcgcccgcgtgcaaactttgcgaatagaccccctgcgttttgaataactcgatctgagttccctgcactatttctgtgagtcgctgacacttgcagaaaaatccctgcacttccatttcttcacagtttgaagtccccgacggcgaacgtcgcaactagagtttttttttgagtttgtgtcattccctctccaaaggcaatgtttcctgtaaatgtcaatctttttgatgatagaagctggaatcttgagtgtacacataaagaaggttggcaatgctgaaaaaactgagtttaccaactacagtcgtccagctttagataagaatttagaggaacaggttaatctcctttcgattctgtgtatcagtggaagaaaatgctgaagtcttggctttgaaaaacccaaaggtagaccaaggtaggtaaatgacattgatccggtctgacaattgaacgttcttgagagaatctccattttttcagagttaacattaattggatagatgcttgatttgttgtggttcactctgagacctgatgatgctgcaaatgtattgaggatgccttttaggaaaaataaaagatttggacatgcttccattatcaaaagggtgtcatctgcatattggacaataggaaaatcttctcatcgcgctcctcaagcgcttccctagcgtcttcgaggttgtc

SEQ ID NO: 12553 - DNA, 5635 bp, Zea Mays
agcacaacatcttctaacatcttgtctggcggcaagacaagtatggttcatcttgttaaacctgttgcagctcataatttcagtgcctcagcaaaatgaacgcagctttgctgactggtggcgcagaataatgaaaagagtaaggaagcagcagaaaaaaggagcaaattccctcagcattcttgctgcttggtctatctggaagcatcgaaatgactatgttttgaaaggagtttctccttctattaacacaattcgagatgccataaaggatgatcttagtctttggggtttggccagggctaagaggttacgagagcttaatctcgtgcttacttcatcagcaagctaagtctctagattgtgtgtgtgtttttgtttcagttatggatctgctccaacttatgtgtaactgcctcactcatgttctggtcctcatatgagtgatgatcatgtaggggacccatctatttctctctaattttaatgaaacgcagctctcctgcgctttaaaaaaatgtatgtggagaataaattgcatttgactatatctacagcactaatatatcacatatagaaatagaaatggaaaaggaaaagatcagaccataataacaatgcattgcagatacagaaaattaatttaatttgggtcacgttacatatacagaagcagctgcatctagccctatataaattggtgtgaaattgctgtccaaatatactccatcaccgttgacctgacaagccaaagctaagaatggccacaagttcacaatcacacaaagatattatgaaaaatacagaatagcatgccccgtcaagcgtctgctaaactacacgagtttctaaataactagtatatggggcgcgcgcttgagctagtttgtaagtcttttgaatgatagtagatatatttgttgtaataaattgtatcattaacttgtgttaaaagtaatggaagcatcacctgtttgaactatttaaagttggatgtatagttcattttaatcaataatagatatatcaattctaacattctcacatgaaaaaagttgttctaagcaactatggatcattagctgcagcttacatactaaaacaatcataaattgttaaacgatgatgccttaataggaaaaaacatatgataatcagtcgcaaggccttacattctatgcatgccaacacatgtcaaaatggacatcatttttcttacctgtatttctgcctgtagttgttgaacttataggttcttcagaccataacactgagtaaatatgttgttcaacttgtgtaagtgtttgtccagtttgaggatacctgttgaggatacctgcagtgtctggctaaagcaagactaatgttgcattcatttgtgtattcaccgcttactgacacgtgggggaaattgagctccaagcctccaactgagatccctcaatgcaacaaacaaaagttacgggctggaacctgaaaagaagcactacaattgtgttgttgatttgttagacaaagctgttaagtttaggatcataataagtcactaaaccaatagaatttaaataaaccttccctcttctaacttaatttacggagctgaaacggttcgccatatatatgatcagttagatttagaatctgaagtggagctaaactattaactgagtaatctcggaaggagcacttactggaagggagacatttacatcggggccttgctatgatgcaatatccatcagaggagaacataaggtttgttcatcttatttcttttgcgatacttctttgtgggaagtctgtatgtgatctgtgtgcaggtcatgataaaatgcctgcaacatttaacattcaaaaatctaggacacgccgatgagtttcagtccaatcaagtattctaaaaaaatcctgtccagaacaaactaaaatatatgtggccgctacaggttgaatagtgcccaatttaatattgcgtcaaatttgtatttcaatattatttttggtggcaagaatgtatcacagttctagttttatgtgtacttgtagcatttggattagctccataatctagaatgttaaggcccattaggcccaggtctactggctatatatattacctacagtccttagagaccgattatcaattatcaatcccaaagttagtaacatggtaacagagcaggttacgaaaccctaatttttttttctcagccgccgtcgcggctgtttcccgcccagccgccgtcgcggcccttccccacccagccgctgtcgcggctcttctagccgccgcagtcgcggatccagctttccctgcttttgctcgatccggtggctgcccccacctctgctccgtcgcggattgccgcagtcgcggatccgcccctacctcagctcctgcgcgcggggcgccgccgatccggccgccgttccctcagtcctgcgcggatccggccgccgtcccctcagtcctgcgcggatccggttgtcgtcccctcagctcctgcgcgcgaagcatcgccgatccgcccctacctcagctcctgcccgcagccacggatccggccttccctgtgcgcggcctgtgcggggatccggccgccctgttctgcgcagccgcgaatccggcggcgctctcctgtgcgcgcgcgctcgccgatccggccgcggatcctgtcgtccctatgcgcagcgtgctctcctctgctcctgcgcgcgaggtgtcgcgcgctctgcgttcctgctgaccctgggtctctgcgcagatttgtctgctctacctctccaacaacagggacgctgtctggctactgtcatatgcaccatcgcggtcacctcgtccagatctgtttcggcgacgtggtcctctccaatcagtcaagaattcgcctgcctcttgtgctgatctgcttggagtcagtctacctgcctggaattttggtactctctgactgttctcttgttcttcaatatgtcgaccaatgctattgttgtcaatattgtgctcgatggtcagaattatcccgaatgggctttctgtgttcagactgcattacgaggtcatggtttactatttcatttgactgaagattcactagtcctagcagccgatagaagcaatgctgctgcaatcaagacttggcagatcaatgacagcaaggtaatggctgctatggtcaatagcactaaaccaactatgattatgagtctgtctaaattcaccactgctaaggctatctggtcacatctgaaggaccggtttgttcaggacagcgatgctcttttacataccctcatgcaacagactcatgtcattgagcaacatgatatgtccattgatgaatattattcagcctttgatcgtcttatgagtgcattgacctccatggtgcctgcttgtactgttgtgccttgtccagcccacaagttcattgagaaattctttacctacagatttgttatgggagttcgatctgaatttgattcccttcgtgcaaggctgcttcacagttcggatactctcaccatgtctcaggcattgtcagaattgcttgctgaagagactcgtctgaagtctatgtcctctattactggtctgagttctcacagtgtgttggctgatgctcagagatctaggaacacctcctttcagccttgtgaacactgcaaaaagaccacacatcggtctgagaactgctttgctaagtttccagagaagctggctgattttcgtgtccgtcgtgctactcgtggtcgtggtacaggaccatctcctagaggctcagtcgcgattgctgctacttcatctgctggtgctttgtcatcatcctaggttcttgattctggagcttcctttcatgtgacatctgatcagtcacggctggcgtctactacacctgtcaccgagggtacttctgttcagactgctgatggtacattatgtcatgtcacccacaagggttctctttttgatccaacttttaatgtcccaaatatattttttgtacctcagttatccatggatctactatcagttggtcaaattaccgatcacaattgttttgttggatttgatgactcatcttgttttgtacaggatcgcaaaacaggggatgtgattgggactggccgtcgccgtaaatcttcgcctcgcctctacatcttggacactttgcgtcttccttcatcccctacaactacacctcatgtgctcgctgcttcgggccccacgacgtcattcgcccagtggcatcatcgtctgggtcacttatgtggatcccgtctatctactctaataaagtctggatgtttaggctctactcatgttgagtctagttttcattgtaaaggttgtcatcttggaaaacaaatacagcttccatattttactagtacttcccattctgctaaaccttttgatctaattcactctgatgtttggggtccagctctgtttgtttctaaaggtggtcataaatattatgtcatttttattgatgatcattctcgttatacttggatttacttcatgaaacgccgctcggaattgccttctatttacaagtccttcattcgcatggttcacacccagttttctgctactattaaaatttttcgttcagattctggtggtgaattcctatctgataattttcaccagatattgaccatagagggtactctagctcaactttcttgtcctggtgctcatacccaaaatggtgttgctgaacgcaaaccctgtcatattattgagagtgctcgtactcttttgatctcttcttttgtaccttcacacttttggagtgaagccgtttccactgccgtgtatctcattaatagacaaccttcatctaaactttctggtaaatcaccgggtgaatttctttttgggacttctccacgatatgatcatcttcgtgtgtttggatgtatatgttatgtcttgttaccaccacgtgagcggactgttgggggccttcggcttccgaaggtcctcaaaaacatgatttaacaatgtttctggagtataatgtgtgaacaggtatcttcggacttgaatcagaaagggagaagctcaaaagatacgaaggttgacacagtgccgaagctgtgaagcaggaaagcttcggcatgttcgcagaaaggggaaccgacttaaagatgaaaaggccatttagacctcgatagaatgctatagaattatcaccaaatgtaaaaggcatgtatgtaattttgtacgggttgtaccccgtgcctataaataggtgaacagtacccccgtactgttcacgcggacttggcatttgcttttgcgtcgcacttgtattttcatttccttccaagccgaaggtacctttataattcaatattgtttctattcctttatgatgagttaataaagttaaatgaataatgttatgcgattattcacgctatcttttatgtttcatatgcttcgtcttttactaatgtatattatagtgatgaaggttaatccttcatgaccttcgtccgggaatcgttatatcctaagggaaataatgcttcgaaggacgaaggatcttaatgtttaacattttctgtgttgccttgttcttaactcatagcatttgagaacaagtccccaacattg

SEQ ID NO: 12554 - DNA, 4279 bp, Zea Mays
cacgaccccaacagtagcccctttcgcggtgctagatcgttcttcgtaacgagcttgacccgtgaaaaaagcctcttcagcttcgggaagccgaaggtccaaaaaacaccttccctgagctcgttgcggagaaacgatccgacttccgagcgcgtgtcggtcccaccttgcagagttactatttgatccttgcggtccactgcgcagcgggtacaagttactgcgcgcctggtgtaacaattccgccgcttcgccttcttacctgcagcactatataaactgacaagtagttgtgaagttaccacagcattcattgctatttgcactgttttgctgccgaaattttccatcatagccgaagcttaagtcccaaaatcgaacgaaggtgcttctcaacgtccgcttcgtcaaaaagaagagcttcggagaaaagaaaaaagtaaaaagtttttgacttcccaaacttagaatcaaatggcgagaatacgatctactgccaaagttgtacgtgagggagacgaagccgaaggttcagacactgtgcccatctccgaagcaatgcagcgttccggtctactgactacagaagaaatgcctgctgctgaagcaggcccaacaactgccgaaggaaaagaaaacattgaagggactgactccgaagatgactatgaccttgctatgcccagcaagcccagtcacctggattttgggaaatcaactgtttcaaaagctgacctttcgaagatggtgaaagcaggttatttcaatgaggaccagaagaagctactccgcttcggggaagaagaaaccaccccgaagccaaggaaggatgagattgttattttcaagagtttttttaaaagccgggcttagattccctctccacggtattgttgcggagatactaaggaggtttggtatctattttcatcaattgactcctaacgccatcgttaggctcaatgtttatatctgggccctccgaagccaagctgtggaaccatttgctgacagcttctgccgagctcacgaattacattaccaaacaaaggccagaaaagatgggctacatgataatttcggttgctataattttgcctaccggaagacaacaaagtgtcctgtcatcagctaccgaagcaaatggccagcaggttggaaatctgagtggttttatgtaaaagttgacgaagacaaagaaaaactggtacaaagccctttggagttaatcttcggagagacaaggccacgatgccacattggcgacctaaaaggtcccacctgggctgctctgggtgaatttgaaattatctcaaaacatattggcaccagggatctggttcaggaattcttggcattcagagttttccctactctaaaatagtgggaaatgccgaagctggagggagagaagaaggagggggagcttgtccggcttccctattatttcaagttcaagaaattcttcaaaaaaccctgcaaagaatggttagagactgttgaagtgatgtgcaacgaaatcctggggaactactccaaaaaagaggatcaactaatgacagcagccttcggtgcccgaccgaaacgaaggttgaaccgagtgcttgacgccttaggcttcgaatacccagactatgaacaattgaacaagggtgccgagggccttaaaagaaaaagaatagccgaaactccgatcacggatgaagaaagaccagcacaggagaagaaaattctcaaaaaaggaaaaaatatctgctccgaagcgcaaatcacccgaagaagaggggacccccacaccgccttctaccagcgacgtggaggaaattttaaaggtaatgactgaacccatgcctgcgaagctaagtccattagggctccaactgacgaagctttttgaaaaggtggacgagccggatcaatcgaagataaacaaacccaaacggcaaagaatcattgcggtaactgaggttatcgacaagacgccgccaagggcatcaatccaaaaaacggcagctgccgaaggtacagcaatcgtcgaaggcgtagcttcggaggtcgcggctaccgaagccgctacagccgaagatacaaacttagaacccatgattgaaaatatcaacaagattttggaagacatggctgcggaagaagctggtgctattactgaaaaaaccatggctacagtgcctgagaaaggaaaagaaatagccgaagacccttcggacgacgaggcctactcttttcagaacttagttgggcaaaaactgacgaaggacgaaatagaagagcttaaagactacgccaagtcttgcggctacaagtcaggtgccctcctatttgggggtgtagatgatgaagaactaggctgtattcgagaccagactggggctaaggtaatcggtactctatcgaagagtatcggttttccgaagctagagacagacatcagccgctaccgacgacaacatatcgtcggcagcttgttttattctaacttcaaggtaaacaacctttttctctggtttttattgccgttaataatgaaaatattacttaacataagttgtttctgttcagagcatgctactgagcaaagctctgaagatgcaacaagacttggaggacaaaaagcacgaagctataattgaaaacttggaaagcaaaataaaagagcaaactgccatcattgaaaagaaagacttcgagctccaatcgaccgaaggcttgctggctgaaactgaggctaaaatattagagttaaattcgaagcttatcaatcaatcaaaacaatttgatcaggagaagctagaactgaattcgaagcttaaagccgaagtccagaccagctcagaattgaagaaagcattaacaagccttcaagacaaatgcttgaactttggcaataattgtattggacgattaaagaagatattttactctgttggagccagcagtgggaaatttaacccttcggcggaaaatttaccccaggccttcgatcatattgaagctgaaatcgaagagcttgacgaagttatagccgggcatggcgacttctgtgcctgggtagcttctcggggtacggctgctgcatttctgaaggccggctgcgaacatggaaaagttgtcaacaggcccaacttcaccttatctccatcaatcctggatgatatgcctgacctcgcccgaagtatctccaatagatttataaaaatgatatggacaaaaggcgggcgggagaaggctggagatgaagcacgaagtcatcttgaaccagtaagagataatactttgtacttacctttttctttgcacttgatttttactcacgattccttgatttatgtaggatgacgaaggtgaagatgatgcctaagttatgtcgccgaaactgtcgccgaagctgaagcttaatgaagatcagtagaaatgtactataggaaaaaactcaggatacttttgtaacaagttttgtaaatacaattgaactgtcctcaaggaactttgtacataccttgtaatatattcttacccttcgattgagtcgctttgatgtggacgaaatcagtattttgagccgaaggcgaaaaaacaccttcccttcttttcgtacacaacgaagcctaaactgccgcttcctctttttgccaaagcttttcttcacatagcaaaacataaaaaactacttctttccgccgaagcttttacatagcaaaacataaaaaactacttcttccttctgccgaagcttttagatagcaaaacataaaagactacttcttccttctgccgaagcttttacatagcaaaacataaaagactacttcttccttctgccgaagcttttacatagcaaaacataaaagactacttcttccttctgccgaagcttttacatagcaaaacatgaaagactacttcttctttctgccaaagcttttacttttacacaacgattcacaaaaaaccaattctcttttttgccgaagcaaccactttggtacataaatgctatgaatgaatgcttatgtatgcaaatgccatgatgtaatgtaatgtgcaaatgaatgtccgaagcgtatgtccgaagccacactcatccatcattttcttaggagcaaaacacacgtcagctctgcattcccttaggaacgactttggagcatctttgccttttacttaggcattatcagcgttgacttttcgctgtaagctctgcatccccctagggacgtctttggagcttcttcgtcttttacttagacggtataagctctgc

SEQ ID NO: 12555 - DNA, 372 bp, Zea Mays
acaacagaggagcccctggcattggtggagttaatgttgttagatctatcaggtattgcttgagttcttcgaaagctttttgatgagctgggccccattgaaagacttcagctgattttagcacctcgaagaagggtagatttctttccgctgatctggatataaatctgttaagagatgccagtcttcctgtcaatctttgggccccctttcttgtggttggtggctccattcgaagtatagcttcgattttatttgggttagcttcaattccctttgttgaaaccaagcatccaaggaacttacccttctttactccgaagacacatttttctggattcagcttcagaccagcttgtctgaagctggcga

SEQ ID NO: 12556 - DNA, 439 bp, Zea Mays
agaccattttgacttaatgaagggtccctgcactccaacatgctgcacccttctctgagcctccttcttctgctttttgttagctggctcgcacttgtattttcatttccttccaagccgaaggtacctttataattcaatattgtttctattcctttatgatgagttaataaagttaaatgaataatgttatgcgattattcacgctatcttttatgtttcatatgcttcgtcttttactaatgtatattatagtgatgaaggttaatccttcatgaccttcgtccgggaatcgttatatcctaagggaaataatgcttcgaaggacgaaggatcttaatgtttaacattttctgtgttgccttgttcttaactcatagcatttgagaacaagtccccaacattggcgcccacctccggtgaactcacttccacttcg

SEQ ID NO: 12557 - DNA, 891 bp, Zea Mays
atcagatcaatatcaaagttgcatagcttcggaaaatagcttcggaaaatgttttcacgaggcatcgatgtcattcatcagaataattttgacgaaggctatcttcttcacgacgcatgaaaagaagggaaggtgttttttcgccgaaggctcaaaagtggtatgtatttaaagtttcatgcatcataaagaattcaataatgaaaagagacttgtatattacattcaaatgtacaaagtgttgcatagattacactttaaatgtttttttccaaatagcacctaatcttccctcaatactgcttcggcggcttcattcagaagttggtcaacaaccttgtccatgatagtttcagccatttgattaatttcttcatccccttttgtgtgggggtcggcagatcgtccaacagtttctgagcgaagagaacacttcttcagtacttttacaaatcatgagcaaagtttaaaatgaaaattacaacgcaacaagaacgactagttggtacctaactgtccttcgggctccctactcctttcggcagcgtctgctactcttctagcatcgtgaatgcctttttcgcttctttcaatgatctctcgcgccattcctcggccgccgtcgttccagatatcagtaaaaaatttgccaccaaccacgctcgcttcggccgaggggtccttgatgtcttcggtagataaggtagcttcggattgagctaaaaattttacatgttcgcaacctttcttctctaagacggaagcaattcctctggcgcccgaaaaagcacatatgtcgccacgactgttcagaatctcttcgaaggcctctgcttcgtggctaatccattccagcggaccttcgggattgcctcgagagaaattctcttc

SEQ ID NO: 12558 - DNA, 439 bp, Zea Mays
gttccattgaatattactgcccccttcggatatttcagctcctttgcataatggttggcctcatgagtttcttcctcagatagctttttccccgaagcatgtcgtatgatgtaatcatgcatgccggtaggtgcttcggggatgacggtgtccgtttcttcaactaatattggttccggaatttttactgcttcggcttcaaaaggatgttctttgaagggctctgaaggcccagcttcagcttcagcttgttgagccgaagcttcagtagaagcttcagcaacttcaacactcttttttggaattgtgcttgaagacttaattgtctccaagacgtctagtacatttaccattcttttccttttcggggtcactgatggccccttttggttttttgctgtcccaatgattgctgtaggactcaaaacttctgatgttt

SEQ ID NO: 12559 - DNA, 482 bp, Zea Mays
agaaaggtttcattttcttgtacatgtgttcttggatttctctattactaaatgatgatgatggctactaatatattttgttgttctctattgattttaggtttcgagtgtgaaataaaaactataattgaagctatgaatgtcatggagttggatgatgatgttgggacttgagatcttcaagcaagcatggattgcttgcactatcttatgtcatttaaaaaccatcttttattgtaatagtctatcgtgttgaactgtcttgtgctatattagactcttgtgtgatgtgaacttattcctattatatttgaactaatgtatggtgtgaacttattgctatactgtgttggtctatgtaatgctattgtatgatgttaacttatttctatattattatgttggaccattgtgttgtatgatgtgaatttattgctatattgttatgttagagtactatgttgtatgatgtaaacttgcca

SEQ ID NO: 12560 - DNA, 2662 bp, Zea Mays
gttttacatgggttgcgtctcgtgcctataaatagatgaacagtgccccgtactattcacgctgacttggcatttgcttttgcgtcacacttgtacccttaacttctttcaagccgaaggtacatttgtaacttgatgtcatttctattttcccatagtaatgaaatagaaatgagctgataatatataattgttcatgttatattttatacttcatatgattctttcttcattattatatgttacatcgatgagggtatgtctgtgacagccctcccaagttatgaggcccacatgcaccaacccttgccattaacggcctcagatgtctgtgcacgtgtactgggtaacttaacaaggctatcatgagttcaacaactcgaactcattatcccaaggatctcccacattcatgcatattacagtaatcacactcgatacacacactttggagatggagcggaagactttacaaaacacattttacatttccaaagctcaagttttacaacataagaagaattgtaattattacaagtcctgatagtacccaaagtgcataacttattataataattggaagggtgaagcctttccataagagatacacataaacattctaagcttcaaggcctccacatgaagtaactaaccaaaagataagggaataaaacttctcctgcaaaaacaacaagggataaaaccctgagtacgcaattactcagcaagacttatccgactaaagaaaagactctcaagggtatgctagttgattgggaatcaaggtaaggtttatcaatgatcaaagactccttttgcagaaaagcttgctaccagttgatccttaagccaagttttatgtcactagttaggttattacctgaatctatatttgcctagtctagttcaagcacttggcctatactagcttcattttattcattctcatatttcacttgctaactacgatgatggtcaccgggatgagtctccataatcgaggagcaacgacgattcgaaccgattatacccagctggggatctctaaccacacgacatatgtagcacttaacccttgcatatgtcaaccgtttccacggagtcctccactacatgaacaggtccgcgccacccgagagcacattacctaccaggcgtgctctgtgccaggagggtacatgctactttcgccatctctccactcccagtgcgcgattgtctcttcacgtatggaatagccgggttcaagcttaccctgtcccataccagggtatgtggctagttgcaaagtctcaaccacaacaggccagtcaacggtacagtccttaatcgacacagacgggcgactctgtctgctcagcgtctggtctagatttattaaccatttccccatttttgacacccggcaggggtactcttttccaatgatgagcccactccggtcgaagtggagtcatcacttagtttgctttgatttttgaatcaaaaagcccataaccaatgttccacaatcattctttttgaaaacaattgatttttcagtttctaagcagggctaagcaatatcggttctctttataaaacagggattaaggagtttccaaggaatggtaatgcatcaattgttcatcacacaacacctatcacctaatgcatcagataaagtgaaaaagtatttaaaatataaggaagaggtaaatgcaccggggcttgcctttgttgcagagaagatccaaaaatccttctaccaaataaccagttagatagaaccccaccaatgagtattcaggtactggaacaaacttctcttcgatgtccacttctttaggagctcaacaggagagaccgaggagcaccacacgaccacgtagcaagacgacgatttgccgaagctccaaaagaccaagacgttggaatggcaaggcgaaacgcgacgacgtatagagcacagacgacaagcagagagaggatgtccgcgacacggcgagaaaaaggcacagggtccggcggcgactgaggacgccggtgagttccacggacggcaaagtacaaaggtgaaggacaacggtggtgcgtcgaggcttgctgaatggcagcgcgtcgggcagagccccacgccgggtgccacagcgacggtgtgagtggcggggacccggggctagacggcggcgaggctacacgagctcggagcgaggatctagaccgacgacgagcttgctgtgacccacggttcggacaggaaggagtcgaggacaacgtgtgctgacatccaggcgcgatggcgaacagtagaacagtgaccgggattcatgcaataggtgaggtcaaatctgcaggaggtcgatgaattggcgaacgacaaggcaggcaactccctggcggcacaacaagcacaacctggggttggacgacagcgatccgagcgagagattgacggccggagacattgcacgatgagcgccagggagccgggatgggagcaacactgtgggaccgtggaagccggcatcctggccgaaggccaaatggagaaggatgatgtccgagcgtggagaggagggtgctgagaacttttctcgccgacagtatagcagggaaaatgtcctaagcaccaacttgaggaagatacgtataggcttcagagccaatgtgaagaagagaa

SEQ ID NO: 12561 - DNA, 1906 bp, Zea Mays
ctcaaaaacaccttccctgagctcgttgtcgagaaacgattcaatttccctgcgcgtagcggtcccaccttgcagagttactgttcggtcttctgcggtccaccgtacagcgagtgcgagcgggtgtccgcctggtgtaaaacttctggcgcttcgccttcttacctgcggcactatataaacagacgagtaggtgtgaagttaccacagcatttactgctatttgcattgttttgctgccaaaatttttaaccgtcgccgaagcttgtttgtcagaatcgaacgaagctccatcttgaagcctgcttcagaggaaaaaaagtattaaagtttcacaagttcataattaaatggccagagtccgctctaccgctagggttgagcgcgagggggacgaaactgaagcttcggagactgtccctatctccgaagccatgcaacgatccgggctagtgacttcggaaaagattcctattgatgatgcagaacaggcaatcgctgaagcagaaggagaagatgctgaggaaactgaccccgaagatgattatcaccttgccacgccaagcaaacccagccatttggacttcgggaaatctactgtttcgaaggctgatctgtccaagatggtaaagtcaggctattttactgaaaatcaaaagaagctattacgcttcgggggagaagagactaccccaaagccggagaaagatgaaattgttatttttaaaagcttcctaaaggctggattaagattcccccttcatgggattattgcagagatattgaagaattttggaatctattttcaccagctcacccctaacgctatcgttaggcttagtgtttatatctgggcactccgaagccaggcggtggaaccgtttgcggacagcttttgccgagttcatgaactacactatcagacaaaggctagaaaggatggattacatggcaattttgggtgctataattttgcttatcggaaaactacgaagtatcctgtgatcagctaccgaagcaaatgggcagcagggtggaaatcggaatggttctatgttaaggttgatgacgataaagaaaagcttgtgcaaagtccactcgaactaaccttcggagaaacccgcccccagtgccatatgttaccagagggtccgactcaaaaagcaatgtatgaattcaaaataattgcagagaatatcagtacaagggacctggtccaggagtttttggctttcaaggtttttcctagtgtaaaagagtgggaaatgccgaagctgaagggggagaagaaaagaggtgaacttgtacgtttgccttactacttcaaatttaagaaatactttaaaactccttgccaagagtggctggatacgattgaagtgatgtgcaatgagatacttggtaattattccaaaaaggaagatcaattgatgaccgcagccttcggcacccgtccaaaacgaaggctgaatcgagtgttggacgccttgggcttcgaatacccagactacgaaaatctgaacaaaggtgccggaggccaaaaaaggaaaagggtaactgaagccttagatgaaggtgaaaaagagccgataaagaagaaaattccaaagaaaaggaaagcttcttctccgaagcaacaaatatctgaagcagaagaaacccctgcatcaccttctgctgctgttgttgaggaaattctgaaggtaatgactgaatccttacctgcgaagctaagtccactgggttctcaactgacaaagttttttcagaaggacaaggagcccgagaaatcgaggaaaacaatcaaggcaaagaaacaaagaatcattaccgtgacagaggtaattgacaaaacgccgccaagacctttggcccaaaaaacgcgagcggctgcagaaggggcgga

SEQ ID NO: 12562 - DNA, 1053 bp, Zea Mays
gctcagcaaaattctgatttgagaaagctactgataggtcttcaagaaaaatgcctggaatttagcaacaagtgcattcaacgactaagaaagattttttactcagttggagccagcagcgaaaaatttactccctcagctgaagatatatcaaaaaccttcgaacacattgagggggagattgacgagctcgacgaagtcatagctgggcatggtgacttttgtgcctgggtggcttctcgagggactgctgcagccttcctgaaggctggctgtgatcatgggaaaattgtcaataggccgaatttcactttgtcaccatcaatcctggatgacatccctgatctcgcccgaagcatctcgaatcgatttgtaaaaatgatatggacaaaaggtggtcgagagaaagctggagacgaagctcgcagccaccttgatccagtaagaaatcataccttgtgcttaccttttcctgtaaacttgattttgactttcaacgaccttattcatgtaggatgacgaagccgaagctgatgatcaaaaatgacgccgaagccgaagctccttggagatttagatagtagactgcaaacagtacttgaaaaacttttgagataacttttgtaaatgtaaacaaaatttgtttttaatgtattctgttcataccttgtaatatatccttaacctttcactgatgtatgagagatgctttgatgtggacgaaattttcttttttgagccgaaggcgaaaaaacaccttcccttcttttcgtacgcaacgaagcataggaaacaacattttccttttttccgaagctcttcttcatagaaaacaacattttcccttcttctttgtgcacgaagctcttttttccctttcttttttctcttcttgccgaagcaaccatttatgcgatgaagatgtttatcctacatatgcctagatgaatgtttatgaatgcaaatgctatggtgtaatgtgatgtgcaaatgaatggccaaacacgtatccgaaaccatattcatagccattattttcttaaaaacaatcac

SEQ ID NO: 12563 - DNA, 265 bp, Zea Mays
caataccttctccagctctgtataatttttctttgacaaactaagaacttcggatacaaaatatattggggcctgcctcttgatttgaccatcaagcttctcctggacaagcgctgcacttactgctgagtgcgaagctgccacatataataacaaaggagcccctggcattggtggagtcaatgttgttagatctatcaaatactgtttcaattcttcgaaagctttctgctggattggtccccattgaaagacttcggccgac

SEQ ID NO: 12564 - DNA, 423 bp, Zea Mays
gcaccttcggccttatcatctgacattttctgaagcctttgctttctaggtctgaaggatggatcgacattgagcgagtgctcgataacatccctattaactccgcatagatcattggctgaccatgcaaaaacatctttgttattgaacaaaaaccttatcaaggttttctcctgctcttcggataattgggagcccaacagcaccttctgctctgctatgtcctcacataagagcataggcttcggctgatctgctgaagctgctttctcccttctgaatttgtactgttcacaagcttcagctccatctatattatggattgcttttgagtcagtccaattaccttcggcccttcttgcagcttcctgacttccatagatagcaatgggtccctgatccgaaggtatcttcatgcaaaga

SEQ ID NO: 12565 - DNA, 2586 bp, Zea Mays
gttcatctatttataggcacaggacgcagcctgtgagaaattacattcatgccctttacaaatgcttacaatcataatacaagctatcatgggtcgattggtcatttcatctttaagtcggttcactccttcgtcttgagacatgccactatgtcgaagctttatggatgaaagcttcggcactgcttttgagaggatctgccgaaggtgtttctttctacaggatcttcggcgacgaagcatatccccaacagtagccccttcgcggtgttagatcgtttttcgtaacgagcttgatccgtgaaaaatcctcctaggctttggaatgccgaaggtccgaaaaacaccttccctgagctcgttgccgagaaacgattaaaatattccgagcgcgagatggccccaccatgcggcgggtacacgcgtcctggcgattcaccttctcgggttctgtggcccaccattcagtgggtgcgggcgattgttcgtccggtgcggaagacttgacgattcaccttctcacctgcggcactatataaacaaacgggtagatgtgaagttaccacatcattcattgctattgcactgttttgctgccaaaaatttgaccatagccgaagcttgttcatcgcattcaaccgaagcactgctgttggttttgcttcgtcacaagaggaagagcttcggaaaaatttaaaaagtcaacaacttcatcaaaaattgtgaggaatccatcatcaaatggcaagggtgcgctccactgccagggttacacgtgacgaagaagaagccgaagctgctgaaactgctctgatttccgaagtgatgaaacggtcggggctggtagcgccagaggatgtttctgacgaaggtgtacctgtcgttgaagctgagcaggttggtgctgaggaaggtgaatctgaagatgattatagtgacgtgccatctaaacccagccacctggagtttaagaggtccactgttaccgaagatgatgtgcctaagttgatgaagttaggctatttcagtgaggccaaaaagggactaattcgctttggcagagaggaaattactccgaaaccagaaaaggatgaggtggtagtttttaaaagcttctttaaagcaggattaagatttcctttgaatgagatgattgtggatcttttggggaagtttgggatttatcttcatcaactaactcccaacgccatcgttagacttagcgtctacatctaggctcttcgaagccaatgggcagaaccgcttgccgaaggcttctgccgggctcattagcttcattatcagacaaaagctagagaagatgggttgcacgaaaacttcagatgctataattttgcttatcgcaaagatgcgaagactccagttatcagctatcataccaaatggctagctggctggaagactgaatggttttatgtcaaagttgatgagaaaaaggagaagctggttcaaatcccattagaattaatcttcacagagactaggccccaatgcaacatggcaccggagagtccatgccagattgcactaggcgaattttgagttattgcggagcacattggtactagggatctggtgcaagaattcttagcttttagagtattcccgactttgaaagaatgggacatgccgaagctcaaagggaaaaagaaagagaaggaacttgttcggttgccttattattataaattcaagaaacacttcaaagaaccttgccaagaatggttagacacgattgaagttatgtgcaacgagatccttggcaactattccaaaaaagaagatcaattaatgactgcagtcttcggcacttgaccaaagcaaaggttgaaccaggtgatagatgccctgaactttgagtatcctgactatgagcgtttggagagaggtgccgaaggacaaaaaagaaaaagagttgcaagcgctctggataaagaagctgctaaactggtgaaaaggatgaaaaaaactttaaagaaaagaaaattaagccctgagccgaaggtagctgcttcgaagaagaagaaaactgtggctctgaagcaaaaaacgactgatattgaggatgaagctccttcaacacctcctgctaccgatgtggaagaaattttaaaggtaattactgaatctttgcctgtcaagctaagtccactagggccacatctgacgaagctttttcagaaggaaaaggagccttcggcagcgaagaatccaaatgagccaaaaaacgaagaattattcatgtagttgaagttatcgagcagacaccgccgctgtcatcggcgtcaaagactccagctattgagagcattgttgctgccgaagctgcacccatcgaagccgaaagtgtcgaagctaaaaccgctgaaatgtcaatctagacgccacactctctgaaattgatgccatgcttctaaatgcggccgcggaacaagctgctgcagccgctgaagagatctcgggcacaatggctggaaaaggaaagaagaaagccgaggatatttcggaagaagaggacttcaattttcaagatatacttgggcaagaattgtcgaaggctgaaaa

SEQ ID NO: 12566 - DNA, 379 bp, Zea Mays
agaattcgagtgtgacgtgcgagtaaatgcaagtcagcgtgaacaatacatgggtactgttcatctatttataggcacaggacgcagcctgtgagaaattatatacatgccctttacaaatgcttacaatcataatacaagctatcacgggtcgattggtcatttcatctttaagtcagttcactccttcgtcttgagacatgccactatgccgaagctttatgggtgaaagcttcggcactacttttgagaggatctgccgaaggtgtttcttcctacaggatcttcggcgatgaagcatatccccaacaaccgttcgtcgttaaatcctcaatacatatgttctatccacacttcgacccgcaaccgcgagtagctg

SEQ ID NO: 12567 - DNA, 180 bp, Zea Mays
catatatgagtttcaacctagtacaaatatagagggcattcttgtcttcctcatacaaaagaatcctattaacaactcaaataatctgggtaaacaaacagaactactcagattatataatccagattatataatcctccaaaaataatccagattatataatccatggggtaaacaaac

SEQ ID NO: 12568 - DNA, 312 bp, Zea Mays
cgtccaggtcgggctgcgagagcgcccgaaggtccaccacggggagcagctccgtcgccattgggtatccgccggggccggggccgggtcgtggattggattggagagggtgaggtaggcggcggaggactgaaggaggaggagcggggaccgatccgagcgtgtcgctcgccgaggagactagagcagggtgggatcggcttgggttgttggggtgtcccccagttccagttccacttccactcccacttccactcccacttccacttgaccacttccacctcggaggaggcggagtggcggacgccgggc

SEQ ID NO: 12569 - DNA, 158 bp, Zea Mays
gacgaatttagaatgttttttccccatgatcttttcttcacagaaaagaagaaaacaagcatgacagcacaacagaactttatcataagaacaaggaagaatcccagaccaacaagagctcagtctaatttataggcagccggtagaaacacttgagg

SEQ ID NO: 12570 - DNA, 321 bp, Zea Mays
ccccgcgtccaacgagacgcctaaaccatggacgcatgcgcaactccacttgggtttcagccaggttgttcgctttagaaaaattgtggtttttgttttatttacgattcagtcgatggcgtaaatatgtgtgtgaaaatataattgtatgaataaacgcgtgtagagaagaaactgaggtagaaaagaactcgggcatttttatattttgataggaaaattatgcgatgtgttgtttgatgcgaaaaactaagttacaaaatacggattatgttttgggaaatgcgtcgatatgtgtttatgtgaaaagtataattgttt

SEQ ID NO: 12571 - DNA, 337 bp, Zea Mays
attgaaggcaagttgttcccttgaccacttttatttacccaataatgttctctataatcattttatcatgcataggcttaattttgatgggacccaataggtcaccctagtttggtcatctttacaccttgtttacccctgaacttttgggtagtctttgttattgctatatatggttttaggtgttgagataactattacacatggtcattctttatttattgttctatttctgttcatgataagactattatgttaattggaacatagagcttaacttgagaaacacgtgccaccacaagggtggaatgggacgcccttggctgactaactagga

SEQ ID NO: 12572 - DNA, 182 bp, Zea Mays
acggaaatcttattaccaaattttacaagttacaaaaattttactttgtacatgatcggagtgattacaaaagtgattcaaagaaataactttgaactattataaattatttgtagttttgaaatatatgctagctcaagtgaccatcctcaataagaagtatagaagagttacttagactt

SEQ ID NO: 12573 - DNA, 1423 bp, Zea Mays
cttagctaaagcataacatcgagagtctaacaatatttagactcctattgttggacacccagagtgatagtatgtgcaggaacaatttaactaatcttttaaatcatgtttctagattaatttgaattacatacaaattaaataaacgctaaacttatccttcacattattaattataccacatcgctcacaaaagaactattttaattttatttcacacctcacatatttattcaatccatctaacaatacgactacgggaataacgaatcagcttgccatactaaaatcctacttgaacccatgaaatcgacgacgcttcccggtctgcgcataacaccaaatacgtaacgagcgacgtactagactgcactattctacccgatcaaattttattttggcactaattcagtactacgatttacgcgcacgtcactggcccacgttaacagcgcaagtataccaaactaacgagaaatattaaaatgaaaagcaagagcgacgacaacacaccaataatttaatccatattgaagaccacgagcacagctacgatttccgattctgctgggatttgttgcttcatccaaactctcaggattttttgacgacgcaaaggatgttgacgagttggaggcttctagggtcgagcacgataggggacttcgaaaaatcgacgtaggtagcacgcaattgaaaaacaggtcatcggagtcgacgagcacgtcgtggacacaacgtgaattgacgacgtggagcaagggggtgtcacagcacataaagggcgacacgaagatgttgggcactgactatgacgtgcgtgcaggttcctgggacttgacgacacgcgaagctatcaccaacgacgacacgatgatggcttgacacggaagtggacaacgacaacaccaaggttagtggcaaagcgagcgtgagggtgttttatcgaataggtgggatgcgaggcacgacgtcaacaatcggaggggtgaatagcgtcacaattgggctatacaggcgcagcgaggacacacaggcttgtgaccaaggcgaactcggtgagggaacttgacgcgcccagagaaacagcacggcacagtggagcagggaccaagcgccaatgagcagggaaatttcatgcgcgcgacgattagaaaaggaggaacaccggcgagtaccacggagcagcgcgcgcggcgaagatccaagcgtaagggagcaaagagacgggcgcgtcttggctggagagaagcgttgggagcaagctaaactgctggcaggcgacccggagcgtggcgagcagggagcacggagccggcgagacagcaggggaagatgccatgggggcgagctcgaggcatggagatccggcgagctgaagcctcgtgcaggagctgggcacaatggaggaaatccagggcgc

SEQ ID NO: 12574 - DNA, 566 bp, Zea Mays
aattaaggtagtcaaataacaaataaataaatacgaaaatatgcattttatgatgaagttcttgtatttttgcactggcattcaaacttgtgagacaagtttaattataaaaaatttgaatttgaattaaggaatgagaaaagaaaagagaagagaaggaaaagaatatacatgaataaatatactccttcatgttagtacttttatgaacttgattactatgtgaaatccccaacctaaatttgaattcaaatattggattttgaaatttaggaagaagttcaaatctgaaatccaaaaaaaaaaataaaaaaataaaaaaggaaaccagcgcgtcatgggccgtttcctccccttctggcccatttacccctgttcaccaccacgctgcccaccctggcgcacagctccgctctctagttcaccgccatgcgggccatcttggtcagctctatcccctccgtctccttgtaacgagccaccgaaatcgtagccgccgggatcggctagtccgttgggatttggtgcgcgtccaagagatatagtctgagctccctccggcgtcc

SEQ ID NO: 12575 - DNA, 3966 bp, Zea Mays
acttaaatattattcaaagtctgaatcccaacacctgacagtccaccttttgaccacttttactcccaaatttatgtggaaccaggtcaatctcactttatcaaacttgttcactttaccatggtctacaacttttctatggaacccatagtctaaatctacatgaatcagtcacaaatgggctccaaactcagcatatttcactgcaattcagttttcaataactgaatataattcagtttcagccacaacacagtcccactttaagcagttgttactccaattcttgtatgggatcatgtccatcaccctttaaggaagttgttccccaatatatggtatttaattcctctacaagcaccacagtctaaaatcttatagaacagccataaaccaactccaaagctgcactaaaaatgctgatttcagactttcagttctgaataaactaagtcaacaacaatctgataatccaactttggcaaagtttttctccactttttgtataggatccttccaaaaacacttaaagaaagttgttcaccatgatctggtcttcacttcctctatataaaccacaatccaaaaccttatagaacagacaccaataggctccaaaacagcactcacaacactaaattccaggttcagactactgttttaagtctgaaaactgggaaatctgtcaatcaatatttgggctatcttttctaccagtagcatgtagttttgggatatatcacttaataagaattgttctcctctcattactctaaaagtttggtatagtcttcattagccaaaacctcttggatcccaaactacaataacccaaagtttgctccaaatgctgaaattcagactctgaatttcactaagtctgaaatctatattttctaacagctcttctttagaccagttcttctccaaattccatatagatttaagtctaggtgacttaatcaaagtcacactcctcacatagctctataactttgttacaatgaccaccttcaaaatgtttatagatcagaagttataaaggaccaaagttgactagttgatatgattttcagaaatcctaatctgaacccaaactgaacttttgtgaatcactccaaatttatctataaaacatggaaacctccaaataagaaattattcacttttccaagctccacaactttgatatatggacttttgccaaattatttctagattttgaattccacttttgggctagttttagggtttcaaatgagtttcatttgtgtttcagcttcttccatggattcatctctttaatccatccatcaaaacaaagttactctctagtctaagatccaactttagtatatgcagctcattcccaaccagtcctcggtttaggaattattttgtttatccataattccaagcaagtttttcaacctaagtcctatactcaacacacaacatcacacttttgaatcgaaaattttaacctagtaaatgcattctaggtgtaacaagcaagttaatgcaaatgcttatgatgacatgtcagagttttagttcacgtaacaccaggggtgttacagccttcccccctaagaagaaatctcgtcccgagatttaaaagtctaggcttagtaatggaaaaggaaatgcgtcaccggtttatttcctagttactcctacaaggcagggggtgtgcccccattggtttataccaaagacaacttatacaaatctagggtttacaagacactaggaactcaggaatatacttttccaaatacttctctgactactacatggctttatcttccgggtgttagttctactgtatctcgtaaaactcgataacttttcttcgagtgacctgatccttttgatctaacagatttatgggatattccgaggaggttaaacctggtttatggttaacatataaaatctcaataacatatttggggactcgaagacacttcttccattgggacacgtggaacacgtcgtgcactgttgaaggtccttttgtaactgtaccttataagctataggtccaccaaaatctctgtttcaaaccttggtacctattgctacctttagggtgaatggagtcccggactgcaacccaatcgcaattccacatccctttctggaggcaactagtcaaatctttgaggaacacatccgagaactccctcacatcaggtatatcctttacttcttttacttaaactactgatgtagacgaatcttattatttcctagaatagcctcactgaccatctccttatatccttcaaccaaactaattgccatcaggagctaaagtttcacattaagatcacgtaggatgtattacttttttttcactggcatccacataatccaaaacatactgggataggcgagtaaacctctcaaatagtccattacactcgcttcttcaccttgctttagatccaaaaacactttgaactttatttatataggggcttatggaacatgacgtgcccgaaatacctcacagaattcaacccgagaacttaaagtccttctggctgcagcgcaaggtattctgcccaccaactaaacgtggcttccagtcttcaaaaacaaggaaaggtagcatagaaaggtaaagacaaacaacataaacagggtagacgaaacacgtactaaagctactacatagggtgtttaacttaaagttatatgtcatgatgcatgctcgtcctattcgtcctcacaatcttgctagcatatagtggcttgcacgctctatggcggtggcatacctactcactccggagttaactagtcgtaatttcctagagtttagtcagtgtacctgcagaaaattccattacagcccaaaccccatgatgcaattcacacatttggtcacagtttatactccatatatttctatatggaggccagctcctcattaagcgccgagccacgcataggcgccgctgccacacttttaaccacagggcagcccattgtggtaacttaccttcttacctgcgcgtaggtgcgtcgttgcgagtacattacacttctcagtattctcatgtctatatagccatacacatccatggggtactgaatcccggaaaagtaattactccacatcgcagccttcatatatacatatgtggaacatgtatataatcaagcgccacaattaagcactcccctagaccgacgtttgttcggtcatgctctcacaactcaccttgacctgagcgtcgatccattcaaaactgaatggcactaaaaataacattacacatgtatgcattacccttcccaggttgtgggttagtggttagcatcttaaactaggccaccttatagtccttagttttaaccacatattatttgcacttctactatcaggccttgattatagattcttaagtttataaaaatcattttgaagtttattaaaggattactttaatatccatgctaatgggggatcgctccgataccacgctgtgacagccctcccaagttatcaggcccacatgcaccaacccttgccattaacggcctcatatggtcgtgcacgtgtaccgggtaacttaacaaggctatcgagttcatcgactcgaactcatcatcccaaggatctcccacataacaggtatattacagtaatcacatttgatacacacacattggagatagagcggaagacttttacaaagtacactttacattccagaactcaagttttacatggtagaatgagatgtatttattacaagtcctgatagtactcgaagtgcataacttattacaataattggaagggtgaatccttttcataagagatatataaaaaccttctaagcttcaagtcctccacatgaagtaactaacccaaagataagggaataaaacttctcctacaaaaacaacaagggataaaaccctgagtacgcaattactcagcaagac

SEQ ID NO: 12576 - DNA, 165 bp, Zea Mays
attagtgtttagttccctatcatgcattggaatatcttgtgatatttttcattgtgttcatacatatgcatattgtatctcattaggaccgagagatgacgatcgagcaagtgatgtgatgccaaccacaagaggcaattggtggacggtctgaagaataataga

SEQ ID NO: 12577 - DNA, 210 bp, Zea Mays
catcttcggattgcctttgggctttctttggcaattgctcatgctgatgctgtcctggccatatgttttctagaaactaaatgaactgagtccttttgtatggctgggcatgttactgtttgctttccttgttgatacttgtagtgatggtgggttggctttcctgttggatacctgaatcaggttgttcacagatcattctgaaaaggc

SEQ ID NO: 12578 - DNA, 358 bp, Zea Mays
agccgcccagcccccacgcacaccatgcagcaccacatcccccgcgcgcgtcgtgcgcacgtagcaccatgcccagccgttccggtcccacctgtcataagcatcttcatccaaccatcccctccattcccacacgtacaaacaccccgacgatcgactccaaaatcgaaactgccagaccctcacctcctcctcgccatggctgctccgtgcacagcaaccgcacacttctccagcgagccgtcgacaccgtcgatcctcatccgcattcgtggtcgctacgccctccgatgccaaggtaatcccatgccttatcgtttccgttcccctttatcgagacagccgctgttgcgcatcg

SEQ ID NO: 12579 - DNA, 266 bp, Zea Mays
atcccaaaactcccttagatttttcccatcatatgcatacactttgtttgatcacaagcacctcacttagattttatttttcaacacctagattatctactaaatgatttgttcaaaaaaaaagaaaaaggaacaaaaatggaaatgagttgtaggaaataaaaagaaaaagaaaaaaaagtttccccctgctgggccaaatctggcccatgccgaggccgcctccccccccctcgcgccagcgctcccccctttcggcccattag

SEQ ID NO: 12580 - DNA, 520 bp, Zea Mays
agcaaacgaaatatcgggccttgttgcaccagtaagatacatgagtgaaccgacgatctgagagtatctcaattggtctaaaccaattctcttgttcttttgcagtgtcacactgggatcataaggtgttggagaaggtttgcaatcagagaagccaaatcgcttcaaaaccttttcaacatagtgagattgcgagagagtaatcccaccatctgccttaattagcttgatgtttggaatcacatcagcttcccccaaatctttcatatcaaaactctttgatagaaaagacttgacctcattgatcacatcaatgtttgtgccaaatatcaatataccatcaacatataagcacaatataacaccttcgccccaccacagcgataatatacacacctgtctgcctcattaatggcaaagcctgcagacgttagagtcgtgtcaaacttctcatgccactgctttggtgcttgcttcagaccatacagagatttcaataacttgcacaccttgctttctt

SEQ ID NO: 12581 - DNA, 211 bp, Zea Mays
aaaaaatactattatccatgttagctcgtgtgacccaccaaaatagtaggtcccattgcaatataagttttcatgttagtcatgttcgcaatatggttaccataacatgtttttcataataaatagataaaatctcaaataaaaaaaataaaaaaaacttaaatacgaatgacttcaaactataacctaaggtttggccaaagccttttcc

SEQ ID NO: 12582 - DNA, 500 bp, Zea Mays
aaggcatctttagcttcagctctagatatagccttgtccgccactttaatgtcatcattcttctcaagtcttgagctctttcttacgccatcagatgtagacacagggacctcgcttgattttttgcccatcagatcttgtttttcttcttcagttgagggaattaaaatcatctcacccactctagcttgaaaatcagtttgttcttcttccacctcctttgcaaattcttccaattcttgagaactcagcagatcatcttcattagggtcaaaatcaactttctcatcactaagatctaccattctcaaacccacaccagatttatctttagaaatatccatgaacacttcagaagctttaagggattctttgccttgagaggaagactctcccaacctaaaattagatatagggtcttcatctaaagcttcaccctcatttctaggtttttttccagatttatcgaacactggatcatttatcccatgaatatccac

SEQ ID NO: 12583 - DNA, 853 bp, Zea Mays
caggttgtttcctgagtacctctccgtaaggacctgctcattgagagaccacccaggataaaggtacaaccatgagggtggaatgggacgcccttagctgattaattagatgaacttaggggtgtagttggctttgccgtagggccgtcaatgggagacggggcatagtgcttgctctgctaagggtgggtgtcgaggttcattcattttggttttgttagtcacccaccttagggaggagtactgtgtttgtacgactggtgaaacctaacgagcaactgcacaccaggggaatctttgtaaaggatacgtagtgaatccctagccattcacctcgatagtgaagatcgggtctgtacaacccaggctgggaagggatcatgactcgtaggtaaagtgtgcaacctctatagagtgttagaaactgatatatcagtcgtgctcacggttaagagcagccttgtgatcctctttgattaggataactttggatacttttatgatgatggtaaatggtgatgattataactctgatttcgagtatttcctattggagggagtacttttgggtaataacttgggtttattactaaaacttggcttttctactagtaataaataccggaccaactaaaatcaactgctttaagcttaaccccacatacaactagtccactttaaccgaacgggacatttgctgagtacgttgatgtgtactcactcttgctttaaaaaccacccaaccctaggttgtccacattgccatcagtgctcaagtgaagatgaaggcaacatggaggactttcaggagtttcaagacttcgatgagttctagtcatgattagtggcaaac

SEQ ID NO: 12584 - DNA, 304 bp, Zea Mays
aaactaccaaaatagttcaggggtaaatagggtataaagataatcaaactagggtgacctattgggtcccatcaaaattaagtctatgcatgataaaatgattataaagaacattattgggtaaataaaagtgatcaagggcacaacttgcctgggacttgagattccaggtaccaggatgattcttcagatccttgtgacctcactgctagtcgtatcaatacaaacaaacatggtatagacaaaattaacatcacaccaaacataagaacaaactgaataacaatattctacacgtcttaac

SEQ ID NO: 12585 - DNA, 111 bp, Zea Mays
gctacagtctagaagttataacgtttacgccaaacaggtattaactataacatttagttcgacatgattatattaatctacctttattaaatgtagattaaaattactact

SEQ ID NO: 12586 - DNA, 302 bp, Zea Mays
attctcatcaagcacaaaatttaaatcttaaattgatttgtcgggctcctccttattaagaggagtaccctccaaaaattaacgtatgctgtttaatgtggagagcacacagcattcttctattctcagtcctatagtaaggctatctccaacagcccttaggctatcggctatctccagcagcccttaggctatcataagcagtctctttgctgctataaataaaaggtgcattgtatatgcaccaaatgctggcctaagaatatagggcggaagaatagttagctgtgtgctcaccacgc

SEQ ID NO: 12587 - DNA, 453 bp, Zea Mays
ctttcttggtttgtgttgaaccttatcacctgtaatagatgaattctagacaaactagttagtccatgtgtttgtgttggttgtcaaccaccaaaattaattataggaaatggttaaccctatttccctttcaatctccccatttttagtgattgatgccaacacaaaccaaagcaaatgaagagtgtagaaatgtaactcgtttgcaatttgagatgattatgcataggttacttagaattaaaccaatgaaagatttagacatatgactaagagtgaatcgattgcttttctttttatttaacattttggaccatatttgcaccacttgcttatttttgcaaaccttttggaaaaaatcctttcacaaatcttttgcaaatagtcaaaggtataaggatgtgatttcaagaagcattttcaagatttgaaattcctccccctgtttcaaat

SEQ ID NO: 12588 - DNA, 387 bp, Zea Mays
aaagccttgtctttgccgaaaacttcatttccctttcaatctaagacaaatattttctccataattttcctcatactcatacgtatacgtacacctttggtgtcatacagtgagctatacaagctaatttcacttatacatgactaatacatgcttatttcccactaatcctcgcatcctcccactaatcctcgcctcttccccctaatccccccacctagcctataaatacaggggcaagggcgtcctctcaatccaccccaagtcatttcatgtcaactctctcccccccacacatgcccactccatgtcccacacaagcacacactagcacaaggatagttcgttcttcgatcgttcgtccacctgttcttagtttgttcgttc

SEQ ID NO: 12589 - DNA, 1387 bp, Zea Mays
atcgttcgttcatagactctattcattgttcatagttcatattcatcgttcatcgtttgttcatagtccttattcatcgttcagcgttcattcatagtcactattcatcgttcattgttcgttcatacgaactattcaccattactattcatcatactattcatcatcgttactattcatcgatgatatctatcgttactatttcaccgttactattcatcggtcatccgatcatcccaaatttcaactactcatccatcatgctgtccagctcacctaagacctgccataccaatattctagtcatactaactccggtgactttgattttccttccagtaagaacttcccatttggtcatccatcccagatttctccaagttgagcacgcttaactttgagattctttcgaactaggattccaaactcaaatttcaataattcttgtttctaaattcttatcaaattattccctatccaaccatgtcatcccttaagcatggttcatagtgcaaaaaactcccaaaatactcttgtcccatattctacctataatttctctattcagactaagtcagacgattcattcatcactattctcaccaacagtgaactctactgtactacaccacgtacacccagctataaatgcacccagttaccctctccctctccacacacttaacaccctcagccaagacaaacactccacccactcagttacccggctctgccggctacacgcatagcgtcgctttgtctccaatctaccctcctggtaagcacctccactccaccaccagtaatatcgcaacaccacatgacacagattctgctcaagactctacccatccatatattgccattctgaccactatactaaatatttgatgatatacttgctggtttgtatgtttgcttgttcatgttgcatagttatcggagcgttcgtgctgtcttgtgaaggccagatctgcaagtctacgccagacagtggagctagaagccagttccgcgagctctcaccctttcgccagttaagcaacggcaagctcactggatccctttgatgcataatttacctatgccttttcaaccacaaccctcagcctgttattttatgcatgatatgattttgctgctaagagacaaattattatggccacccaaccttagaactttgcctcaattaatcttgatactctttgacatatttattacaaatgatttgagaaaaggtgtgagttttcaaaagaaaatgtttttcaaaaatgagtatgatcaagggttgtcacccttatcacctttgagcgggataatcagggactccctagtttaggggagggcctaaggtgatggctcagctggtttaggtgtgagcatgaag

SEQ ID NO: 12590 - DNA, 228 bp, Zea Mays
gtctaatctacgtgaccaacactgctcgatgtcactgggatatgtcctcctgctagacacaacaatggacaagaccaagaaggattatgagttgtaacatcatctgtgtcatgactcatggtcagagttcctagaacaagctgtgtcagagacgactgctccatcaagtagacatgttggtgatgcaatgtttgcactgcaaaacaaagcgcaccaaattcaagaaag

SEQ ID NO: 12591 - DNA, 272 bp, Zea Mays
ggcggagcaggcaaccaaagtggattagggctaccgcaataccaaagagcatcctatctaattcgtaattcctaacgaacgtctagtgcaaacaaaagtaagctagccattgtggaccagatagattcgcttgtccaccgacccgatgcatatgcactgtcagcgatttggagtgggccactagtagtggagccacacatgtctgctgaagtctgagccacagatctgcttgcagcaagtaaataaaaaaaaaaagaaaaatggcggttcca

SEQ ID NO: 12592 - DNA, 930 bp, Zea Mays
gtgtttttcgccttcggctcaaaaatgctaattttgttcacatcaaagcactttatacattgatggaaaggtaagaatatattataaggtatggacaaagtccacgaagtaaaatttaattacatcattctttacacaaattattacaagagtttttagagctttttctacagactattcaagcttcgtctgtgtccatggagcttcgtctttttactcctcagcttcggcctcggctttgtcatcctgtacgcattaaagtactgtaagcaaaattcaatttcgaaggaagaggtaagtacaaggtatgattttgttaccggcttaagatgacttcgagtttcatcaccagctttgcttcgtccaccctttgtccataccaattttataaatctattggctatgcttcgggtaaggttgggaatattatccagatctgctggtgataagctgaaattagatctattgataacctttccgtgttcacagccagacttcaggaaggcaacagctgtgccccgagaagctaccagggcacagaagtcaccatgtccagctatgacttcgtcgaggtcatcaatttcaccttcgatatgttcgaaggcccctggcaggtcttcagacgaaggatcaaatttttcgctgcttgctccaaccgaatagaagacctgcttcagccgttgaacacatcgtttactgaattccaaacatttgttttgaaggcttgtcaatgattttttcaaatctgaatttttctggacctcggcctcaaactttgcattaagctcttgcttttcttgttcaaagtattctgattggcagagaagcttcatatttaattctgctattttagcttcagcttctgccaataagcctttggttgtccgaagctcgaagactttcttttcaataacagctgattggtctttt

SEQ ID NO: 12593 - DNA, 766 bp, Zea Mays
cttcacttgggtattctttttacaggataaatcaaaaacccaagggaccctaaagcactttctaaggagggatcaaaacaaatttgagctcaaggtgaaaaagataaggagcgacaatgtgttcgagttcaagaatgtcacacctgggtttcggggcaccaagacctgggcgcgaacataatcaccaggtgtgctgggaccaagtctcacacatatgatgaatcatggcacgggattgaatgtcacatctttactatataataggagttctgtacaaaataaatagataattacattataagtagacaacggtccagcaacccaaagttgactgggagacgacgacctagacctctcacgaactcgtcacaacatccttcatacgcctcatcctgtggtacctgttcttgacctgtgggggggtgtgagacagcaagagtgagctcacatacgttcatcgctcaacaagttgtggggaataatgtgcatgaactcttcaaaggtgggagctcatgtgaagtgtaaggcttaccaaagaggatggttagagctgagcattgcttttaaagttggtcaaaattttattagcagttactaagtataagtaaataccaacccaattaagtagtagaacaaaagtaacaacatcacctgcgatgcaatgcatatgacaaatcgagtttaagttccataatttaatcatcagagagtcctgagctgctcatgaccgtgagctcggctagtataccagttttacactctgcag

SEQ ID NO: 12594 - DNA, 414 bp, Zea Mays
cacagacccaactagaagaaaagaggagggaacgttaagagatggaggtgaggataatagcagaacgggcgacggctgatcagaggatggtggaaatgttccagtacatgcagagccttggcaccgcacagggtttcgctccgccacctccatttttccctgcagttgaccctgctctgttccatacttctgtgagtatcaaaattataattacatgttggtaatgcatctggtataacacatgcaatctcttctctgtgcagggccaatctagggcggcatccaacaaccctcatgaaaagggttcagcccaacgtagcacgaatccaaccgcccacctctatgagagttatgtttttagtgtttcgaacacaaaacttatgttgaatacttgtcagagcttgtgaacttgtg

SEQ ID NO: 12595 - DNA, 847 bp, Zea Mays
ctttgttatattatgaaattataaacataacatctatatatatgacataataattttaagtaattacccttttaatttaattggagcaccaggtcgaattgaatgtcaccacgtataaatgtcatgtgaccatccaatacgtttgacaccgtatgtaaccttatatttcttcgaaataagaagaatagtttcccaaaatctttttagtggtatatctttgcaccattctggagtaggtgcgaaactaaatacagacacaaatttgtttgcatgattaatacgaaaagtacatagcctgtagagtatctccatggcataagaacctgcaaaccacgagacattagaattatatgtttgcacaatttatttaactatatagatcaaaggaattctgacttacaaatttgcaaagtgtgatgtaataattcatttgaggccaattattttatgtttttaccaactctatcgcgctagtatccttatatgacttcgcttcttcgtcaaaaccacacatttcctagagaaaacataataatataatagagaagtgtccgtgcgttgcaatggaatatataataccatgataacatataataacacgataactcatgtacaaatatgtgttataccgttataagaaaatgtttcgtaatccatttgtaatcctagtcatacataaattttattattttaatctggttatttcaccactatattgcaatatcatacaaacttctatatatgacagtacaatactcgtgtgttgcaacagcatacaaatattggatgaaatgttagtacacaacgataaataaacaatacatatactatcatcaacctcaatgtg

SEQ ID NO: 12596 - DNA, 1112 bp, Zea Mays
cttgtgttgagtaagtttagtggatgagatttatggtattatccattctgtgcgaccagtggggtgttacatagtcagctgaagttgcatggtgcttctgttccagaaagagcttcgtctctggcacgttggaatccggtgctgcttcaacagcgtgtttctgacttagaggcggcgaatgctggttagtgcttttctgcttcctttcgtttgtcttattaaactgctttttaatctaaacttcttgtttgaccgtttctcgctagaaatggctcggcagttttctgttcttgaagagaaacattctcagaatcaggctgaattggtccggcggtgctctgattttgaagaaaagtattcccaaagtcagactaagctggcccaagtttctgttgctctgaacgatgccaacatgttgaactctactctccgcgctcagcttgattctgaaaaggtgacctgaaaacccgagctttgttttgccatgttcttattccttgctcgacgtttgaaggagttaattcttgtttgcaggaagaaaaatgtgcccttgttgcttctcgtgacaatcttgacaagctatatcgagactccagcaactcgttgaccatcctggagaggagtcatcgctttaccatggaggagttagacaatcatcgttgtaagttgcaggaatccacgaacgacgtgatccgtcttaggcagttgatatcggctaaagatgccgctatcaaggaactgcgtgcttccaagaagtccatcgcccaggagctagagaccgcccagctggctgtcaaggttgctgaagaaacttccggtactctgagggcccagcgtgacagagccatggataaagccattcgcgcagggcggatcttgatgaggaggcctggtgtgactgttcctgatgacataaagggctgatgtaaacgctgctcccgattcctcaagtcgcccttcttcgtcagtcgctcctgagaagaatgttgcgaaatagaaaaacattgcgcgtttgagcgcgcggttatcgtgctcagatatttcgttagaggacacctgcttgatatttgaatgctactgttatgcccctgttgtttataattccacagtat

SEQ ID NO: 12597 - DNA, 1324 bp, Zea Mays
gtgaatcccaagtatttccattaaacaaaggtataagagtatatcaaaaacacttaagtgaaaccacttaagcaaatcattggcaaatcatcggatctcgatttatttccatcttcaagttcaattatcatgtgaggagtccaggctactcataaccgtgagcacgactgatatattagttttacactctgcagaggtgatacaactttacctacaagccgtgtatcccctctagcctgggtcggccaaaacccgtaaacacttccgaggtgagtggctagggatccactatgaggctttcacagaatacacttaatactaaccaacccgctaaggtttctaaagtcgatgatggaggcccttgggtgaggtatcttagccaagaatacgtccccatgttaacgtgggctgccaacaccaccgctccccctcttgcccatatttcaggtaaggttgctaggcactaagcatataaagctaattaccaaagccagagccatgataacactcgtggttgcactgttttcccaggtggtcactctatgttctaattatcacaatatgatcttgtttaatcatcggattaacaacaataatataaacttaccatttggaacattgatatcatcaataggagtaccagcataaagttaaagttgtagcaatagcatagctactagattaaatcataaacccaggttaacaaggaataaggttggaaaggttaggtgtatctgaataggtaacccatcaaattatgcatatatatcaaagaataaactttattaaatgtattgtttgggatcaaacagagtatatagagggagaagtccacttgccttgcttattgaaaacttgaggttcttctgcggatcggaatagatcttgattcttaactactagatcaaccactgaatatcacacaaacaaacaagaagaataaacaccactcaataacatacaacattcaccatacgtaaagctaaaagaaagcctaatggaaagagcgtttgcttttcaaaaacattacacgcaagggttataataaaaaggtattctttttcaaaaatgtgtgatctatactttataaaacaagacatgggcttataaatatcttaattaaaatatacaaatattagtgtcggcgtttcggacccggtgggggggggtctctggaccgactagtaaatttgtcgctgtgtgtccctgcccagatgggttggtgcgagatggaacacaaggggaaaatgagccttgtattatcctgcaccagggtgctcgtagtaggggttacaagcgttgcgagagagcgagagagagagag

SEQ ID NO: 12598 - DNA, 148 bp, Zea Mays
cccttccaccttttgagcccccggatggggtgctccaacgccgccttgctcttactgtcgttggaggagcgcgaccttgtggagatcgacacctttcagccatcgctcggctctaaggattttcgttgtgcagcccggttgcattccc

SEQ ID NO: 12599 - DNA, 317 bp, Zea Mays
ctcgtcgttctcaagatcccgctatcaatacggaagtcgaaagcacaaaggttgttttggtagaaaattttttcgaggaaaattttgacgcagagggggctccccccttctagcccccgagggagggtcgggctttgctgaggcaaggccgacccttcctcgatggttagactgtgtatgtaaagagaacgaggtatatgaacgacttgaaaacatcttaagggtagaagcgacgtagctgttggatgttccaagcgttgctgtagacctcgccttggtcgttggccagcttgtatgttctgggcttcaagatcttg

SEQ ID NO: 12600 - DNA, 228 bp, Zea Mays
gtcagagcggagcgagcggcgctgttttcctgtcatatcagacagtaaagaagaggggcgaagtgactgcggtcactttggcctggccgactgaggcacgtgtgtcaggatacggcgtcagacatcccctgcatttaatgcgcctgcgaagcggtcggttggtgaggcggtatggccaaggttgcttcacaacgaagcctgcccgagccgggcctcgggagagctgag

SEQ ID NO: 12601 - DNA, 290 bp, Zea Mays
gttgtcatacttatttagtgtagattgaaacatagcctttgcggtagagatagcaacacttagacaaaacctagtttgcacattctagttttgattcttgcataggttttgctctagggatttaattgtggccaagtttagtaaaagtttagaagtcctaattcacccccccctcttaggcgtcacccgtttccttcaattggtatcaaagcctggtttggctcatttgaaacattttagcttcaccgctaaaagagccgacgctttttagaggaagggatggataccca

SEQ ID NO: 12602 - DNA, 635 bp, Zea Mays
cccagggcgatctctatgccccacgaaaaaatttcaaaaccatcatgatacacttacttttacgactatagataccgttgaattctaacaacgggaaagcaataacagcattcagtactaaaaagcgttttctaacgaagcatcagagcacactaaccacatgatcaaagcacacagtgttttctatttgggaatgtttttctcaggagcaatcgacgaggagggacgactcttagaatcgggagcggcattcacatctgccactatgtcgtcgggaacaaccacgccgggtctcctcatcaggattcgccccgcgcgaacggctttgtccatggctctgtcgcgctaggccttcagagtagcagaagtatcttcagcggccttgacagccaaccgagcggcttctagctcctggaccaccgactttttggaagcgcgcagatccttgatgacagtatccttgttcgacaccaattgcctgaggcgaatcatatcatctagagactcttgcagcttatagcaatggttatccaagtcctccatggtgaaacgatggctcctctccaagatagtcaacgagttgctggcatcgcggtataacttctccagattgtcgcgagaagtggcaagatcac

SEQ ID NO: 12603 - DNA, 256 bp, Zea Mays
ggtggactcacccgagaaccgagcagggaacggcctgatggcgtcgcggtcggagcgcggctgctcgcagaggtaaagtcgtcctagacgccgggccagggggtagacgacggacaccatggtcgccgggctcttgctcctcctgctgctgcgtggtgctgggaatgaggaggcgtggggaagttgggtgagagaggagcacttgagtggggcatggatcagaggagtagttttttgcggagaagaagaatagtgg

SEQ ID NO: 12604 - DNA, 154 bp, Zea Mays
tggcgtcgcggtcggagcgcggctgctcgcagaggtaaagtcgtcctagacgccgggccagggggtagacgacggacaccatggtcgccgggctcttgctcctcctgctgctgcgtggcgctgggaatgaggaggcgtggggaagttgggtgag

SEQ ID NO: 12605 - DNA, 307 bp, Zea Mays
cgaattgagaagattcagcccagctaggctctttttcttttctttttctttttctgtttctttttatttttcctttactttccttttttcccccttttttttttgaattcaaacttgaatttggatttggttatgagttcctccattgagttaattacacaaattcaaactctagttttggaaccatatatttttatttacttatttttctcctcataatattcatttcttctcttttctaaattccagaaatcattttggacctcaaattccactctagttttaacttattcattttcattttttt

SEQ ID NO: 12606 - DNA, 741 bp, Zea Mays
gcgcggtcatcagtagggtaaaactaacctgtctcacgacggtctaaacccagctcacgttccctattggtgggtgaacaatccaacacttggtgaattctgcttcacaatgataggaagagccgacatcgaaggatcaaaaagcaacgtcgctatgaacgcttggctgccacaagccagttatccctgtggtaacttttctgacacctctagcttcaaactccgaaggtctaaaggatcgataggccacgctttcacggttcgtattcgtactggaaatcagaatcaaacgagcttttacccttttgttccacacgagatttctgttctcgttgagctcatcttaggacacctgcgttatcttttaacagatgtgccgccccagccaaactccccacctgacaatgtcttccgcccggatcggcccggcgaggccgggccttggagccaaaaggaggggcggtgccccgcttccgacccacggaataagtaaaataacgttaaaagtagtggtatttcacttgcgcccggaggctcccacttatcctacacctctcaagtcatttcacaaagtcggactagagtcaagctcaacagggtcttctttccccgctgattccgccaagcccgttcccttggctgtggtttcgctggatagtagacagggacagtgggaatctcgttaatccattcatgcgcgtcactaattagatgacgaggcatttggctaccttaagagag

SEQ ID NO: 12607 - DNA, 179 bp, Zea Mays
ctgataaaatctttgctattgtgcttgataatgcctcatctaacaaaactgctatggaagttctaaaaccagtgttttctggttacattggccatttgattcctatgcctagtagaaatgaatatgatttgagtgctattttcttgcatcagcgttgtggttgccatataattaatttg

SEQ ID NO: 12608 - DNA, 81 bp, Zea Mays
cagcatatccttgagagtctttttccttagacgggtaagacttgtgaaagtacactctgtactcagggttttcgaacccat

SEQ ID NO: 12609 - DNA, 701 bp, Zea Mays
ctgtactcattttcacagaagcacagagtcacacactcgactcctttctcgcagcctctcgagctctctactccactcgtagacctcgtcctcctctcctcctgtttcagcctccgtgtagacaggacgcaaacaagtcagcagcagctcgtttgtcagagtggcgcagtggaagcgtggaggtggcagggcgctgcggttggcgactcggtgcggtctgctgctggtgaccgcgcggctgcgactagccggcccacgcggagacggtgagccggaagcagcagcgcgggcggtgagccggaagaagcagcagcagcgcggacggtgagccggaagcagcagcagctctttgctctcaccactcccttgccttccagcggtggggctgactgcgctcgacgggagcaggcggcgcggctgcgggcgtcggggcgcgcgcgcttagcggcgcgtggcgcgggcggcgtacggcgcgcgcgtcggggccggcggctgcgcgcgtcggggcacgggctgcgggagcggcggcgggctgcggcggagagacctagctccgtataccatgttgttttctggtgtgtgttaatctcacacagcaccctcactcttttctattatactttaccactttacaaatagacccttcaacttgttcataatacaccaacaattacatatttgttaagaaagtattccttaca

SEQ ID NO: 12610 - DNA, 197 bp, Zea Mays
tttttttgctagaaaattggggatgttatgtgtgttttttttagtgcttgatctaaaggatccagcaccaagagaggagaaaaattttgcgattaaatgttcaagctctaaatgcgaagctatgaagcatttgttccgaagttctttgagtcaatcaaaggcttggaatttacacatgggggtttggagaatgcttg

SEQ ID NO: 12611 - DNA, 3457 bp, Zea Mays
gtaatatcccaaaaaaaatgttgccaaaggtttatcttcggtgcgtggatgtggggaaagagttgtgggccgttggatgcaaagtcaagagacatctgaggcgtcgtttctttctcccacaaaaccctagtggtcgcccccctatttttcccttttcttggccgccaacccccccttttccccacccttggccgcccctcccccttccccttgcagccaccctccactacttcctcctctctctagatctccccccacgcagcaaggatcgagaagaggaggaacaagatggattgaagaggaagagaggatcaaggagatgttctacccccatctcttgcagattttctttgggaaaccctaggtaaggataggatccttgttcctccctataattatatgcttttggaggttgtggatcatgtggattgaaggattagaggttggattagatgtggggttaggttttgatctcgaatttaatttctgcagaatgatagattcgacagtttctgttcatgtcagttttccgtggtcttagtggcctcaaaaaaataaaaagtttatatatgagtcgtagataatttgtagatctttccgtggccacgaagaacacctcaatcggacatcagaacagaaagttattgcagtttgattatagcagtttttcagtctcataattctgtacagaatctgttctcttaagagttaggcaattttatcaacagaattaaactgtgggttggtaaaagaagttgtaggtaatttcataatctttccagattgttaaagagtgtattcatatgatttataaaactccagttatgtttgttttactgtggctgttcctgtttgcctgacaaaaatgagtgggtctgttcactggtgggtttcatctagtaaatggccgaattggctcttccaactgtggagacttttgtagagggataaaagttcttactgccagcagaattttataatttttggttcagtagtttgggagatatcgaattttgaagttaactaggctgctgtctaaaacagattcagtcagttatcttgtcagatgttttagaatatattgatggcagaatttaattatccattgaataccgaagttgtagattgttttgtgtagatactcttagagtatttgtttgatattaccaatgttttaattttaaagatacaaaattaacaaacagcgttgccgctgtatagcatgtggttcagggtgggagtctttccactatgtcttggtttcaagtgtaggagtgttttgttgattgttggcaaatgtttgtgaaatatttgtactaagttttatgcccgctagcaggtggctacactccagatcatgcctagtacatttttcttcttcgatgaaggcaagtgaatgtagcggtggttgttatcgttttgacctgttatttctatcacctacactttaatatgcagaattattggattctttcctaattgaactctatgatgatgttttacttgattgtattatgttgatgctctatcatatattgatgattattatggttcaagtatgacccatgagattaattcatacccctgaaggcagatgaagtcttatttgaggtttgcattgtatctaaaggcatacgaagtattatttgaggattgcattgtatctgaaggcagataaagtattatttgaggtttgtattgtatctaaaggaagtgaaatttattgataaatgcagcatgccatatacattgcatgactcatttgcatctgaagttttgtcgtgacctatggtccgaccgtaccggtacaacttagcatcgtacgttgcccgagaaggggtacgatgcagcttcatacccttagaggtatgaaggcagaggacatatgcattgcattcatatgcatacattgaagtgatatttgcagatgatgtggttttataccctcagaggtatgaagataggtgacctacacattgcattcctatgcatacattgaagtgatatttgcaggtattgttgatgcagggaagtgttatacaacatattgtggttgttcgaggaaatgagatggtattggttatattgtgactactgagttctatatctacaagtatttctgatcttgattgtgattcttttaaaatgttgattaattcaatgtggtttaaatatctcgtcaaaacaattagcttgctgagatgtttcatcttactcttgcattactcaatgcaggtgcttgttgctcatcaaggggagtgggaagtagcagcacatacaccttcactctcataataacgctgcccaggcgcagttatgatttaattagaaacttcttgtcaaaggatgtttgtttttaactagtcgtgcgcactcgttaattccgttcatgtcgttatggtcgtcttcccattgctagcagattattaatgtctattatgttttcttatcatgatatctatttacactttgttgcttccccgtttatgcaattttcaaaggagacactgtcgaaattttatatatgaatgttagatgtgtagtttagtagcattctggggtgtttgtggatcccggggtgttacaaggaggagctcaacaacttcaagcgcaatgaagtttggacactggtgcctcgtcccaagcaaaatgttgtgggaaccaagtgggtgttccgcaacaaacaggacgagcacggggtggtgacgaggaacaaggctcgacttgtggcaaaaggttatgcccaagtcgcaggtttggacttcgaggagacttttgctcctgtggctaggctagagtcaatccgtatcttgctagcatatgctgctcaccattccttcaggttgttccaaatggatgtgaagagcgctttcctcaacgggacgatcaaggaggaggtgtatgtggagcaaccccctagcttcgaggatgaacggtaccccgaccacgtgtgtaagctctctaaggcgctctatggacttaagcaagccccaagagcatggtatgaatgcctcagagactttctaattgttaattctttcaaggttgggaaagccgatccaactctttttactaagacatgtgatggtgatttgtttgtgtgccaaatttatgtcgatgacataatatttggttctactaaccaaaagtcttgtgaagagtttagcagggtaatgacgcagaaattcgagatgtcgatgatgggcgagttgaactacttccttgggttccaagtgaagcaactcaaggatggcaccttcatctcccaaacgaagtacacacaagatctgctaaagcggtttgggatgaaggacgccaagcccgcaaagactcccgatggggaaccgacggacacaccgacctcaacaaaggaggtaagtccgttgatcaaaaagcataccagtcaatgatagggtctttactttagttatgtgctagtagaccggatattatgctt

SEQ ID NO: 12612 - DNA, 1110 bp, Zea Mays
catacatgtgtttatgcctttgatcatgttcattctgcattttgttgcttattgtggtgctcaagttgtacaaacactccctggacctcacaagtcctatttgcaagtgatgcacatatttagggggagctgtgctacaacttgaccctttgagactaaccatgtacttgagtttggttgttttagtctccaaggagaattgaaaggaaaaaaaggtggacttggaccatgcaagacttccactgcactccgatgaaaagagtaactcttccaagttcatctttatactcttattgcctattttgctcttagttgaagattttggtgaggcaatggggttaaagggccaagattgctcccgttttggtgcttggtgcccaaagggggagaaaataaaggccaaagcgataaatggatcagctaccacttgagagattttgaaaatagtagaatagagcttttggtttgtcaaaactcttttgttgtctctcttgagattttgaaaatagtagaatagagcttttggtttgtcaaaactcttttgttgtctctcttgtcaaaagttggcttcttgtggagttggcttcttgtggggagaagtattgattatgggaaatagggggagtttttgaaatctttgatcaatctcttttggaaagactctctttatgcttcacatgtgtgtttgacttagagatagagatttgagtttgatttgcaaaaacaaaccaagtggtggcaaaggatgatccatatatgccaaaattgaatcaaaagaaatttgagttttatttcaagtgatattgcacttgttctagttgctttatgttgtgttggcataaatcaccaaaaagggggagattgaaagggaaatgtgccattgggccatttctaagtattttggtgattgagtgccaacacaagtgcttaaatgtgaatttatgctcatggatggacaaagtgcaaatcaagagtaaaggtatgtttctaagccttagtacattggttttgtgtactaatatacttgtctaagtgttagaaacagaaagaagaagaaaagaaaagaggtgaaaaagacttggctgtgtacagccaagactcagctcagtc

SEQ ID NO: 12613 - DNA, 310 bp, Zea Mays
tttttttggctgcacttttatccaacgtaatttatatggatcgatgagggaaattgaggttcactggagtacagccaaatgagccctgtgatttatattgattagctggtctgtgggaagggacaattaggcatgggtgttattggcctccatgtggagccactttacccgagatgatagggccagctagctagctagtctcaagattcttatcagaagacaacggcgtcattagcttactacaaatacaaaggtgtgtagaggggagtgccagaatttgagctgaaaacgaccagtatcagtgctgaat

SEQ ID NO: 12614 - DNA, 393 bp, Zea Mays
gcagacgagctatgaacatctcgtcaagccgtagttgtcagccgaacgcgcgtgccctgttgtttgttcgtttgctttccgacgcgccgcacatgctgggacgcgtatagacgtagcgtttattcgccaggggcagagcgtttaccttggaccgctgactcttcctcctcggctcctccaacaaaaacaaaacgtaaaggagagcgcacggggggaagaaaagtattgccgcgcgcacctgcattgccgcgcgcacgtcactggcgggggcggacaggtaaagcgcaacagccgatggaggaagggccgacgaccgtgagcgacgaaaagaacaaagaggaatgacctacctgcccgggcacaggcacagcaaccccctcctctgtgctctcc

SEQ ID NO: 12615 - DNA, 972 bp, Zea Mays
gtccggtggtgccagggcaggcccggccggggttggtgaccgcgacctgcaagccttgctcgggacgccgctgtcggtctcggcccgttcgttgccggccttcgcctccaagcaagctcggagccgtccgtctgtccgtccccttcccgggcgatggatccctgaaaccgatcgaggtcgccactccacctactgcgtgctgtgtgctgcagctcaccgtgttctcgtgcccttccgatctgtccttgtctcgcctcgcgtcaggcttttgtttttttttcttcttctcctttttgcgctgcttctgcttgcttcgttcgcgtgcacactgtgcgtgtgcgtgcgtgctctactctactctttccctccccgttgggtcgtcctgcactgcatgcctaggctacctagccacctaccagtagttgcggtgcgggtgaggcggctgatggcacggcgggcggcaagtgtcggttcctggcgagcctgccgtatatacgatacggtgggtcctccttcatacgctagctaatcatggcttgcaaacaacagcatctggatttattcaatgattaatccggttacgtcgtcgttggagcccacgggaccgatgacgagcatcccaagttgtggagatgaggagactcttccgtccgcccgtgctcgggtcgggtcgggtgagctgtcgtcgtccccgggacaggcccaggccactaggccaggccacagtgtgccgctgctgcctcgaggttgtacagtatgtatgtatgcatccgatccgacccttagctgagcctgttcatgagtgtgttcgaatcagattggtttaatggagctaattggtggttagagtctattattagccattgttagggttggttcgtgagtctgacttggcatgcaacgggaatggacggatggtaggagatcaaggtgcagcggcgggcgggggatggtccagcgccgccaccgaaa

SEQ ID NO: 12616 - DNA, 405 bp, Zea Mays
ataaaacctttgacttcttatacttttgtttccttgccattgtattgccatccttaggcaatatctaccttgatatattaaactttggcctctctacttttctccttgataatgctttctgcctattgaattcttatacttttgttttcttgccattgtattgtcatccttggacaatatctacctcgagatattgaaccctttgtctctctacttgataatgcccttgtattttgtatccttaaaaaaaagaaaaaaaaactttctgatatccttggttgtataatttatcatcgcttcaccagttagtggttatcttatttcattattggtcattaacaataatgttttggtcttgtctaactccttgataattcttacctgactccttgactttataatatc

SEQ ID NO: 12617 - DNA, 77 bp, Zea Mays
tttaactacaacgaacaataccaaactacttaactcaagcaatgttcgagacaaatgaaaatagtttaagtgtgcca

SEQ ID NO: 12618 - DNA, 315 bp, Zea Mays
catcgacgtgtgttggcgcatgcagttgccgattactgggctgcaaacgtgctgaagacgacgacccagctcttgtaattagcggcctacacacgtgtgcgtcctaagcttgtttttttaaaggaagcagcaaaagacttgtctctttaatatattagaagagaaatagataaaagtctccatgagatggagcaaaaagaaaaacaaaaaaggagaaaaaacaaaaaaaaaaccaccaactcatctatcctaacaagcaaggtaaatcacgtggaacgcgtgcgtataaattttacagtatagaatctatcgtcc

SEQ ID NO: 12619 - DNA, 137 bp, Zea Mays
ttaacatggacactttggcttggatgtttaattagtacatgcacatgctttgtgtaggatgtcttcatctgagcctcaagttgatgcaaccactgagcctgagagtcaattaaagaggaaatcaagtgatataggat

SEQ ID NO: 12620 - DNA, 350 bp, Zea Mays
ctggcttattcaatttggatgtcatcatgttagataggatggaaactgtatgggtgggttagataaaaattaacgtctggaaactgcagggtaacaccatgaagcaggaggattaaactattatagaggcagatccgaaggggtaaatcttctctttataacttgtcatgcatgggtgctgaccaacaggccgggcttatgagggcgaacctcaccgggctggtgcacacatatgtataacctagctacacaaacggagaaaaactcaacccctcagacctgctcctatggatagaacttacagagatgctccaagggttaggaagaggtactccttcagtcacaacgag

SEQ ID NO: 12621 - DNA, 1545 bp, Zea Mays
aatcgatggggacggttgacgtgtgtggggacggagtgcccctacatgtcgtgtgtttaggtttaccttgcaaggtttaaaaactcgattcgaatcgtctgcttctcgcagctaatgagactgcttgatccatgctactacattgagtaataagtggaaatgtggtgactggcaaaagatgttggttgataaaaatgtttgataccatgtatgattagctaggtacacatctagttaaaaaggagcatactaaaacttgaaaagctaaaatataattttagactcagctagtgcttttggcaaaccaaaccctcagccaaacagctgcatgtctagaggtagaggagtagactcctcacaccgggtaagtctagctgagtattagtatactcagccttgcttgtggcataatttttgcaggtactccttaggatgatttgttgatggtgtgacttggccttcatccctgccaccgggatagacggtcgagtgggttactgcttccgcaggaaaggaccaggcggagtagcgtggccaggcttcgccatgttactcggttcttctccgttagttatttccgttgcattaaaatttatggttattatttctgaaactccgacaatgtaatcactaatgatacttattaaatttgtggtattatgttttattgtatttctctgtgcctcaccttcgagtgagctagtggtattcgatcctggataagtggcctcgtcggactagatccgagggactgacgatttattcctatttaagtgtggtctagcctttaaaacgggacttaggcacttaagttggaataattcgggcagttccgccacatattttttcctcacataaagagtttttcacaacctcacaggaaaacctaaaacctagtgtgttgaaaagaccaaattgttaatctcaactgccttccaacaccatctatcccaaaaaaatcttaaggcgtccaaaaaatacaaaaataagtatccttatctagagacgttcagacgatgcgaaaaatcacatgctgaaaaattccgaaaaaattcgagacacaattccgaataattccgagacacaattccggaaaattccgagacacaaatccggtaatttccgacaaaaaccggtaaccgaaggaaacggtcggtaaaacaccacgccgattccgataccgatttcgatagaaaattttgaaaaccgattccgttttcgaaaaataccgttatcaatgaatccggttgaaaaatttcgaaatcgatttctggaataccgaaaaattctgaaaccgttttcatccctacacaccactggtcgctggggtcgcctgaccaggccatgtatcttgccgcatgccctcatagcgtgcgcgcgcggatcacagagcgtggcccacctgttggacctatctcctttccccaaccaaaacagcgagcacggtggacagaagttaacagaccacgcgctgggcgcgtgcgattccgccggacttccgtggtttgcgctgaactccggaacggatcggtcgggctcatcctc

SEQ ID NO: 12622 - DNA, 424 bp, Zea Mays
tgtccattggggatgtgcgtcctagggaatccgaagagcctccaaatgcacaagatcaaccgtcctcctccatgcaagcatctccaccaactcaaattgaggatgaggctcaagttgatgaagggcaaaatcaagaagatgagccacctcaagataatggcaatgatcaagggggagatgcaaatgatcaagaaaaggaggatgaggaagagccaaggccgccacacccaagagtccaccaagcaatccaacgagatcaccccgtcgacaccatcctcggcgacattcataagggggtaaccactcgatctcgtgttgcacatttttgtgaacattactcttttgtttcctctattgagccacaaaggatagaggaagcacttcaagattcggattgggtggtggcaatgcaagaggagctcaa

SEQ ID NO: 12623 - DNA, 1412 bp, Zea Mays
agtccctttgctatgtgataatgagagtgcaatcaaaatggccgacaaccccgtcgagcatagccgcactaagcacatagccattcggtatcattttcttagggatcaccaacaaaagggagatatcgagatttcttacattaacactaaagatcaattagccgatatctttaccaagcctcttgatgaacaatcttttaccagacttaggcatgagctcaatgttcttgattctagaaatttcttttgctagcttgcacacatagctcatttgaatacctttgattatctcttttatatgctatgactaatgtgccttcaagtctatttcaaaccaagtcataggtatattgaaagggaattggagtcttcggcgaagacaaaggcttccactccgtaactcatccttcgccatagctccaagaaaaggaccttgtctttgggggagaaagtaaaagcccaaagcaaaaggaccgaatttcgtctttggtataatcttaactcatttacttatgaccaaaggagaagaaattacttcgagggctctaatgattccgtttttggcgattcatgccaaaaagggggagaaatgagcccaaagcaaaaggaccgcaccaccaccaaattcaaaaaacttagtgttttcccaaagtatttatcaattgttatcctattatgttcaaaaaggggatttcaaaaatcttacttcaaaaccctcttgaacactaagaggaggatttaatttagggggagttttgtttagtcaaaggaaaagcatttgaaagagggagaaaatttcaaatcttgaaaatgctttgcaaactcttattcatttacctttgactatttgcaaaagatctttgaaatggatttacaaaaggaatttgcaaaaacaaaacatgtggtgcaaacgtggtccaaaatgttacataagaaaggaacattccatgcatatcttgtaaagtagttatattggctaaattccaagcaacctttacacttacattatgcaaactagttcaattatgcacttctatatttgctttggtttgtgttggcatcaatcaccaaaaagggggagattgaaagggaattaggcttacacctagttcctaaataattttggtggttgaattgcccaacacaaatctttggactaactagtttgcccaagtgtatagattatacaggtgtacaaggttcacactcagccaataaaaagaccaagttttggattcaataaaggagcaaaggggcaaccgaaggcacccctggtctggcgcaccggactgtccggtgtgccaccggacagtgaacagtacctgtccggtgcaccaggggactcagactccaactcttcactctcgggaattctcggaagacggtgcgctataattcaccggactgtccgg

SEQ ID NO: 12624 - DNA, 1630 bp, Zea Mays
ctcactaccggcttcagcgcgatacggatggccgcaccgttgtacaacttttaccggcgcgctaacctatagcatcataggagtcgagtagactttaggagttattggggtaaagagtgggcgcggattagagtccgtagcgccgggcaattaccgcggtgaggggagggggagaaaccatgggcactggcctgggggcgcggcgttgtcaccgaccgaatcgggaggtagaagatggctacctaccgtcggatgttgtggacggtggagattagatcgtgaatatccctacgtcactttaaatcccgagcgctgatcttcaaaccgagggccgcgatggggtctcggcttaataaaatcagggcggtcgatcttggatcggagggtcatgagtgagtaccggttcggtgtaaggcagagctaatccggatcgtccatttttaatcgggcggcccacagttgctgataccccttcgctagtcgctacgtcacatttgctaaagagtccctgtgcttaattaaaataaacccgcagtccccacaggaatagtctgagtctgggaagattttatggtttattccctagggtttttgataatgaagtgctcggccagagaaacagaaaaccaaataaaacaattggaaaatactttttagagtaaaaataattacagaaacttgttaaattcataaaaaattcatattaagtccaaattagttcgttccaatttctataattttgtaataatgttgtttatcacctattgcctctgttttgacatgaaaacaataataaaattgatctcctaattaatctcatatcaaatacataaaatctttggaaattcatgacttccccatttaaactccgaattgatccgttcaagttgcgttagtcttgtataaatatttactatgcaataacaacctttattataccatgcctcattcttttataattagatctttatttaacctatgttggttactcttgttaatatgcttatcattataatctactagaagatgatctatggtcaattcataacttagattaaagttgagataattatttatagaataacttctcatatgatttataataaccaatttataatatagtttaatattttaatcacataaatcctctataaaatcataactccgtaaccgtaactctgattttagtggttctcgttcccacgatctcgtagcttcgcgtagattattattattcagtttgtacttatgtttggtgtgatgttaattttatctataccatgtttgtttgtattgctacgactagcaatggggtcacgaggatctgaagaattaccctggtaactggaatctcaagtgtcaggcaagttgtgcccttgatcacatttgttacccaataatattctttattatcatttatcaatgcataagtttaattttgatgggacccaataggtcaccctagactgtttatgtttttaccttgtttatccctgaatcaattgggtagttatgctattgctttatatggttttggaattaatatttcattatatccatgttccaattattctgttatgttatttatgttcatgataagatcattatgttaattggaacatggagcgac

SEQ ID NO: 12625 - DNA, 790 bp, Zea Mays
gttgattttgctgcgatggcggtcaggcgagggattcctgtactggagtttcctataaactgtagcgggttttcctgaagctagtggaactttgtaaaggcctcgtagtgttaccctgcctcgcttccttggtagaggtgtatgggattcatgaccccttggcagatgggtaacacggcttgtgggtaaaaatgtgcaacctctgcagagtgtaaaactggtatactagccgtgctcatggtcatgagcggctcggaccctcacatgattaatttatggaacttaaactcaatttgtcatatgcattgcatgtattatttattaattttgttctattatttttattaaggtttgctatttacttatatttagtaattgctaataaaatttgaccaacttattaaaagcaatgctcagctttaacccctattgttgttcagctttacacattacatgaactcccacctttggtgagttcatgcacattattctccacaacttgttgagcgatgaacatgtgtgagctcacccttgctgtctcacacccccacaggagaagaataggtggttcaagaggagccacgcatcgagaagttcgattcgatctaggtggcgtctcccagttgactttttggcgccaaggatagattctagatcctgttatatttatcttttattttgtaagacttccgctatgtaataagtactctgattatattgtgacatttatctctatacactctgttattatatatgttgtcttctttggtgcatgtgtgagatgcacccg

SEQ ID NO: 12626 - DNA, 1051 bp, Zea Mays
gccacttgagctccctaaaaccactcgcatttcatccatttcctcttggaactcatcttctcggagatactcatcaagacggtgcgacgtcgcaatccctgcatggtggagttcagtagtgactccgacaaaatccaggaggaatctcctattccttctcctctgtctcatcgttctctctccaagagaggacgaggttctggccgattggaaagggaggggccctcgatgccctcgcaacctgcgcgcgggggcgtcgaaaggtaggcgccactcatccccgccaaagcacctcctccacaggatatgctccttgctaggaggaggatggagctttcgacgacgaggtcgaacctccatcgtccgatgctctcctcatcaccggtctccacatgcatccggcgaccgtatcccagggccaaatgaacctccaatcgacttctctttgaagggggtggactcccttcaattcttaaggttcacaaatcccactatcacacccagacatcctggtgtccaggacccttggttctggacctttttcaggctgacttttataattccgtcatcatgtataagaagcacccagtcgttagacatcgtttcaatgactaggaggggtgtgagaatatgggggatgctgacatgacgtcagctctccgtaacttagagagaaaggggttgaaaaatataatgactatggaatacccctgtaacgacgaagtagtggctcagttctatgccactctctgggtaaagaaaattgacgaagaagctgatgggtatgactatccagttatgtacttctttatccaaggggtctggcataaagttagttaccgtcgttttgcccacatcctgggcttctctggtgaagatattcagggcagcaatcttaaagtccatgacattaggctgtccatgcgggaagaaactaaatttattcatatttctttggagcaggagttttggatcactgccaacatgcataggtactataggtaacttaactctttgtccaggatgaccgttctcccaaatggcagaaatc

SEQ ID NO: 12627 - DNA, 128 bp, Zea Mays
ctatgttcatcaaaaccttcaagaagtttgtaagtaaaaatgataagtatcaaagaaaaggaaagaagagggcatgttatgaatgtggccaaaccggtcatttcatagcggattgtccaaacaaaaag

SEQ ID NO: 12628 - DNA, 489 bp, Zea Mays
ccgaagcctattcgttctataaataagcactcacgcttcaacacttcactcccacttcacttccagagctccacaacaatgaacccgtacttagaatccaatgttcttcttaggatgatgcaagaaatggaagaggaagaagaagagttggagatggcgacgtacctgcaacataggaggcgtcgtgcacgcaacgagcgtcgtcatggtggttccattcctgagcgtgttcggattcatcgtgaccacatgagcggcgatgcaagaatctaagcagactacttcagcgcccaacccgtgtacacgtatgctcaattctggaggagctatttcatatatttcgtacgcatattaattgttacatgtacttaacgtgatcgagcctcacagtgacagacatttattatacggtaggttctgcatgcgtcgccatgtgtttgagcacctcgttgatgttgtgcaacaagtcgatctttactttattcagcg

SEQ ID NO: 12629 - DNA, 833 bp, Zea Mays
aggtaatcatcaaagcaaggcctgagccggggctggcggcggagacggccaatttcctgagccctgaccgcctgcacgatgactagctgcctagctgcagctggagctgcaaaattttcagcggaaactgaaagccgatcgagcaccgggggctatgtttggaacagctttgctccagaaaatttggaatttgatggggttggtgtcggtttccaacatttttacccgtgcagtaattcaaaacgagccgtacaattatttacccgtgcacgaacagtgcgcagcagattcgctcgcccccaccgacgccgctatctcctcttctccgggctccggccgggcgggcagccaccggccgccagtgcgcgcgcagcggcgcagcaggcgtgcaggatgcagcagcagtgaagatgaagcgagccgggcagggcgacgcgcattggataggtcaggaggtagccgaggcccgagagagggcagcacaccacacaggcgcgcggcgcacacagcagcaagcaattcaattccatcgttgtctctactcaccctcatgattgccatgatttcttcgtttccccgctcgcttttctctcctctcccagctctcctcctttctccttgtccaaaaggccaatacgccatgcattgcacgccccgtgctctgctcctccgatccatggcagcaggcggcagcgcatcgaaatgcccctcgatcttttcacacgcgctccctatacagaccaataccaatagccactactagccggccagcagtgaaccgtgtggcaggcagtgcgaggtagctatatagtatgactttagttttagcctcg

SEQ ID NO: 12630 - DNA, 275 bp, Zea Mays
  misc_feature (274)..(275): n is a, c, g, or t
agcatttgcaggccactttctgcccggttgaagtccccgtcttcgtcatcttctagcagcagtgactgcgggagtcttggccggccggcggcgagactcctcccctttctcctatttctctgcacacatagtcacatacatacgtatatgcttgttctccgccgcctccgcttcccgctgccacgccctcttctcgtctcctcctccttagcccctctctcaccctcgacctctagttcctcctgttggtcgtcgacaggcgaaggtagaaggnn

SEQ ID NO: 12631 - DNA, 1806 bp, Zea Mays
aacatatattttatactttattaaaatatgtcatatatataaaacccgtagcaatgtacatcacatatgacatatgactaggtatacatgatatgtgacataggaggacatctagttgattgcaaagcctgcaggagtgtggaacaagacacgttgcatttggttttttgcttgcttacatataaactgtgattgcaaatcatatcacaacatccacatacaccatcacctctttctctcccttcgtaacaatgagcaatctttagatacaagcacatattcactctcagcttacaccgctttacacgtcctgaacgaaaataaagaagaaagaataaatccaacgtcaccaaacatagccactcagatgaaataagatgaaatgatgtggaagcacctgagtccagattgctcctagcttaaatatataggaatatgaataccagtacattgttacggtttctatatattatataactaggctttgttttaataagataaaaatatgtgtgttatattagttaggtgttgtgaatatagaaccaacaattaaggttcaaacctctatttatgtataattttactttgtttttttattaaagggatgggtgacgtgggacgaccgttgcaactagtgctttaatacagtagaaatctgcactcttgccttttttggctttattttaaagctctagggcttcattccctctatttgcaatcctaagaatgcatcgttgggagcggaggaaaggacatgggcgaccttttggtggggcagaggggcagccaccttgggcccccgattttcaagaccccaaccctagatatatatatatttgtattagttagactatcaatttatggcttaatagttcgacagtgaagtgtcgaagaattaacaatcatgatgtattcatatctcgatcatatttaaacatattagaaaaaacttttaaagcaataatgtaatatatactttttatttatttattttatattaatatttttaggtgtatattgaatgcttatattggtaacatgtatatataaaaaatatagaagtgcctctatttaaaacttgccccgagcttctaaaatctcaggaccgccactaaaaaagatgatcattttatgaaaaaaaaaatattacaaaggtggcgtcaaagttgaatgtaacgtttttgtttcatacttgtccatccagtagagtactgaccatagaggcatagaagctctaatggtactttgtgcatgttatcagaggatttatgtaattgtcgtagtcgttttttgaggagggcgtataagttaattatgcttacagacgactataaaacatatcaaggtatgttgtcattccgtataagatctgctcttctcatttgttggtcgtgaaaattttgaattcctgtaataatgttttgttttaggaatatttagaagatgcagagttcatcaacaaagatattctcaattttctagtgatgtatatgttgtttggtggaagtgttgcctggtcggagaaaacatcaacgaccaaggcatgcacctgtcgaagggagaacccgggttgatacgatagaagcgggaagtgtcgtggggtattcgagaggctatgcaaatataggcaacgtatctgatgtgataactaggggcgacaatgagattatctccaacaatgtcccctatacatcttcccttgtccctactttttaatatattttactacaacccaaccattactcttatacaatcccctatacactacaactcagttatttaagatttaattattatttttatttt

SEQ ID NO: 12632 - DNA, 3000 bp, Zea Mays
atcttattccggccttagtctgcccgaggcaaggcttacccatgacgaggcatgtgaccagttaaagggtcctcgatcatcaagcctacatcgagacggtccttaatcgactcagacggagacactacaccgagactctcttctcgtgcaagtcacccgcccggtctcagcttaatcatttcaaacccaaagttggtacctggcagaggtacatcttttccagatgttgaatccatcaaggccctgatggatccaccatcaaattttattttcaaagataacccttccactttgccaaacatcttttgtaaaacaaatcctttgtttttctaaagcaatgctaagcaaagtaaaaccttttgtaaaaacaggatttcaaggggggtaatcaaaatcaaggaaggtaatgcaggaattgtttaacaatcaactcctataacttaatgcagcaagcaagtgagaaagattttaaaaacatcaagggaggtggcaaatgcaccggggcttgcctgagtaacactaggttagtgttgttagacgacgtccacttggcgaacatcttcaggtttgtccatcagcatcatcatgcggagtagtccgcgcttggggtcgacttggcttgtcttccgcatcacgcgatcaattatcgtacctaattgagatgcacgatgcacatgaatgcatataaacaagaatagcacaaatctaaatagtgctatacgatagcgtattaaacacctagcggcgagacgatgtactattttaaacggaaatactagttatcgacgtacgactaagcgcaataattacgcttctctaagttaaacgaacctaacgcaaacatcacgagcaacaaattatacacaagaaacacaatttgcctaatcaactcatcagctaattaatttaaattctaaatttatccctcgttttataattgatactacatcgttcacaaagtactattttaattttattttacttctcacatattttacattccacaattaatcaaacatttctttatgtcatttatttagtgcaattgacaatgacaaaattcatcaaatagctatatgaaatactaaatcatatctatcctttatattgccacctcgtttagatatccctaaattaatctacctttcgcattactaaacctatcgtacttcacttatttttgacactaccacaacgcgcctgtgctaaatatgaggattattacgactaataattctagttaatccaatcatcagataaacgtacaaaaattataaatcggctcaccagcaccaaacgcgacccaatactcgtacgaatgctgataaatcctggctcgagcttcctgtcgtgcacttgatgaacaccatgctgttggctccgtcttcatccgacgcttgggatttcacgacgagatcgtgtttggagcgagctggtgaggtgggggtcgagcagaggatgacagcttcaacgacgatataggagggtggcatatatagagctacattcccgacgcgacgaactaagtcgcgaggtcggccgacgagggatttcaaggaacacgacggtcagtcggcgagctagcaagttcgaatagggacgactgacgtgaggaccatgataaatatgaaatcgatgactgaccaagatacgattggcgagttgagcgactccgacgatttgacagtggcgacttgggcgagcacagcacggaacgatgccccgcctggccgaactgaaggaagcgcggaccagagacagagtggacaccaggggcgagttcacggcaacagacacgcctgacaaccacagacatggccgggataacttaaaatactacgacagccaagaatcggcttggagacgacgacaggcacgcacgagaggagctcgacgcggaaacttaacacgccgttgtgagcagagaattttcgtgcgcgcaatagaagaatgtgacacgcgcagcaggggcgagcagcaggcgccgagctgcgcgacaaagcgaaatctgagctggagctcgcgacaacagcgagctggggcgagcagaagtccgggcgccatgggacgaagaaaaagcagccggacacactacagcttggaatcgatcctagaaacggcgactggcacggatgggtggagttcgcggacaagaatgccccagcaggcagagaggcaccgcggccaccatggggaacgagccggagctgcacgcgcacgtgaaaatcgctcggcagagaggacggacagggagctgtgcgcggtgagctgccgatggctggagacgcgagcagggagccgctggggcgagcagggcgctgcaagggagcttcgacgaacgcgaagggactcggcagggagagctctgggctggggcagagtcacgcagagccgaacgccggcgagcgcaggggaaggaagaagctccggcaccagggagcagggagcagggcgctaggaactcgagcatagggagcagctcggctaccggcaaagaccaagcgcagacgagctgaacatctccagggagccgtgacttcaggaacagagaagaaatggcataagaaaacaaatgagctatgttcagataacgcctaggagatgaaagacgtggctggtagaaaatcctaggctttctacgtggaggtggaggagataaaggaatgcctacaagaatttctagagccagtacgtggagggcataagctggagatgagctccaatggataagggaggagagacgacgtgattaggatgggagggaaggcggtgggagatagggacgccagcgttttttttaatttcttttcttttttttaattagagattgcagatattttgaatcctgatttttcgcgatgtacgctgggtcgatatactatttaaccacacatcacattccccgaatctcgaaacgaaattccgaggactaacgatttaatttggtgaattctccgaacgcggacaaaatcgtactgtcagtttacttttgaagattgg

SEQ ID NO: 12633 - DNA, 707 bp, Zea Mays
acttaagacttatgtttgtgagtgttggagacaaatgtttgtgttcgaacttgtttgatgtggtgatatttgtgggatttatggtctttgtgagatatgtggtgtgtatgatgtatgtgatgattatgtgatgtatatgtgatggttatgtgatatatcttttgtttgtttggatggaataataaaaacaaataaaaatgggtattctgatcactttgtcgagtgttacactccgcaaggaggtattttgccgagtgccgtgaccacatcactcggtaatgaaggtacacctgggaaccgataaagcttctttgccgagtgtcaagaccatagtactcagcagagaagcaacctttgccgagtgcctcataatgcactcggtaaagagactgtcaaaggggcccaatggtgctcccgttgccgagggctagtccagctggcactcgataaagactgagtctttgtcgagttcctccaaatgcttttagcaaaggaactagcaaaggggcccactaggggcttcgttgccgagcaccagtacaacagacactcgacaaagaggaagcctttgccgagtgtcacgggtgacactcgacaaagtctccgtcatcgtcacttgacatcgtgacagtggcttttctttgccgagaaccaggtggcactcggcaaagcagttatgtccagaagtatatgtctatagaggcaaa

SEQ ID NO: 12634 - DNA, 212 bp, Zea Mays
caacagtcaaggcgaggtctacggcaacgcttggaacatccaacagctacgtcgcttctacccttaagatgctttcaagttgctcgtatacctcgttcacgcaccaagtctggtcgtcaatgaagggtcagccttgcctcgacagagcccgaccctccctcgggggctagaagggggcaaccccctctgtgtcaaaattttcctcaaaaaaa

SEQ ID NO: 12635 - DNA, 1570 bp, Zea Mays
gcagtttttcagtctcataattctgtgcagaatctgttctcttaagatttaggcaattttatcaacagagttaaactgtgggttggtaaaagaagttgtagataattttataagctttccagattgttaaagagtgcattcatatgatttgtgaaactacagttatgtttgttttactgtggctgttcctgtttacctgacaaaaatgagtgggtctgttcactggtgggtttcatctagtaaatggccgaattggctcttccaactatggagacttttgtagagggataaaagttcttactttcagcagaatttcataatttttggttcagcagttttggagataccgaattttaaagttaaccatactgctgtctaaaacagattcagtcagttatcttgtcagatgttttagaacttgtagatggcagaatttaattatctattgaatactgaagttgtagagtattttgtgtagatactcctagagtatttgtttgatatcaccgctgttttaattttaaagatacaaaattaacaaacagcgttgctgctgtatggcatgtggttcagggtgggagtctttccactgagtcttggtttcaagtgtaggagtgttttgttgattgatggcaaatgtttgtgaaatatttgtactaagttttatgcccactagtaggtggctacactccagatcatgtctagtacatttcttcttcttcgatgaaggcaagtgaatgtagcggtggttgcttccgttctgacctgttatttctatcgcctacactctaatattcagaagtatcagattctttcataattggactctatggtgatgctttacttgcttgcattatactgatgctcaatcatatattgatgatgattatgatttgagtatgactcatgagattaattcacacccctgaaggtaaatgaagtattatttgaggttggtattgtatctgaaggtaaatgaagtattatttgaggtttgtgttgtatctgaaggaagtgaagtttattgataaatgtagcatgccatatacattgcatgactcatttgcatatgaagttttgccgtgacctatggtccgaccgtaccggtacaacttagcatcgtacgttgcccgagaaggggtacgatgcggcttcatacccttagaggtatgaaggcagaggacatatgcattgcattcatatgcattcattgaagtgatatttgcagatgatgtggttttatacccccagaggtatgaagatagagtacctacacattgcattcctatgcatacattgaagtgatatttgcaggtattgttgacgcagggaagtgttatagaacctattgtggttgttcgaggaaatgagatggtattggttatagtgggactactgagttctatatctacaagcatttctgatttttaattgtgactcttttaaaatgttgatgaattcaatttgtggtttaaatatctcgtcagaacaattagcttgctgagatgtttcatctcactcttgcattactcaatgcaggtgcttgttgctcatcaaggggagtgggaag

SEQ ID NO: 12636 - DNA, 219 bp, Zea Mays
aatcaccttgggttctccccctttccttcctcccttcttccctccaccgaaaacaatcgaagatttgcaccacgcgatgtagatccgagcggcaacgaaaagcaccttgggaggagaagatgggggggtgggggcggctagggtttggtgtgtggctgcaagagtttggaaaggaggagatgagagggggggcggcggccaaaggttgggagaatgagg

SEQ ID NO: 12637 - DNA, 455 bp, Zea Mays
tgagaaaataaaataataaatgtgacaagaaatatattaaagctcaaagtggaatttgaatccaaaaaggaaatttcaagaatttagaaaagagagagaaatattgtgtccatataaaataatattataactaaataatttcatcacatgaggatatgagcaaattgtatatttaataggaattcaagaattgcacataagttgaattcaaaatttcgatccaaaaggattaagcataaaagaaaaaaaataataaaaataaaaacaaaaggaaaaaaagagaactcaccttgactccggcccacccgaagaacaactctcccgctcggcccattaacccgttgcacgcccgcgttcgcagtagtgccgacatgtggggccctctggtcagtcgcttggcgcgcttcctctctcagcatgtcaccgccaggtgggcccctgtgcacagcttcaat

SEQ ID NO: 12638 - DNA, 1466 bp, Zea Mays
gtcatacaaagccttgccaaggcgagccacttcttgctttaattgttcattttcctttgcaacctcatccgaacatgtctctacaataatattctcaacaacgacttggttgtaggggttagaatcattaattaaatcaaagcaggaagtagaaacatctttcttaattatttcaggtatttcaactaaagatgctgttggggtgctaccaatgttttctagcttagtagttagctcattattgtgtatgctaagaatttccattttctttagcaaattttcaatagcttcttgggagctagctaacttagctttcagtttttcattctttttaataaggccatcatcggtagcagtggatggagcactagattctaatagctcaattttagttgatagctcactatttaagtttgtaagagtttcaaatttttctagcaaacctttgtaatcattttgagagctaaccaacttatttttcaaagttttaagttgagccttttgcttagtgcaaacatcctggaaaaattccacggcttccgcaagctcatctagagaggcctttccctcaccttcatcatcactactactttcatcactagaggatggagtgcttttgttacctcttgccatgaggcatttgtgtgatgaccgtgatgatcgtgacgaggaccggtggctgcgcgtccttggaggttcatcttcacttgaagaatcatcccacgttctaacacttgttagcgccttgtctttgctcctctcctttttgggtttggccatatttggacagttgtccctgaagtggcccttctccccacatgcgaagcatcctctctttctttgctttttcctgtcaatgttaaagagaagatcctcgacctgcaggggcacacccattagattaatcttgcggatcatcctcattacctttccgacgcgttggattgtttctttgtcctcggaggatgatgtgcatggttgattatcttcatcatcatcactttcttcttcttcctcttcttcacttgaggaacttggagtgggagccttctttttgcccttcctttcatcacatgcaaaagcatatggccttgtggatgttggctcctctccccgactcatttttcgcgacatctcaaaagccgcgattttcccaatcacaatggtcggggtcatgttgctcaagtcctccatgttgtgaaggatggtgatgatgctcccatatctttgttgtggtagcagggagataatcttcctcacaatgtccgcatcgcctagcttattaatgccaatagagttgagctcattgattaatagattcaaacgagaatacatgtctctaacaagctcatcatctttcatagcaaaagaattatactcatttaagactaggcaatgtttttgctcacggacattggatgtgccgtcatggagctcatgcaattttagccaaatctcattagcag

SEQ ID NO: 12639 - DNA, 136 bp, Zea Mays
cttggttttcgcaatcgtgctttcttcatctctttctcaaccttctaagtgaattgtaaagcaagcaagagacacctaagtgtgtggtgatccttgcggggtcttagtgacccaagtgatcaagtagaagcactcg

SEQ ID NO: 12640 - DNA, 275 bp, Zea Mays
agcatattgagaacgagagcatgcaaagtggccagtaggatttttgcttcgtcgaagaaaaaaacattaagtcaaattatatgaaagaataaaagaattgcagtctagagagtggttgttgaaagcctattttctcatctacccatatgattttatgtgatcctccaaaggatccaccaatctttttttttcatgcaaaaaggattcgctaatcatataaatagatgttaaataaacagggcaggaaatgtacatagcaactttaaaatgttcag

SEQ ID NO: 12641 - DNA, 378 bp, Zea Mays
ggcgagcacagggagccaggtcgaggacgcagccgggcgagacctcggcagggagctgggatagaaccgcggtgcgagcagggaaccagccacggcgagcagaggggcacggctgcgcgcgccatgggaggagtgccggcgagcagtaaacaaagcagggcgcggcggcctagggctacgacgaggaaggagcagaggtcgggggcgagctcggagggagccatggcgtgcttggccatggaaacgcgctaggcgcgagcgagtagaggggggcgcgggagctgggaggagggacctgggcgcggcgcaggagagagatggagggagagagagagaagcaaggggcgcgccatggggaaggagcgagcaggacacggc

SEQ ID NO: 12642 - DNA, 338 bp, Zea Mays
ctcaacccaaggtttggaaccctaacctcctaacccccctctaattttatttttctccctaaactccacccttagatcatctcatcatgtgcatacacttgaaatgataggagcacctcacatagactatattcatcactcaagatcatttagaaaattattgattcaaaggaaaagaaataaaaagaaacaaaagtagaaaaggaaaagaaaagaaatagaaatcagaaaaagaaaaagaaaagaaacctcccccctcggctgggccgattctggcccaacccacgtcgcgccctcgctcctccccccctctccccggcccaggcggcccaactctg

SEQ ID NO: 12643 - DNA, 147 bp, Zea Mays
cgcgaggcggcgtggccaggtggaggggtgggcacaggcagccatgctggggcctcctcatcgaaaccggctgctgcaacatctttgttcaagccgtgaaccaggtcgcctgatctagtcgccacgagacgcctccttgctggatcg

SEQ ID NO: 12644 - DNA, 286 bp, Zea Mays
acagagtgtatagagataaatgtcacaatatcataaaagtaattattacatagtggaagccttacaaaaataaatgataaatataaagtgaactattgtccatccaaggtgccataaagctgactgggagacgccacctagatcaagtcatactcctcgttgtacggctcctcctagaccacctgttcttctcctgtgggggggttatatatcgcaagtgtgagctcacaaaagatcatagctcaacaagttgtggggaataatgtgcatgaactcaccaaaggtg

SEQ ID NO: 12645 - DNA, 205 bp, Zea Mays
ttttaatatattttatcatagcttccgtagctaacacacggtcattcgcctattgctactgaagaccgataggtatatactagcatgcatgcatgcgaccatgaccacacatccgatcatcacctgctggctgctgcgtgtaccacccgaaaccgcggttgtcgtcgtcgacctaccaggctaccatcctgttcgtgccaaaaaa

SEQ ID NO: 12646 - DNA, 842 bp, Zea Mays
tgacgttaaagatccttcagccaaagctattgcccttagtgggaaattttattctgaagtatggatgaatggtggccaagaaatgctagacggagctattaggcaaaatgagaaagaatcccatattgcttcagaagaagcgagaagagctaaagaagccgcagaacgcgaaaggcgttgtcacacccgaattttaggggtccaaaacacagacgtgaaatcaaatgtgtgctaggatcaagtctcacacatatgattactcatggtacagaaacgaatgtcacatctttgctatatgatagcagttctatacaaaataaataaataattacatcatacaaagacaacgatccaacaaccaagtttactaggagacgatgacctagaccactcacgaactcatcacagcatctttcatgtgcctcgtcctgcggtacctgttgttgacctggggggatgtgagtacaacaagggtgagctcacatacgttcatcgctcaacaagttgtggggaataatgtgcatgaactcaccaaaggtgggagctcatgtgaagtgtaaggcttaccaaaggagatggttaaagctgagcattgcttttaaagttggtcaaaattttattagcatttactaagtataagtagataccaacccaattaaaataagagatcacaattgataataacacccacaatgcaatgcaaatggcaaattgagtttaattctataagttaatcatgtgagtgtccgagctgctcgtggccgtgagcacggttgatataccagttttacactctgcagaggttacgcatctttacccacaagtcgtgttacccatttgcc

SEQ ID NO: 12647 - DNA, 258 bp, Zea Mays
ctcctaaccccccccccttattttattttctcccttaactctacccttagatcacctcatcatgtgcatacacttgaaatgataggagcacctcacatagataatatttatcactcaagatcatttagaaattttttgattcaaaggaaaaagaaataaaaacaaacaaaaatagaaaaggaaaagaaaagaaatagaaatcagaaaaagaaaaagagaaactcccccctcggttgggccaaatccggcccaacccgc

SEQ ID NO: 12648 - DNA, 176 bp, Zea Mays
cctccaaatgcacaagatcaaccatcctcctccacgcaagcatctccaccaactcaaaatgaggatgaggctcaagttgatgaaggagaagatcaaaaagatgagccacctcaagatgacgacaatgatcaagggggagatgcaaatgatcaagacaaggaggatgaagaaccaag

SEQ ID NO: 12649 - DNA, 240 bp, Zea Mays
ctctttctctcttttttttactttctcctctttcttcttctccctgtcccttgtcttcctttccctttgtccttaactgtctgcgcagccgagggggagccccctccaataatctaaaatatagtattttaaaaaaagcaaacatagtatttaaaataaaaaataaaaaatggactcctcgtgctctatgttgttcaaagacgataataatctcaccagaaatgcaaacaaagttttttt

SEQ ID NO: 12650 - DNA, 406 bp, Zea Mays
gttggaaactctcttcccaagtcccaaacaactccttcaaggctttctcttttccataccaaactgtatcataagaaatggtgcacttgtacgtatcttgaaggaaagtctgtaaatcctttgcacctgtgtgtggtttcttcgcaaggataggtaaagctttagcagcaacccaagcactggtcggtgtgcttgtcctcctccggccactagaagtgcaagtgtgatgatcattcatcacagtcacctacagatgtataaatgaaatgcacattactactaaggcataaaaaaacttcaacaaaattaaaactttgacaaaaccgtacaattatggtaggtgacccagccctctcaattcttgcatgtatgctccaaggacaatcaccacctcgacaaaatcctc

SEQ ID NO: 12651 - DNA, 219 bp, Zea Mays
taggaattagggaatgagaaaagaaatttgtaataaagtcaattattgttagagtcaaatatggaaggataaaatagtaatatttaaaataatatggtttatattcacatttggatttcaattgagacaatcgaaaaatctgaaatttaaaacaggagtataaaattgagtttgatttgaatgtttgaatttgaaaaaaaagaaaaaaaaagagagaac

SEQ ID NO: 12652 - DNA, 356 bp, Zea Mays
gtttcttaaatgtaccacactcctccccaaggggcaaaccaccctcgacagagcgagccgcatacaccgagcccattgacggcacgacaacgaagcaaactacacctcaattcgtctaattatttggctaagagcgtcccataccaccctcatggctatactgttttcccgggtggtcatccaacgaaccagtccttacggagaggtactcgagaaaccgctcgagcccccttacatgtcataatgccatcatcataatcaaaagtaaacctcgtatcataaataatctcatcatgttcattgattagagtaaagcgctagcatagagctaaatcactggaatgggccaggcaaac

SEQ ID NO: 12653 - DNA, 188 bp, Zea Mays
agaactccctctttgagttctcattaaggcctacttgaggagcatatgcgctgataacattgagaaccaagtccccaatgaccagtttgactaggatgattctatctcctagcctctttgattcttcctcgactagcttccttacccttcgcacccgccgaggaagatgcaaagacccttgctcattt

SEQ ID NO: 12654 - DNA, 389 bp, Zea Mays
cacaattccaacttttgcgaaacaccactcctactctcctcaataagtaccacatcatcgtcaaaaagcatacaccacggtatatctccttgtatgtcccttgtgacctcatctatgaccaaagcgaaaagataagggctcaaagccaacccttgatgtagtcctatgttaattggaaagtcatcggtgtctccatcacttgttcggacacttgttacaacattagtgtacatatctttaataagattaatgtactttgttgatactttgtgtttttccaaggcccaccacattacactcctaggtactttgtcataagccttctccaagtctatgaagaccatatgcaggtctttcttttgttctctgaatctctccataagttgtct

SEQ ID NO: 12655 - DNA, 400 bp, Zea Mays
agccccagggacttcctccacctcgccgccatgatcatcgcatccgacttctgccagggacactaccagtggcggtacgaccataccgctaccctcagttgctcaaagatgagattgaacgacagtgtgaccagatgctatcccaaggtatcatccgagagtgtacctcagcgttctcatcaccagtgttgcttgtgaagaaatcggacaacacatggcgcttctgcattgactaccgtgagctcaacacgaagacggtcaaggacaaatttcctatcccagtagtggatgaactcttggatgagcttcggggagcccggttcttcaccaagcttgacttacgtagcggctaccatcaggtgcgcatgcacccagaggacatcgataagacgaccttccg

SEQ ID NO: 12656 - DNA, 460 bp, Zea Mays
aaaaactaccaggacaagcatcgacgggaagtggagttccatgagggcgattgggtatggctgcgcttacagcagcgcacagcagttggtgtcacttctgctacacccaacaaacttggcccaaagttctttgggccatatcaagtgctatcgagggtgggcactgtctcctacaagctgcagcttcctcccagggccagaatacatgatgtgttccacgtttctctactcaagaaattcataggggaggctccaacccaagttataccgctgcccgagctcctcaacggcagagtcatccctacaccagaaaaagtcctccgtgcaaggctgaatcggtgggtgtgggaagttctggtcaagtggacaggccgagcagagacggatacttcttgggagcacctggaagacttcaagcttagatatccagccatgacgctcgaggacgagctcttcgtcg

SEQ ID NO: 12657 - DNA, 661 bp, Zea Mays
ataatagttgttggacggtagacagactgcaaaaaaagaggattggatcatccgagcgttgtttgttgtttgaccaagaagttgaaaccattgaacacctgttggttggctatgtgtttgcaagacaattttggtttctttggctaaaacaagtggggctgcagtttcttgctccacggattgagggcttgagtttcttgcggtggtggagcaggatcaatggttcggtagaaagagcgataatacatggtttaaatttcttggtcatattgggaccttggatcaattggaaccacaagaaccaaggtgcctgtgataaaattgctccttgtgttgcaacggccatcagaagggcgagggacgaaagggagctctaggagatggcaggggctaggagtattactcttctaacaacccctattccagggctgtaattagctccttggtttatgcatggtcgttgtagttttgtttatcatatggattcattcatgtattttctgttttggccaccgtgaggaggccttttttcttttgtatcggtctatattgggcttcccttttttcttcttaatataatgatgtgcagctctcctacgcgttcaagaaaaaatatgcatcatcttattcttaaggttaatcaaagacgatcattcatatt

SEQ ID NO: 12658 - DNA, 203 bp, Zea Mays
aacctaagtcaggatgtaaacattatgaataaaaatgatgttgtattgatgagatggtgaaattagactagatgcaaccagagtctattaatacttaatctggcgttaaaatattgaaagtaaggactcactttagtaagctatttctacaaaagtatctaagttgattcttgctaaagccttttccttgattcctatttaac

SEQ ID NO: 12659 - DNA, 363 bp, Zea Mays
ctcatacgtagctacaaactcaacatgcattgttgacaattctctcgttgtatgtttgcaactcttccaagaaatagccccctagaaagtgtaaatagtgtaaatacatatcctaaaatggacttcagtgtatctctacaacctccccagtcagcatctgcataaccaactatttgcaaggaactagatcttctgtatgttagcatgagacctttagtaccttttaggtatcttagagcattcttgactgctttccagtgatctatgcctagatttttttgatatcgtccaagcatcccgatggtaaatgctaagtcagggtgagtacatacttgagcacgcataatgcttccgatagctaag

SEQ ID NO: 12660 - DNA, 192 bp, Zea Mays
atataaaacagtgttttgagtgaccatattagtgaactgttggagacgattttgtgctttgaatgtttccagtacagttaatggtatttatgctttcaagaccagttatttagcctagtggagaggtaatatatatcaactcccttgctatgctttcaagatcacttgttcgtggtgtaatgccaaaaaaaa

SEQ ID NO: 12661 - DNA, 1021 bp, Zea Mays
ctaaatctcccccccacgcaacaaggatcgagaagaggaggaacaagatggattgaagaggaagagaggatcaaggagatgtgctacccccatctcttgcagatttttcttagggaaaaccctaggtggctacactccagatcatgtctagtatatttcttcttcttcttcgatgaaggcaagtgaatgtagcggtggttgcttccgttctgacctgttatttctattgcctacactctaatattcagaagtattggattctttcataattggactctatggtgatgctttacttgcttgcattatactgatgctcaatcatatattgatgatgattatgattcgagtatgattcatgagattaattcacacccctgaaggtaaatgaagtattatttgaggttggtattgtatctgaaggtaaataaagtattatttgaggtttatattgtatctgaaggaagtgaagtttattgataaatgcagcatgccatatacattgcatgactcatttgcatctgaagttttgtcgtgacctatggtccgaccgtaccggtacaatttagcatcatacgttgcccgaggaggggtacgatgtggcttcatacccttagaggtatgaaggcagaggacatatgcattgcattcatatgcattcattgaagtgatatttgcagatgatgtggttttataccctcagacgtatgaagatagagtacctacacattgcattcctatgcatacattgaagtgatatttgcaggtattgttgacgcagggaagtgttatagaacctattgtggttgttcgaggaaatgagatggtattggttatagtgggactactgagttccatatctacaagtatttctgattttaattgtgactcttttaaaatgttgatgaattcaatttgtggtttaaatatctcgtcaaaataattcgcttgctgagatgtttcatctcactcttgcattactcaatgcaggtgcttgttgctcatcaagggaagtgggaagtag

SEQ ID NO: 12662 - DNA, 219 bp, Zea Mays
tcaccttgaatcctccccctttcctcccttcttcttccctccaccaaaatccaattggagacatgcaccaacgcgacgtagatccgagcgggaaaggaatgacaccttggagagaagggcttgaggaggtggcggctagggtttgatgggggaggtggggtggcggctgcaaatgggtggaggagtgagaggggcgtcctccaagcctagagagagggg

SEQ ID NO: 12663 - DNA, 350 bp, Zea Mays
ccactcctcctttccccttggccgccgccccccctgcccacctcctcctccctccattgttgcagccaccaaaaccctagccccccccaatcccctcctccctaggtgctactccgtgtcgctcggatcatcgtcttttggtgcgaatctccaatcgttttggtggaaggaaggagggaggaaggaaaaggggagaacccaaggtgatttttcttttgtgttcatcccttgttcatttgcgctgcgattcaattgatgagatgttgcgtttgcgattagatagaggggggctgtccagaattttgcgtggtggatgaacagcggtagttccagcagtttttagttttttt

SEQ ID NO: 12664 - DNA, 195 bp, Zea Mays
aaccagcagcgggtggaggattaaccccgctggcggactggctcctcgtccgccgcattactaggtgcttggagctcgttccctccctgtgattgttggaggggacgaagaagccgaaggaagcaaaagaaaaaggcgggttaggtttttagagcgacggccgacggagccggcgagccgcggcgggtgcgtcgg

SEQ ID NO: 12665 - DNA, 2064 bp, Zea Mays
caaaaattttatgatcattttttctccggtgactatgagttagatttagtagatttagtgtcattgcgacagacaaaagatgaatcagttaatgattacatccggagatttcgagatacaagaaaccgatgctttcaaatttatctagcagaaaaacaactagtaggattagcctttaatggtctacgatattatttaaaagaaagattagaaggcatccaattttttacactagcacagttacaccagaaagctttagcttgcgaaagccagagcaaagaaactgctaaaacaatgcgtcacaacgtacatatagtagaatgcgaccaaagtagctcagatgacgaatcagtagaagtgtacgctgctgaaatggtttggccaaaacaggccaaatcttcggcttgttccttcttacagccggttcaaaagaaacgacagaggaggttaagtttacgtttatgttggtagtgtgataaaatatttgacgaattactcaaaaatggcaatattaaaataaatcacactgttccatccgccgacgagctaaaatgtcgtgcgtactgcaagtggcataactcattttctcatgccactaatgattgtaatgtatttcggcgacagattcaatcggccattaacgaaggacgattgaaatttcaggaaatgcaggtggatacagagccctttccgatgaatatgattgacttcgagggcaagaaagtcctggttcggccaaatacagccgataaaggcaaaggcaaggaaacaatcatcggcaatgctaaaaaggctgatggggattgtaaaatttcttgcaggaaagtggtggccgagaagactcccgatggaggggagaccctgaaggtgaccatcacagcctctagcactggggggcaagcacagatagggaaacagttgcgagaacccgtactgcgcatcacggacagtccgccatccaggcgcagacgttccgacacttctccggacggtccggaggactccagcggacggtccggccatgctcaggactcgcagcggccacgtaccttcaaaccacgacgaccagagataggtacgtggaaaacaaatacatttaaagcagctggtcggctgatcaagcctggcccgactttcgatcaattgctgtctaaatacgttaaaaagaaggccggccccagtgaccggccaccaaagcgaccccgctcacccattcatgagcaacgtcaggtcaggccgattggaccacctcaccaatcggaagaaataaaaggtccgattgtacaattgagacctaacatgccgacatggacacctccacccccttatccatctatgccatatccatacacatacttacctccatcatatgttccaaatcaaatgtgggacatgccaccatatccatttggcatgccacagtaccccgcctggggggcaccccaaacatccgtttttgacaggttggcgccgccagtacaagaccgattgagcgctgctgaatccggtcaccaggcacaagcccaacaagattgccagactactcggcctcctaggccgaccaatccggcaggggggcatatgcctgtagcaactcaaataacaacaaaaaaggacatcatcaaaataggcactgcatatgttgtcatacagggagacaataaagggccgatgatttttggtgaatcggccaacacaaccaaaaaggatacggttaccatcaaaacagccgatccaaaatactccatgtctcgatggtgcccagcgggattgacacggtcccaaaagagaaaattacagcgcctaagagtaaaggagagccaggagaaagaggcagaaaagatattcaatgacacacatccactatacccgtgttgagcaccattttgagcctggcggacggtccggccctgaggccggacggtccgcggtccggacagtccgcgcctgtgggccggacggtccgcgcatgcgcagaacagtttagggttccaagttttgtgctatgtttgttggctagatttgcggaattagctcggaatccagtcgtgtaaagggtccagc

SEQ ID NO: 12666 - DNA, 796 bp, Zea Mays
aagacagggaacggggaattcttcagaagttctgaatattgttcattacaagcgtaactctactccatgactagaaaacttatttatgtgcctacacacgaaccgggtccactatacacacaaaccccaagaccccacatgacagccaacaatacgctcatgcccactcaggtgcacagatagcacggcgcttccgagcaccatggattgcctcctgtgcttggtctggcaacgtagcactcacatcctcacatgtgcgcgacgcaacggggaggtagcgagctggagctcctgctggctgtgcacgtgagagggagggggaagtggcgtgtaggtggaagaagccggaagagaggttcggcttttaaagggcaccatcgcgggtcgcggctgctactgatcaagaggggcggcgtcgaccattggtgcagggctgcggcacctgccggttggctatggccgctggccaagctcccacgcggttggctgctctacgccctgacaggagcttgcatgcagcgaggagccgaggaggtctgcgtgcgtgagcaggtgagcgtggggttcttttcttttttttgttttgtttttctttttatttatttatttttgcaacactacccacgagggaaaataataaataatagtctagatcaaaagctatcccagttattaatttttgtcgactttcatgttaaacagcttgtaaccacgagatttggatcgatgttgccgagaatttatcacgtcctattttgaaaatagtttgactcaaaatttgaccgtgtttttgaat

SEQ ID NO: 12667 - DNA, 168 bp, Zea Mays
ctgactgtctgcggaccgtccgaccattatagccggaccatccgctcctgtcttggactgttcggccttagtagctagaccgttcggcgtacacatgacaggtgaccgtgatcgggtgtccgatcgtggttgccccccggtgcctccagtctttcttgtgtccggagc

SEQ ID NO: 12668 - DNA, 304 bp, Zea Mays
ctgacagtgaatcgtactttacttccctcttcttgacgaccttctggtggtgatctaccttgaagtgcgagaggtaccactttttcgccaccttgcttatctgagcctgttgtcgttgcaattcctcgtccagccttttcatgtggtcttctaatttctcatcctcattggccggcgagttagtcagccttgtgttaatgtctaggacgacattgttgtgatctttgggattagccattgcgaccgatctgataggtctaatttaatagatctgatctaatggatcggatttgatagatccgat

SEQ ID NO: 12669 - DNA, 368 bp, Zea Mays
cccccaggacaagaacaggtaccactggacaaggcgcatgaaggatgctgtgatgagtttgtgagtggtctaggccatcgtctcctagtcaactatggttgctggattgttgtcttcgtatgctgtaattatttaactattttgtacaaaactccattatatattaatgatgtgacgttcgtttctataccatgagtcatcatatgtgtggacttgatcctagcacacttggtgaagttcgcgtccgggttttggacacctaaaatctgggtgtgacacttgtagacaacaacttcgtctttcccaagatttggagttgtctcttcattaggaagtcacacattaactttgttgctaaaatacccaag

SEQ ID NO: 12670 - DNA, 405 bp, Zea Mays
ccaacctctccctccatcttggggagaccttcgtacggtccgctacgtcctcacgccggctaccgcttccatcaaggagaaggtggcgcgttggccatccgacctcatcggcaacaccattggttgcatcgttacggcgacatcatgatcacaaccacgctagatagtcacgtcgttcatgaagagacccgacacagatccaatctgctcggggactacgttgacaacgtggcggcagaatgccgacctcgtcaccaccactacggctccagcaggggccatcgtccatcgccagctgctcatcatattcgatctagaggtaccacctttgacgcattccaaccttgatactttgaagatcaacttgttagaaaattggacattattagttttaatttaatccag

SEQ ID NO: 12671 - DNA, 201 bp, Zea Mays
ccaacccccacttttccccacccttggccgcccctgccccttccccttgcagccgccctccactacttcctcctccctctagatctcccccccacgcagcaaggatcgagaagaggaggagcaagatggattgaagaggaagagaggatcaaggagatgttctacacccatctcttgcagattttcttggggaaaccctag

SEQ ID NO: 12672 - DNA, 2229 bp, Zea Mays
cctccctctagatctccccccacgcagcaaggatcgagtagaggaggagcaagatggattgaagaggaagagaggatcaaggagatgttctacctccatctcttgcagattttcttggggaaagcctaggtaaggatgggatccttgttcctccctataattatgtgcttttggaggttgtggatcatgtggattgaaggattagaggttggattagaggtggggttaggttttgatctcgaatttaatttctgcagaatgacagattcgacattttctgttcatgccagttttttcgtggtcttagtagcctcaaaaaaataaaatatatatatatgagtagtagataatttgtagatctttccgtggctgtgaagaactcctcaatcggacatcagaacagaaagttattgcagtttgattataacagtttttcagtctcataattctgtgcagaatctgttctcttaagagttaggcaattttataaacagaattaaactgtgggttggtaaaagaagttgtagataatttcataagctttccagattgttaaagagtgcattcatatgatttatgaaactccggttatgtttgttttactgtggctgttcctgtttgcctgacaaaaattagcgggtctgttcactggtgagtttcatctagtaaatggccgaattggctcttccaactatggagacttttgtagagggataaaagttcttacggtcagcagaatttcataatttttggtttagtagtttgggagatatcgaattttggagttaactagactgctgtctaaaacagattcagtcagttatcttgtcagatgttttagaatttattgatggcagaatttaattatccattgaataccgaagttgtagagtgttgtgtgtagatactcctagagtattggtttgatatcaccactgttttaattttaaatatacaaaattaacaaacagcgctgctgatgtatggcatgtggttcagggtgggattctttccactgggtcttggtttcaagtgtaggagtgttttgttgattgttggcaaatgtttgtgaaatatttgtactaagttttatgcccgctagtaggtggctacactccagatcatgcctagtacatttttcttcttcgatgaaggcaagtgaatgtagcggtggttgcttccgttctgacctattatttctattgcctacactctaatattcagaagtattggattctttcataattggactctatggtgatgctttacttgcttgcattatactgatgctcaatcatatattgataatgattatgattcgagtatgactcatgagattaattcacacccctgaaggtaaatgaagtattatttgaggttggtattgtatatgaaggtaaatgaagtattatttgaggttggtattgtatctgaaggtaaatgaagtattatttgaggttgtattgtatgtgaaggaagtgaagtatattgataaattcagcatgtcatatatattgcatgattcacttgcatctgaagttgggtcgtgacctatggtccgaccgtaccagtacaacttagcatcgtacgttgcccgaggaggggtacgatgcggcttcatacccttagaggtatgaaggcagaggacatatgcattgcattcatatgcattcattgaagtgatatttgcagatgatgtggttttataccctcagaggtatgaagacagagtacttacactttgcactcctatgcatacattgaagtgatatttgcaggttttgttgacgcagggaagtgttatagaacctattgtggttgttcgaggaaatgagatagtattggttatattgggactactgagttctatatctacaagtatttctgatcttaattgtgattctttaaaatgttgattaattcaatttgtggtttaaatatctcgtcaaaacaattcgcttgctgagatgtttcatctcactcttgcattactcaatgcaggtgcttgttgctaatctagggaagtgggaagtagcagcacatccaccttcactctcataataacactgcttaggtgcagtcatgatttaattagaagcttcttgtcaaaggatgtttgtttctaactagttatgcgcactggttaatttagttcatgctgttatggttgtcttcccattgctagcagattattaatgtcaattatgttttcttattatgatatctatt

SEQ ID NO: 12673 - DNA, 796 bp, Zea Mays
gtcaagtctaaagtgcttgcctacttcatgttgtggtgttaaaaagacaagggttgcaatcaacccctctcaagtgatctaaagatcgaacttgagtgccacggtcttccttattgcttatatccaggttcgcaaggaatctccacaaattggagtctcttgtagccatacacaaagtcggagttacaactaaaatagcacaagtgagaaatagagcacacacaagaacaacaacacaacgctagaaagaagatcacaagcgtgcaacaacaaaagtcacaagaatagcttcgaaatggcgctcaaatctcgctagaatcactgtatggtattatggcagagtgtcagagtgtagattagctcctggagtgcttgggtgttgaagaatgatacctagggactcatttcatagcccccaaaagcctcaaggcagttgtcccttccttgtaagaactcgcagatttgggcactcggttggcgcactccaccggtccggtaaacctcgaaccattagactcataccattggtctgacactctgctacttacaaggtcgagtgatcaatatctctcaagttgtatgtatggaggcgtagtaccatcaccattggaccaatgatcataaaactttagggtttgtcacatgaaaacccttcccttgtgcttgcattgccatgtgaggagaagggaacgagttttctacatcttcctcacacctttattatcgacaaaagggttcgaagtctagttctagactgcgatgacatcgtttctcaacgtcggatctaggatctgcg

SEQ ID NO: 12674 - DNA, 1857 bp, Zea Mays
aaaatagcacaagtgagaaatagagcacacacaagaacaacaacacaacgctagaaagaagatcacaagcgtgcaacaacaaaagtcacaagaatagcttcgaaatggcgctcaaatctcgctagaatcactgtatggtattatggcagagtgtcagagtgtagattagctcctggagtgcttgggtgttgaagaatgatacctagggactcatttcatagcccccaaaagcctcaaggcagttgtcccttccttgtaagaactcgcagatttgggcactcggttggcgcactccaccggtccggtaaacctcgaaccattagactcataccattggtctgacactctgctacttacaaggtcgagtgatcaatatctctcaagttgtatgtatggaggcgtagtaccatcaccattggaccaatgatcataaaactttagggtttgtcacatgaaaacccttcccttgtgcttgcattgccatgtgaggagaagggaacgagttttctacatcttcctcacacctttattatcgacaaaagggttcgaagtctagttctagactgcgatgacatcgtttctcaacgtcggatctaggatctgcgatgacaccatttctcaactgttatcatcactaacacaaacttgctcgatgcctctataggcccaccaacaacgctagcaggctcaatctaaaatgtcctctattggcttcaagtgtcaaagacaaacaccaaaatatgaaatgtcaagcagcgatcgctaattgcttgcatgtttaatgtaaatactaattaccacgtagctaaaaaaattgaccaaaatggctctaatacataatacattgaaacaagactaatagacagggtagtcttctagttaaatatttaaataattaataagcacctaaatgtaaaccagtttttagacatactatttttagaaaaaaaaatctttaatcaggtcccttttttccttgctaaagtttagggcttgtttgtttcttccgtgcttaagtttagcacctgctaaagtttagcacctagaaaagtttagctaaactagcacttgagatgtgtttggatactaatgctaaagtttagcacaagccaacaaaaagtcagatttacccttaattaatgcactctatttttttgaaaaagaaacaactagaacgtgttgcaccatggtggtgttggggatgagagagaatggtattcggtagaaagtggggtttagggaccacttttagccaagtttagcacctttggtggagctaaagtgctaaagatgctaaactttagcacaacacttttagtcaccatgtttgtttctttagtaggtagctttagtaataagtgtagtgctaaacttttacaaggggaaacaaatggggcccttaggaagaggaagaaaaatcacaagcaaataagcacacaagacatggtgattttatcatgggtcggtcaagcctaaaatgcttgcctactcaacgttgtggtgtcccaatggacaagggtagcaatcaattcctctcaagtgatccaaaggtcgaacttaagcaccacggtcttccttttcacttatatccatgtttgcaaggaatctccataaattggagtctcttgcagccatacacaaagtcggagttgcaactcaaatagcacaagggagaaatagagcacacaaaagagtagaaacataacactagaaagaagatcacaagagcacaacaacaaaagtcacaagaatagttttgaaatggcgctcacatctctctagaatcactgtatggtgttgtggcagagtgtcggagtgtagattagctcttggagtgcttgggtgttgaaggaggac

SEQ ID NO: 12675 - DNA, 312 bp, Zea Mays
caaaaatattagcgcaaagcatatccaatatttttataaaaaaactttgagggtactttatcacagaattttttttcatggctttgtttatgataattaaggattttttttttttttgttgttgtgctcacttgttgaacacatggcgcggctggcttggcagcggaaaaaatgccgttcgcctaaaacgtgcagcctgctctgctctgttttctgcccatgggcatgctgcacgccggcccactgttcagctgcccgtagctgtgtaacattcagcttagcagcccaacaatatcccttgctgcgggagcc

SEQ ID NO: 12676 - DNA, 216 bp, Zea Mays
cgaagctacattccgaagatcaatgttgtatctccttatgacttagcatgttttccctttttcaaagcattcttccgaagatcgatattgtgttctcttcttatgccatatgcagcatgatgtatgatgcttatgctatgcgaaatgatgtgatgatgttatgctatgtaaaatggtatttattctgaagatacacgcacatccccgcaataaaac

SEQ ID NO: 12677 - DNA, 345 bp, Zea Mays
tttcgtcagaactgtaaaaattatcaacttcgtaagatttgcaagaaattcaacatcaaatggacagagtacgttcaactgctagggtgacccatgatggagaggaggctgaagccaccgaaacaaccctgatttccgaagttatgaaataatcgggattggttgtgacagagggcgctattgacgaagatgcacattctgctgaggttgaagaagttgatattgaggaagaaaatgctgatgaagaggaagactataacactctaatcccagcaaagcccagccacctagattttgaaaaatctactgtctctaaggccgatgtgcccatgatgatgaagctcg

SEQ ID NO: 12678 - DNA, 151 bp, Zea Mays
ttatcagcactctgtcgaagagtgttggttttccgaagcttgaagcggacattagttgctaccgacgacagcatatcgtcgacagtttattttattccaatttcaaggtaaatttttccctcaactttttattgttttacgatgaaggtga

SEQ ID NO: 12679 - DNA, 257 bp, Zea Mays
gtactggttgggatcaagatcaatgcggaggagtgctgatggatggggtgctagagatagaggacgggaggaggaagaagaggaaaggcatcaatttgacccactatttcagtcctaggaagttcatgagtagacgagatgtcacagagtacctttcgtattgttttaaaaaatcagattattgaacttttgtatatcaataggaagtaatcacaatttcacatgtgtcggggaccataattaggggtaccctcaag

SEQ ID NO: 12680 - DNA, 101 bp, Zea Mays
gtgaaggggaagcataaacacgccgaggtcaacatcctagggtcgcacgccgttggtggaaggcgggggtcgagaacggacttctggtcctcggggaccta

SEQ ID NO: 12681 - DNA, 516 bp, Zea Mays
atctaacaaggcacttgagtaacactttagatataagtacatgagcataaaaacacgaataaagctaattctaaaccacaagtatcatggtcgatggattactaattagttcagttaaatgattcatatctacatgaacatcccatacccaaataatgcctaagaaacaagatgagaaggtctaaagatatgcaaatccgtaataccattctccacaaattatctatttgaaaatgagaacacttaaataacatgaaacgatgaaatcagaatgacaacatcgaatacaccataagaaaaccttcacccttcatgacattcaaccaatcactaaatctagaatataagaattacttaagaagttcatcatctttatcaaacaatacacttacataatcaaccatgaccacatttatcagctagatgggcgagacaccaacctattatttgcattactaaatcatctctcacaattctattcacatactctttacatagtaagtatctaaacctaat

SEQ ID NO: 12682 - DNA, 169 bp, Zea Mays
caggcttccccatctctctgtttatttatcgttagttttattccgctgcatttcgaacaatgatgactacttttgctaaaactctgatgatgatgtaatatgtttaatactctttaatgtatggttttatgctttattgtatttgctctgtgactcaccatcgagtgag

SEQ ID NO: 12683 - DNA, 1724 bp, Zea Mays
aacttgcttagactttttgccaaccttaacatgcaacaaaaagaaaaactaaatgaattgataggagatattcatgagaaggatgaactcttggatagccaagaggaattcctaattaaggaaaataaaaagcatgttaaggtaaagaatgcttatgctcaggaagtagaaaagaatgaaaatttgactaaggagcttagcatttgccatgacaccatttccaaccttagaaatgagaacggtaatttatttgctaaggttgaaaaatcaaatgtttttcatgattcaattgtcaatcttaaaaatgataatgctagtttaattgctaaaattgataaattgaatgaataaatttctagccttaaaattgaaaatgctagtttaatttcaaaggctaaggaattgaatgtttgcaatatttctatgtccaatcttagaattgagaatgccatgttacatgctaagattgatgaattaaatgcttgcaaaccatctacatctagtattgatcattgtactagatgtagagacattaatgttgatgttatccatgatcacctagctttaattaaacaacaaaatgatcatataacacaactaactagtaaaattaatgagcatgagatagaaaatgaaaattttaaatttgctaggagcatgctctataatgggagacgccctggcattaaggatggcattggtttccaacagggaagcaatgtcaagcttaaagcccccaaaagattgtctaactttgtaaagggcaaggctcccatggctcaggataacgagggttacattttatatcctgctggttatcctgagcataagattaggagaattcatgctaggaaacctcataatgtttcacaccatgcttttatgtataaggatgaggcttctagctctaggcattctacccatgttaaaatacctaaaaagaaatctcctgttgcatcaaatgatcataacatttcatttaaaacttttgatgcatcttatgtgcttactgtaaggaaaatgaccccaggccatttagctcaataggttttggtgtttgatgatcaatataacctgtggactaatgtatttcccaagtatttgtgtgttgtagttcacaggatgcgaagtggattggactgaggctctgaggatgcaacacctcaaagaagacattataatactcatagaagacattacaaagtaatattgaagacactttatacatgctaagagtccaacatatcaagaagtagaagtgagatacaaagctacaaaacaaaagtgaagttgataaagttgagaggaagggctgactgaattggaagtgtttcgcaacatcaaatctattcaaactgacatgacttcaaatctgagatgtagacaattttataagctttccaaaaagtccaagaccatcaaaatcggagtttggagctaaaagttacggccaaaatacgacaagcggacttgggctgtctggtgcacaccggaccgtccggtgcgccatgtccggtgcgccatcttcggaagctcaaacggctacttttaacggcaagtacacgtggcatgtccggtgcaccaccggacagtccggtgcacctgtccggtgcgccgcagaaagctgcagaactgctttccaacggttatatttgagttggggcctatatatacttcacccaaccggccatttggaggtgtgggagcccaagcaacataccaag

SEQ ID NO: 12684 - DNA, 1481 bp, Zea Mays
ggcaaagccaaacaaatccgacctccacaggataacaccactgagggagtgaacaagcctgtagagggagaaactgtgatttgtagactatgtcacaaggaaggccataagtctttccaatgcaaggcgatgaccaaggataggcaaaggcaaaagctcaagcaaaagccatcaagcaaaatctccaatacctacatcaaaaaggttgacaaaaaggctgctacaccatatttgatcaagaagaaaaagaatggaaaggtgatagcaatcaaggccaacaagcaagccaacaaaggaaagggggccaaacgcatttgagtgccaaaggaaataatttcaattatgaaaagcgccaagaaggtttggatcccgaaagggaagtgagtggtccaaaagacaacgggaatttggagacttggcaaagttgggatgtatatcatgggatacatcatattggatcaagttcattgccaagtgggctagtgtataccttggacccaaatttcccacccatgactaaggtaactagatttattgtattccttatttctagatatgtgtatctattttcttgtatctagttttacctttcatgcatagtatttcatttggtacttgctttagattaacaatgcatgcatactaggtaaatcacatggtaggattgctcgttctcatttcatattcttaagcaaacctacatggtttaaaaagttttaattaagcacgacacataccttatttaacattccaaagtaaatgatactaatgcttcaaaaacttatatccttcaattggtatcatttaacttatatgtgtcaaagctcggattatggataatctgccccacttgatatcaaatcaaagtgcatgtctcctacaagtattcaaaacttgtatgcacactttcagggggagattactctataatctaagtctttgagactaatacctgttttcaagtctatttcatgtagtagtctcattgtaaggaaaatgaagtccccggagaaagacaacaagctttcactgcaaaatctccaagaactctcatgtctctcaagctcgccattgaacttcaatcggtatcttttgagacgacatctagtatcatttacatgtcttctccaatatttgattagactatatttcatatcatatacttccatgttgctaaaaatgcataagtggttaactcatattttgttacatatgcataagggaagttagtcttttcaaatcatgttttgcacctctatttctcacatgctttttcctaagtagaagatctctgtcagggggagtttttcttcgtctctaaagggggagaaaattctttctaaaggagaacactcatttagggggagtaatcatctgagggccattttttcttcctacatgcttttaatgtcttccttttcggtggttgatgccaaagggggagaagtttagggaccaaagcaatgaaaactatatcaaac

SEQ ID NO: 12685 - DNA, 355 bp, Zea Mays
atgctgtctctgcaactcagccccagaaacaattatgcacttatgcaaggattgcccctttagtagtgaggtgtggaacaaagttttgtctcgggccaaccttcctttcctgactgggcttcccaggggcacttccttgtatgattggtggacggacctgcgcagtctttgtagcagacaggtaagaagagacttcgacggtctactgattcatttctggtggaatttatggctggaaagaaattccagaatctttcaaggccagcataggggtgtagatcaagttgttctggtcatcatgggcaatgctagtagctgaggccttgttaggttttatctagtggcttttttgttt

SEQ ID NO: 12686 - DNA, 249 bp, Zea Mays
cagcttcatgccattgaagaagtttgggacctcctgattgaggaagagctgacaaaagtggtgcccgagccttctgaacatctatggatgtcaattgttgttactgcttggactggttatgctgcaggaactaccctttgtctcaagggccaacttaagcaacatgcactcttgatgttggtcgactctggatccttgcaatcagtcttgaccagcgttcaatcattggagccggcgttgtccgtcagg

SEQ ID NO: 12687 - DNA, 314 bp, Zea Mays
ctgaaaacctaggatgagtaagttacctagctttgagagcgtttacttccggtagcggtgcgtttatgtaccacttgcatgatgatccacccgataatgacacattatctaaaatacaatggaacctttgagatgctcatgtgtattagcagtgcaatgaaagggatgtagtagactgaccagcgtaactcctcacgagagtgccaacaaatactatgatctgtggtgaggatcgattgtccctgtggatctgttcagctgggaaagctgtggcccgctcgccccaaagcacaacatcaacggttgggccagta

SEQ ID NO: 12688 - DNA, 582 bp, Zea Mays
ctcatccaccaaacttactcaacgcaagagatgtaataaagaaagaatataaagcaagaaaaaatccggcagcacctcctttgaaaactagcataacaaggagggaaaacatgaagctcatacaagatataaagacatataattcacatagtagaaactgtaatgcaaaagtggtaaaacttaattatgacccaactgaagtaaaacaaatgggataaggaactcagcccaccccaaaataaacgctcaactaagaacaaagcaattcactagacttgtccaactctgattaacaacattattaaatggtgattcctttattaaaggtgtagtggccgtgctgctacatccctctattccccaaagcaaaaattaggtgcctgcatcaaacaatgcaagatgtgagataacacatctcagcaagtaaacttaacaacaacaaataggacattgtaaatcaactgtgcttacacaaccacgtgtacatgacttctttcttttcctttgaacagtaaattgcagcaagtatacaagtaactaaaaactcaacgccaagtagaatcaccatgcacaagtccaaat

SEQ ID NO: 12689 - DNA, 853 bp, Zea Mays
caattccataacttaaaaattaggatagcagtggtgtcaaacgaaaacttcagagacaactacataaaattccccacaagttttgtatacaactcatgattaaattctaacatctacttacctctaaacggtccacaaaataaaccctgcaatctgtttttttctgatttgggcagcgacatactcggattcaaacagcgataacttttaaaatacaattccgatttgagcgcataagtacttgttggaaagataagaaaaagccctacatgattctcatactgattaacactaattactcccgaaaaatccccagaaactgctaatactgctgctgttcatcactctgaaaaatctgttttttggacagccacatacccggattcaaacgatgataacttttaatttataactccaaattgagcgcataaatactcgttggaaaggtaaaacaaagttctacaagatccccaaattgatccccattaattcttcacgaaaaaaccctaaaaactgctagaacttccgctgttcatccaccacgtaaaattctggacagccccctctatctaatcgcaaacgcaacatctaatcaattgaatcgcagcgcaaatgaacaagggatgaacaaaaaaatcaccttgggttctccccctttccttcctcccttcttccctccaccaaaacgattggagattcgcaccacgagacgatgatccgatcggcaaggattgacaccttgggaggaggggattgagggggggcggctagggtttggtggctgcaagaattgagagaggaggagatgggcaggggggcggcggccaaggggggaaggagaagtgggggggcg

SEQ ID NO: 12690 - DNA, 370 bp, Zea Mays
agcatttcttgttaagtaaaaacccaaataaataatataataagtactagtccaaaaataactattttatttataaataattttgatttcatcattatgaattttagggttatttaaaaatagattccgaatttagaaaaaggaaatagaaaaaaagaaaaaggaaaaaaaactaaaacctaacctaactaacggcccaaggcccaacaagcagtcgccgcctaacgaccctaacctagccgcgcgcgcctccttcctctagccgccgccacctgcttctgagcttctcccacccgtcctctctctcaatcctcccttctcttccctctcctctctaccacgaccgcgcgaaggatcaagcgcacgcgac

SEQ ID NO: 12691 - DNA, 1410 bp, Zea Mays
ctttgatatattgtaaggactatatggacgtctcagacgtatgatgtaatccactatttcccttaatactattttgagcactgtgtgatgatgtccatgttatgtaactgctgtgtacgtgaataactgatcctggcacgtacatggttcgcattcggtttgccttctaaaaccgggtgtgacagattcagaacgaaagacttttaagagcagagaataatgtaactcctgtccatatcagcggtaaccataaaacagctccaagcaaaggcgggtgtctcagaatatggtttctctagtggacataacatgcattgccttaagctaatttagaaatgtccaccaatagagacgatgtctgccagaggaacacataaggttccatgtgcagtttgctttttctgatgacactgtacaatttgagtctgttgggcgagcggtggatacacgattttacccaaaaataatcagatgcaacctcttgggtaaaacacacagaaagaggtttaccaacaagtggttacaggaaattcatagcacaggggacgtgtgtggatgtcgaatacggtcgcggttaacatgtggctaacccgagaattcaagtccacgaaatatggtatagattctagagaattaccagcggagggatctgtagatacggactttacaaccagtccattttatcgagcactaggcatggctcgacctgatcgcacatgctggaaaagcacacgtgaggcgatcggggcatgactagagcgatgattagggggttatcagtcgattttaacttgatctttgtaataactttcttaggatgggttgaaccaaagtgagtttagacaactcgataaaacgatctctaaactcaacattcgttcattgggcagttacaagttagtaaaaaccaacttgttgaactacttttgacattgagcaagtcctctcagtaccatcgataagccaatgtttgagagttcactcatgtcaccaggtgatcatgcacatgggtagtaatccatttggtcatgttgttcatccgtttttgcatgcgagatgaaccatccacttggttagggaatacatggattaaataggagagcgaatgaacaaactcctgcatctcagcagcagggaaaaccaatctccattttgagagctaattagctgtcttccaacactaaaaagctccaagggttcacctttacacaaaggatgcaaagggaacgtgtatgtgtgaagtcaccatcaaagtcaaggaaaagagaccacacatgaaagggatatgcccttttgatccaacagagatgatagatgttgcttgatcacttgacaaacaacatagaaatttttttaagggaaagtccacgaaagattacacatcagtgtaattccatagtggatcatgac

SEQ ID NO: 12692 - DNA, 687 bp, Zea Mays
tcggagtataaaactaagtcctttgcttgcaaatattattactttcaaagaatgtggaattaatacaaagcaacacaattgaaatgttttatggagaataatgcaagaggactttagataagaagaggaagaacacaagttcttttcttacaaggcgttgcttctatatatgagaattttacttaaagcaacacaaagtaatattaacaaagaatagtgcaagagaacttagagagcgagaagacaagcaaatcacaagcaataaacgcaagtgacacgggtgatttgttttaccaaggtccggttcactaagaacctaatccccgttgaggagtccactaaggacgggtctttttcaaccctttccctctctccaacggtcaccaagaccggtgagttttccttcttctttgtcaacaaaagaccgaagtctccgcaaggccaaccacaaagataaggggctcttactagatttacaatgaatgggagtcaaaactccacgctcaaatgatcacaagaggtagcacacactttctctcaatgattctcacaaggcactatcactaaacgcacacgagtagctctttcttgcttgatctctcttttgtggcacttgtgaggctttgatgtatagaagtgttgctctagtagataggagtgaatacccaactcttgtgtatgaaatgg

SEQ ID NO: 12693 - DNA, 529 bp, Zea Mays
aaaaaattaggggcagttccgttactatttgggtaaattgaagtgttaatgtcagttaggaaacaaatgttggtaccaatgcaataaacaaatgtggcaaagttataaactaaaatgttgttgcaatttaccaacaattgttggttgcaatgtctatgcactgtaaattaattgatcacagtatccatgcctgggtgaatttgttcgtggcttctaataaaatgaacttgcagaagaaacatgggagcacagacatcagacatggacaatacacttaagaagttgattataaacaaataactaaagcaaaaaaggatttagaacctcagttagttgaagtggacgtcaaataatgaaataaatatttcaagctgcataataagtgaaggtttcgttagttgcatgcaatgcttagtgatgtaacaaacaaaggggttgtatgttaactaagtggagttcataaacagagtaacttattacaatgcaaaaaaagggatatgcatcaaacaaaggggttgtcatgaggaat

SEQ ID NO: 12694 - DNA, 238 bp, Zea Mays
cttcatataaaattataattacaatctcgaatcctatacttgtgaactacacggttcatcaaaggtattgctatcttttcttcttggagacgtgctaaatatgtcgcttgattccttctttgttttcttgccatccgcttcacgtgtcacaaggtgcttcggctaaacaccaacgcctaagctagtagtttgaggactagaatcattctaggtcggtagaggctactgtgatgaagat

SEQ ID NO: 12695 - DNA, 2140 bp, Zea Mays
gtttatacatgacacggacacctgccgctatactggtttgaaattgggaagaaggagcaaacggggaaagagaaaagagagtaacgcccgaatttggtgagagaaaagaagaaaaattctacccccaaattcagggcgttacactgagaccccagcagtaccttttgttctgctatatcttcacaaagaagcataggcttcggctgatccgctgaagcagccttctctcttttgtatctatactgctcacaggcttcagctccatctatattatggattgcctttgaatctgtccagtttccttcagcctttctggcagcttcttgactcccatgaatagcaatggatccttgttccgaaggtatcttcatgcacagatatgctagatgaagtattgcttcgaaagcattaaatgtccctcgaccaatgattgcattatatgggtactccatgtcaacaatgtcaaagacaacctgttcagtccttgtgttatagacaaagccgaaagtcactggcattgtgattttgccgagtgctacaatctgtcttcctccgaagccacaaagagggtgtgtagcatcatgaatcttgtcttctggctcttgcatctgtctgaaggccttagcaaatatgatatctgctgcactgcttgtatcaaccagaacattatggaccagaaatcccttgagcatcattgtgagctgaaggtcatcttgggagaaggtgattgggatatgggaccattttgatttgatgaagggtccctgcaccccaacatgttgtacccttctctgtgcttctttcttctgcttcttgttagccggctctgaacctgagtcgcctgttatcggaagcaccagcttcgcagccgaaggtgcttcgacgtggttgttgaacgaagccatcagctcgaaagtggaagtgagttcaccggaggtgggcgctaatgttggggacttgttctcaaatgctatgaattaagaacaaggcaacacaaaaatagattaatgggtccttcgaagcattatttccctaaggatataaagatcttcggacgaaggttgtgaagaacgtaccttcatcatcatagcataaatcaatgaaagacgaagcatacgaaacatggaaaaataacatggataattatatgacatcataatgtatcttttattatatgattataaatgagtgaaaacaatattgagttacatttgtaccttcagcttgacagaaggcaaaagcacaagtgtgatgcacaagtgaatacagatcagcgtgaacagtacgggggtactgttcatctatttataggcacagggtgtagcctgtgtggatttacattcatgtcctttataattggttacaatcatgacacatattatcatgggtcgattggtcttttcatctttaagtcggtgcaacccttcgtctcaaggcgtgtcactatgccgaagctccctggatggtagcttcggcgttgcttctgtgttgatcttccgaaggtatttcttcttacatgaccttcggctacgaagctgacccccaacatgtatttttgccaaattttcttagcatgaggtaacaaatcaggtactctaaagacgaaagattcttctagagggatcaactgtgtttttaggggtttgcatctaaaatcatagcttccatgagctcgggcatcaaatgtaaaaggactagcacatcttcaaaagcacagagcattaggtaggcaaagaaaaaagatgtggtgggagagatagtgcgagctaactcgagacggaggggactagattttagtccatctacggctcaaaccgtagcaacactaggttgtagatcgagtgtaggatttgatttctcatatccaccataaaccctagatcaagtagccgcggatgatggcaacaattgagtacctcacggtcaagtggcggcgcagtggatggcatagtggatgtcgacggagcgaacgacagcgaagtggatgctggcgatggagcggacgctggcggcatagatgatggagctcgtgtcgcctctcccttgctcgtggtgtggacaggaaacttgctcgccctctggtttccggggagcgttccttgggtggattggctggatcgaggagggcgctggaccggtg

SEQ ID NO: 12696 - DNA, 598 bp, Zea Mays
cgtcgggaatatctcccgcggggaacgggaacggagaaatttttcgtcctaggacggggatggagagctattcctcgttgccatccttacatgtgaccccgttgtgtccaagttgggatgaggcggtgatggattgatgggatgtgaaaggaaattcggttttctgagttaaaactcgaaaatgaattaaactttcagtttttgaagatggatagccagaaaatacagcggttttatcgttcctttttcggttccttttttaattttttgtgtccgatttttgttttgtttttttttgcccgggcctagttgcagcacatgttcaatttttcattgcacaaagtcgtgatcgttgattgatgggccttcatctcgttataaaagtactcaatccatgtaaaaaaactagaatatgatatatactaatattataatctcgatggggggataggtagaagacgacgacaacatgagtaagggaagagagaggagacgatatggtcgtggaggaagggacaagctggggtggcagggtcacgaggaaggattaaggatgatggacggtctaaataatgttgttcattggatttgagtgaaa

SEQ ID NO: 12697 - DNA, 130 bp, Zea Mays
cttcgttggtgcagtgaggtgatgaaggcctcgagcgaagggtagcgtcttcaccttcgtcccaacagtagggcctcctcccatggcgaaagcgactctgcacgatgctcaactccatcgagaatttctt

SEQ ID NO: 12698 - DNA, 480 bp, Zea Mays
atcccttattaaaaaaaatgtatctagcttaatagattcatctcatctcaaaagattccatcctgcactcatagatctatcttatctcaaaagatcttaacttatcctaatgtatctagatccatcttatcttgaaaagattttatctcatcataatagatctaactgacctcaaaagattctactttatccttatgaattcatcttgccctaattagcatatttatcctactatagaataacaaccatgagctataatccagtcatatccaacctaatctagattttatctaatctagagtaagttatttagtgttggtacaaaagataaggccatacccctcatgcacttaaaactaaactagggccttaaaccaactcactcacatgcatgaggtctatcccaatcaatagagtcatgatggattgcataatctatcaacccccacctaaaacaaacttttgacctacatcatggag

SEQ ID NO: 12699 - DNA, 387 bp, Zea Mays
ctcaaatcaaagagaccaagaccgaagaataaaagatcgacattgacaaggaaggatataacagtcaagcgaatctcgagatgaatcaagatttaaatatttcggatgaagtcttctccttggcataatctctcttaccacaacctgtctagcttatatccacataataagtagctggatacctatgctctcccaatcaacccctattgactataaaaaaatgagactctagatttttgaaagctgaattacaaaccaattcttttgtatcccttttcttacaaatctcgaggacgagatttctgttaaggggggtaggatttgtaaagccctaaaatttgtataaggtaaaaaaaaaaataatacatgtatttatatgaaagtgtt

SEQ ID NO: 12700 - DNA, 207 bp, Zea Mays
ctcaaagtatgccctggactccagacgaccgcattgatgacaccctaggctttggcgggtgaagcggtccagggtggtaaacgaattcctcgccggagcaatggactccgtcgcagagccgctcaccactgtggctgggaatctacacgctccgaactccggtaacaactcctcccagatgttcgccttgtcctatgcgtagcccag

SEQ ID NO: 12701 - DNA, 754 bp, Zea Mays
cttttatgctaatggtactttaaattgcaaataagtactctcaactgatatcaattgaattcatatatatgagtgcaataaatcttgaggaaaacttagtgtaatatgcaattagtgatctgtttatctatcaaattgtatcaattggtgtttttcaattggtacttttcgtacatgatcactagttgtataatccatacttgtgcaattttcatgctgcctcttgttatgataagaaaatgctaggtgacatctagactccaggtatcaagatttatctttcaattagtatgacaatattcatttgatattttggacctatgtcataattatgccaacaagagattgcaaaatgaactctaaatacaacacaagtgtggaacacccctttgaaaaggtaaaaacgcaaaggtacatcacttatgacacttctccattacctttgtgccatataaggacccttttcatggtagtgtgttcaaatcttgattaatcaaaatttcttccctttatatcctctgtatcctttttggagacttatgacaaagggggagaaattgtgcattaaagcttacctttagtcttatgtaactaagtgtaagaagacttttgaaaagggggagaaataattgacaaaagaggttgaatcataagtaaaacataagatgaaggaaattgatgagtgcataatatgccatgagcatcacgtttatttatgacatttatgacacaaagcaccctatggatagtatga

SEQ ID NO: 12702 - DNA, 330 bp, Zea Mays
agcatttacagtttctaacacacaagaatttaatcttcttttagaattttctcagcggcttcatgtaatagtctgtcgacaacttcgtcgacgactttgttagcaatcttcatcacatccaaagcctctttcatagctgggttagcctcagggttgtatggctccagtggtggcgaaaggtcggctctaataaaaaacataatggtgagtttcgaagccagaaacaaacaaaaaaaagaaaaaaaactttaaaaggatacctataatcattgcgcgttcagcatcttcttcagcttgctttgcctcttctcgggcgtcatgagattcttt

SEQ ID NO: 12703 - DNA, 617 bp, Zea Mays
cagtttctcaatcctaacaatagtcatacacagagtgtccaaggattttggttttttgaaatagcttttgaatatagaggcttgagctttggcaaacaccaaccttctttttggatctgtgacactatgaaaattattaaataaaaataatacatttatggtaataaatcttccattgaagtgtttgttgtttatttcagtcggaatgatttttgattgctcataagtgattttgaatattaaatattatttcttcttaaaagaaaagttcagctaaatatatataataatattagtccaagaattaatatcttatttataaataattttagtttgattattatgatttttagggttatttcaaaatgtatttcgaaattggaaaagggaaataaaaaaaaagaaaaaaaacctaatcctaccaggtcgtgtggcccattaggcccatcagccgccgccccctgacctaaccctggccggccgccactctcctccctgtggccgccgccactgcctctctctccccccacccggctcactctctctcctttctctctgctctcgcctgacgcccgaccgaagctcccacgttccagccgccgagcagcgcctgcacg

SEQ ID NO: 12704 - DNA, 334 bp, Zea Mays
actccctccggtgcatcaataatcgacgttctagctttgagtccaaagtgcacgataaattgacgtttcacgtggagcgaggagaactctcgattgacgcagcaagaagtaaattcaccagccgtccgttggccttctccacgccatgcatttgcatgcaaaatggtaaaaaatttagtattgcgtgagtcaagaatcgaacctaggcctcctgcctgggaaggagtgaagatgaccactccggctattaaagggatttgactaggaatgaaaaagtgtggtatttattagttccttggtatgtgagaagctgtccaaaacgtcagtttttggt

SEQ ID NO: 12705 - DNA, 483 bp, Zea Mays
atcgagatcaatagctgtggggtgagccagcgaccggtaaatacgggaaatcccaactgaaaccaggattcccgggcgttcgttcaggccggcgcgcacaaaacggagagggaggcagagtcggagacggaaatttgttacggcctgctgcggagtggagacgaagctgacagtgggcccgagtaatcagtgagagaagggaggggaaaagagggctgcaccgagcggtcccacctgtcggcaccatttctcaagccgggctgtcgcgaggtgaggtgggccgagcggtgaaggttttggcccagccaacatttgactatttctttttttatttctattttcttttcttttataatttttgttgttttttttcaatttcaaattttcaaactcaaatctatatcatccatttgaattcaaatgcatcaatacaataacgccaacatgatatgcacatctctacatttatttattcatcatttg

SEQ ID NO: 12706 - DNA, 215 bp, Zea Mays
attttttgtactgtctcccggataacaaaagaaatatctatttttcgggagataggtaaaagcatcggattcccgaagctggaagacggtctttcgattttatcgaaggacgaacttgcttacagcttagcatacaatagcataaaggtataaaaactacctataaatttgaaaatgaggtattttatttgtcatacttattctttcctccattt

SEQ ID NO: 12707 - DNA, 159 bp, Zea Mays
tgtatgtatcatagtgttaaggaatagaacctatgtgtcacccattttggaccaacatatctcacatgtgatgtgtgttggtccaaaattgtccttttattggacaacctcggagtgaccggtagagaatgtatttataacaagccatgagcttgaaag

SEQ ID NO: 12708 - DNA, 116 bp, Zea Mays
gccttccagaattgttctcaacggctcctagctgccttgcggctataaaaggggtccctaggcgcatggaggataacaccaagcattcctacaactcttctaagcaccaagacatc

SEQ ID NO: 12709 - DNA, 1630 bp, Zea Mays
gttctcaagtgctaagagttaagaacaaggcaacataaaaaatgttaatcgttaacatccttcgtcctccgaagcattattctccttaggacataatggcttgtggacgaaggttatgaaggacataccttcctagctttattaaacaatgacgaaggatgaaatataaagaatgtaaaagaaaacatgaacaatcatttattattattgagcacaaacaaaaatattattaaactataagtgtaccttcaatcggaaggaaatgacagtacaagtgtgacgcaaaaagcgaatgcccagtcagcgtgaacagtacggggatactgttcacctatttatagacacgggacacagcccttacaaaattacatttatgccctttacatttgataatgactctatagtagtctatcgaggtctgaatagccttttcatctttaggtcggttccactctttgctgttacgccgaagctttcctgctcagcaccttcggctctgtatcaagcttcgtattattccggtctactgtaatgccgactttagtccgaaggtacctgttcacacattgtactacagaaatactgttaaatcctgtttttgaggaccttcggacgccgaaggtccccaacagtagcccctcgcaatattaatttgtttgaaataataaatttagattgtgatatggacgaaggctttacgccgaaggtccgaaaaaacaccttccctttgctagaatagcaacattcaatgacaagtggggtctttcaactttcaacgcaccgagcgtataaatacggccataccgcaaactcattttgcacgctttctggccgaccactcccgctcactcaatttttagctcttgtgcgctgtgatttgctaagctttcagctttgaagcctcggatttgaagacagttttttagtgtttccgaagatgtctgaagctgctaagaaggctgctgctgagatgaagctgagtcttgatgaagagaagaacttaggatttcttatagcaatgtcgaagaccaacacagaaaaaatcaccaaggagattctggaagggctgtctgaagatactggtgacagtgaaagttatgatgtggacagcggtggcgaagactccgaagatcgtccctggcgaccaagccattcagtttatggtagatcaaccatcaaagagaatcatcttgttaacatgagaggaaggtatttccgggatctgtccgttgtgagggccgacgaaggggagaagacttgtccacaccctgaagagaatgaagtcgtagtgttccgaagctttttgaaggctggactacgattgcccttgagcagcttcatcgtggaggtgctgaagatttttgaagtctatcttcatcaacttacccccgaggcaatcataaggctgaacatattcgtgtgggccgtgcgaagccaaggtctggagcctgatgcaaaaagtttctgcaatatgcacgaattatcatacgaaacaataccttggggtaaggaacaatatcacaataacttcggctgctataattttgtttcacggtctgggtcaagctgccccgtgccaacttttcggaaaagatggcccagcggctggatgacagaatggttctatgta

SEQ ID NO: 12710 - DNA, 658 bp, Zea Mays
ccacaagaaaccattaaagaggccgacgaaggtggacttgtcaggtttaagtacacttttaagtttggagataaatttattgaaccagatgatgagtggttgaaaagcattgataatttgagtgatgagctgcttggtacctactcgaaggccgaagatactgcaatgtcagcagccttcggaggccgaaaaaagaagaggctgaatcgggtatttgatgccatcgggtttgtctaccctgactattgctatcccacacgaaggcagaagagaaaaaacacaacctctgcaaaagaagaagctgcagctgctcctagcgagccagaaccgaaaaggaaaaagttaaaggttcttacgcatcggccgcgttatattgaaccagcttcggtgcccgagtttaccggaaaaacttcttcggccaccgaagctgaaaaaccaaccgagccagccttgttgccagagatcgcagaaacggccgaagtgccaccaaaaatagaatcggaacaatcaaatattttgttgtcagaaacaaaagagaaagccgaaacgccgtccacagaaaaaattgaagaagtaaaagaagcaactgagggctccaaaacatctggagttttgagtcctgcatcaaacattgagacagtaaagaatcaaaaaatgc

SEQ ID NO: 12711 - DNA, 445 bp, Zea Mays
attgtctccccgacagcaaggaaatttctgtctgtcgggagatgagcagaagcttcggattcccaactttagaagacggactttcggtgctgtcaaagaacgatctggctgacagcctagcttacaacagtttaaaggtgcgacgaacggaattcttgtattttttgtcgagttcaaaatttttcgtttgtttaaaactattgacacaaacatgttcctgtttgcaggtcctgatactcagcaatgccctcagggcacagaaagatgctgaagatgaaggttgtactatagccctgagcaaccttcgttccgaagtaattgaactgaggaacgaaggtctcgaaaaagacaaaatattatactcattaatagataaaataaaggaggacgaagctacttttaaaagtcaagccgaagctcagaaacacgaaattgaagaccttcg

SEQ ID NO: 12712 - DNA, 682 bp, Zea Mays
tgaagccttcgaagaaattttgaatagccgaggagatatatgtgccttctctggcgctagagggattgccactatcttagagaagaagggctgtgaacatgtaaaaattttagcacagtccgaagctgctctgtcctttgaagatacaaaagatccttcggccgaagctagtataattggtggaaaattttttaccgatatctgggataatggtggccgagaaatggccggagaaattattcgaagaagtgagaagggcattcacgatgctagagaaataaccgaggctgctgacaagagcgcagaagccgaaggtcaattaggtactaaataatagtttttatcgtgttgtaatctttagatttttaagatctgtttgcgatttgtaatagcaatgtagccgtgtcctgcttcagatccgactaaagcgccttcggaccctcagccaaagggggacgacgaaattaaaaagatggccgaagatattatggacgaagtcgtcaatcgactcctgaatgaagctgcagaagtcgttttgagagaggaataaacatttttgtaaaaaacttctgaagtgtaatatagtgtaacattttgtaaccccgaatgtaatatatctatttttgttactcaattctttacgatgcatgaaactttacacacgtaccgtttttgagtcttt

SEQ ID NO: 12713 - DNA, 537 bp, Zea Mays
cctctctaagagaaaggacgtcttgattgggatccagcggctgcagtgtgccagcccctggtgctgaagccttcttcggcggcatgacgaaggtgatgtttgccgaaggtgttgaaaagctcaagaaatggaagtgagttcaccggaggtgggcgccaatgttggggacttgttctcaagtgctaagagttaagaacaaggcaacataaaaaatgttaatcgttaacatccttcgtcctccgaagcattattctccttaggacataatggcttgtggacgaaggttatgaaggacataccttcctagctttattaaacaatgacgaaggatgaaatataaagaatgtaaaagaaaacatgaacaatcatttattattattgagcacaaacaaaaatattattaaactataagtgtaccttcaatcggaaggaaatgacagtacaagtgtgacgcaaaaagcgaatgcccagtcagcgtgaacagtacggggatactgttcacctatttatagacacgggacacagcccttacaaaat

SEQ ID NO: 12714 - DNA, 1046 bp, Zea Mays
gaaaaacagtcggcagttcatcgccagcggtggaagtagtggagttccttctcctgctttgtctgccctcattggtctgtaagaattgtccctggccaactttgatcaaactcttgaggatatggtcccagaggacttgttatcagagccagtggatgatgatgcaatagagacttgcgctgccgtgcctgatgctgggttgaggtcatcccgtgcctcatcgaccttagagcgcgatctcgagggtcgggatgctgacttggattgtcctgattccatggaagtggctgaaggcccgtcaaccttagaggtggttactgcagagagcctggaccccaagaatggtgctgacacatgcccagcctccaaggatgtcgccggggatgacttagctcgggtgaagagtgtaagccactgcccagcccccgagggtgttgccggggatgatccggctcaagtgggcagtgccgactatgacccagcccccgagggtgcccgagcagggtctccttcctgcacttccatggacgttcacgcgggttcacctccacaccttggcttcatggtggtagcccaaactctggaccagggagtcgctttagagggcagcgtcctcactgatctggcgtttggctctgttgaaggcactgagctgattcctactggtccgttgcaacctgcttcgggtggtggtcttgcacctggttatcagctgatttctcctgatttgggaatcccttcgttcttttccaacctccaggtactgtgctatactttagcttgatctttacgttgcatgaacttttgtcattatgttcatttgttcttctcatcaggctttggtggatgggatggccagccagctgagattgcaaggtgctcccgtcccagaagtggcttcgtctcttgcgtgttggaatccagtgtcacttcatcgtcgtgtatccgagctggaggcaactaacgctggttagtgccctttttcttctcttcgtcttcgttgtggactgttttaccttctgacctcgttttgtttgattacctct

SEQ ID NO: 12715 - DNA, 796 bp, Zea Mays
ctgacttcgaggagaagtactctcagagtcaaaccgaattaaatcaggtctccgctgccttggatgacgccaatgccctgagttcttctcttcatgctcggcttgactctgaaaaggtaacttacgaaaccgtgccttgtcttgctatgctcttactacttgcttggtttctgaaggagttgattttttgtttgcaggaagaaaaacgcatccttgctgcttctcgtgacaatctagacagattgtatcgtgattctagcaactcgctgaccatcttggagaggagtcaccgctttacaatggaggaactggacaatcaacgttgtaggctgcaagaatctgcggatgaagcgacctgccttaaacaattgatatcagcgaaggatgccaccatcaaagaactccgagcttccaagaaatccattgcccaggagttagaggccgctcggctggctgctaaagttgccgaagaaactgcagctactctcaaagcccagcgcgataaagccatggataaggccattcgtgctggacgaatcttaatgaggagacccggcgtggttgttcctgaagacataaaggctgacgtgaatgctgcccccgattcctcgagtcgtcctacttcgtcggtcgctcctgaaaaagacattgcgaaatagagaaacattttgcgtgctctgagcgcgcgattagcatgatcgagtatttgttagaagacatcagtttatcattcgaatgacataattactctcttattgcattagaatttattggttcgtaaatttgtggtaatgac

SEQ ID NO: 12716 - DNA, 1220 bp, Zea Mays
ggctaggttgggttcttaggctccaaacaacataaggcaattctcttatccactttcctgcgaatttttcattcttatcgaagacccttttcctgagtgcctccaatatcattccgttggctcgctcaacctgcccgttggctcttggatgtgctacagatgcatacttgatctgaatgctcttttgctcgcagaagtcgaagaattttgaactggtgaagttgtatcctaagtcagtaatgatactgtttggtatcccgaatctgaatattatgtcttgtatgaattccacgaccttagcagaggttaaagaagcaatgggcttgaactctatccacttagtgaatttgtcaatcgccaccaatacatgagtatatcccccttgagctttcttgaaaggtccaatcatatccagtccccagcatgcgaaaggccaggttactggtatggtctgtagttgctgtgctggcatgtgctgttgctttgacaagtattggcaagcttcgcatctctgaactaacttggctgcatcgttcttcgccgtcggccaatagaatcctgacctgaaaacctttccgactagtgttctggatgctgcatgaattccacattgccctgcatgaacctcctccagaagttgcttcccagtggacgggagaacgcacttcatgaggatgcctgatgcgccccttctgtacaattcctccccaatgagtgtatagtgagccgactgcctggcaatgcgctctgccgagttcttgtcatctggttcttcttcattctttatgtacttaataatcagccttctccagtcatcagagtctaactcgggttgatttatgatgttgcactcttctgtttgatccattgatatactcggctgcagaatttcttgcacgaagactccgggtgggacctgagttcgactggatccgagcttggacagtacatcagctgctgtgttccgatctctttctacatgatgaaattccagaccctcgaatttatcttccaactttcggacggcagcgcagtattttcccattgaatcacttgaacaatcccattccttgtttatctggctgatgactaccagagaatctccgtataccatcaatctcttgacgcccaatgatatggcgatgttcaatccgtgtagcaaagcttcatactcggctgcattgttagaggtcgggaatagcaactggagggcgtacttg

SEQ ID NO: 12717 - DNA, 336 bp, Zea Mays
cctattggaaaaccagtgactactatgactttgtggtcatcaaagtagtgacgcaacttgcgggcagttagaagtactacgtataatagcttctgaacttgaggatactttttcttcgaggggcctagaacttcactgatgaagtagacgggatgttgtactggataggcatgtccttcttccactcgctcgactaccaacgcggtgcttaccacgtgagtcgtgcaagagatatacagtagcaaatcttcggccggttgagttgacgtagctcgccggggtggttttagtactggtggtgttgttaagaatttcttcagtgcatctagagcttct

SEQ ID NO: 12718 - DNA, 232 bp, Zea Mays
gggattcaaggtaaagcttgtcaaatttcaaagactcgtttttgcataaaagcttactagtagtggatccttatgcaaaatttttacttcacaaattaagtactttccctgaatctagatttacctggtctagagcattcacttgtcctacactagcttcattttatcaactttaatttcacttgttatctacgatgagggtcgaagatccagtcttcatatccgagaagtt

SEQ ID NO: 12719 - DNA, 2904 bp, Zea Mays
aaactacacttctaacattcgtatataaaatttcgacagcatctcctttgaaaattgcataaacggggaagcaacaaagtataaatagatatcatgataagaaaacataatcgacattaataatctgctagcaatgggaagacaaccataacaacatgaactaaattaaccagtgcgcacaactagttagaaacaaacatcctttgacaagaagcttctaattagatcatgactgcgcctaagcagcgttattatgagagtgaaggtggatgtgctgctacttcccacttccctagatgagcaacaagcacctgcattgagtaatgcaagagtgagatgaaacatctcagcaagcgaattgttttgacgagatatttaaaccacaaattgaattaatcaacattttaaaagaatcacaattaagatcagaaatacttgtagatatagaactcagtagtcccaatataaccaataccatctcatttcctcgaacaaccacaataggttctataacacttccctgcgtcaacaaaacctgcaaatatcacttcaatgtatgcacaggagtgcaaagtgtaggtactctgtcttcatacctctgagggtataaaaccacatcagctgcaaatatcacttcaatgaatgcatatgaatgcaatgcatatgtcctctgccttcatacctctaagggtatgaagccgcatcgtacccctcctcgggcaacgtacgatgctaagttgtaccggtacggtcggaccataggtcacgacccaacttcatatgcaagtgaatcatgcaatgtatatggcgtgctgcatttatcaatatacttcacttccttcacatacaatacaacctcaaataatacttcatttaccttcatatacaataccaacctcaaataatacttcatttaccttcagatacaataccaacctcaaataatacttcatttaccttcaggggtgtgaattaatctcatgagtcatactcgaatcataatcatcatcaatatatgattgagcatcagtataatgcaagcaagtaaagaattaccatagagtccaattatgaaataatccaatacttctgaatattagagtgtaggcaatagaaataacaggtcagaacggaagcaaccaccgctacattcacttgccttcatcgaagaagaaaaatgtactaggcatgatctggagtgtatccacctgctagtgggcataaaacttagtacaaatatttcacaaacatttgccaacgatcaacaaaacactcctacatttgaaaccaagacccagtggaaagactcccaccctaaaccacatgccatacaacagcaacactgtttgttaattttgtatctttaaaattaaaacagtggtgatatcaaaaaaatactctaggagtatctacacaaaacactctacaacttcggtatttaatggataattaaattctgccatcaataagttctaaaacatctgacaagataactgactgaatctgttttagacagcagcctagttaacttcaaaattcgatatctcccaaactactgaaccaaaaattatgaaagtctgctgacagtaagaacttttatccctctacaaaagtctccatagttggaagagccaattcggccatttactagatgaaacctaccagtgaacagacccgctcatttttgtcaggcaaacagcaacagccacagtaaaacaaacataactggagtttcataaatcatatgaatgcactctttaacaatctggaaagcttatgaaattatctacaacttcttttaccaacccacattttaattctgttgataaaattgcctaactcttaagagaacagattctgcacagaattatgagactaaaaaactgatataatcaaactgcaataactttctgttctgatgtccgattgaggtgttcttcacggccacggaaagatctacaacttatctacgactcatatatagactttttatttttttgaggccactaagaccacggaaaactggcatgaacagaaactgtcgaatctgccattctgcagaaattaaattcgagatcaaaacctaaccccacatctaatccaacctctaatccttcaatccacatgatccacaacctccaaaagcacataattatagggaggaacaaggatctcatccttacctagggtttccccaagaaaatctgcaagagatgggggtagaacatctccttgatcctctcttcctcttcaatccatcttgctcctcctcatctcgatccttgctgcgtgggggggagatctagagggaggaggaagcagtggagggcggctgcaaggggaagggggaggggcggccaagggtggggaaaagggggggttggcggccaagaaaagggaaaaagggagggggcgaccactagggttttgtgggagaaagaaacgacgcctcagatgtctcctgactttgcatccaacggcccacaactctttccctcatccacgcatcgaagatcaacttttggtcaatattttttttgggatattacactctaccccccttaaaaagaattcgtcctcgaattcgaccactccaagcaaaacactcaaggtaccccatatagcaccaccattcgaaacatgggtccattattgttcttaattaacacaagaacttctaccttggactaattgtctatggaaactacacaacctgacatcaagcatgaaccaacatgtaatgaagctcaaatcaagtcatagatgcaatcaacactacgatttcacaacatcgaatttggatgcagccatacatcagcatcaatgtcttaaaacgacactcttttatgaaggggtaatatgcactaagcacaacctttaccaacttcaacaattcattttaag

SEQ ID NO: 12720 - DNA, 1114 bp, Zea Mays
tattcaatggataattaaattctgccatcaataagttctaaaacatctgacaagataactgactgaatctgttttagacagcagcctagttaacttcaaaattcgatatctcccaaactactgaaccaaaaattatgaaagtctgctgacagtaagaacttttatccctctacaaaagtctccatagttggaagagccaattcggccatttactagatgaaacctaccagtgaacagacccgctcatttttgtcaggcaaacagcaacagccacagtaaaacaaacataactggagtttcataaatcatatgaatgcactctttaacaatctggaaagcttatgaaattatctacaacttcttttaccaacccacattttaattctgttgataaaattgcctaactcttaagagaacagattctgcacagaattatgagactaaaaaactgatataatcaaactgcaataactttctgttctgatgtccgattgaggtgttcttcgcggccacggaaagatctacaacttatctacgactcatatatagactttttatttttttgaggccactaagaccacggaaaactggcatgaacagaaactgtcgaatctgccattctgcagaaattaaattcgagatcaaaacctaaccccacatctaatccaacctctaatccttcaatccacatgatccacaacctccaaaagcacataattatagggaggaacaaggatcccatccttacctagggtttccccaagaaaatctgcaagagatgggggtagaacatctccttgatactctcttcctcttcaatccatcttgctcctcctcgtctcgatccttgctgcgtgggggggagatctagagagaggaggaagtagtggagggcggctgcaaggggaagggggaggggcggccaagggtggggaaaaggggggttggcggccaagaaaagggaaaaagggagggggcgaccactagggttttgtgggagaaagaaacgacgcctcagatgtctcctgactttgcatccaacggcccacaactctttccctcatccacgcatcgaagatcaacttttggtcaatatttttttgggatattacaa

SEQ ID NO: 12721 - DNA, 1335 bp, Zea Mays
ctctacaaaagtctccatagttggaagagccaattcggacatttactagatgaaactcaccagtgaacagacccactcacttttgtcaggtaaacaggaacagccacagtaaaacaaacataactggagttttcacaaatcatatgaatgcactctttaacaatctggaaagcttatgaaattatctacaacttcttttaccaactcacagtttaattctgttgataaaattgcctaactcttaagagaacagattctgcacagaattatgagactgaaaaactgctataatcaaactgccataactttctgttctgatgtccgattgaggtgttattcgcggctacggaaagatctacaaattatctacgactcatatatagactttttatttttttgaggccactaagaccacggaaaactggcatgaacagaaactgttgaatctgccattctgcagaaattaaattcgagatcaaaacctaaccccacatctaatctaacctctaatccttcaatccacatgatccacaacctccaaaagcatataattatagggaggaacaaggatcctatccttacctagggtttccccaagaaaatctgcaagagatgggggtagaacatctccttgatcctctcttcctcttcaatccatcttactcctcctcttctcgatccttgctgcgtgggggggggagatctagagggaggagtaagtagtggagggtggctgcaaggggaagggggaggggcggccaagggtggggaaaagggggggttggcggccaagaaaagggaaaaataggggggcgaccactagggttttgtgggaaaaagaaacgacgcatcagatgtctcttgactttgcatccaacggcccacaactctttccccacatccacgcaccgaagataaacctttggcaacattttttttgggatattacactctaccccccttaaaaagaattcgtcctcgaattcgaccactccaagcaaaacacccaaggtaccccatatagcaccaccattcgaaacatgggtccattattggtcttaattaacacaagaacttctaccttggactaattgtctaaggaaactacacaacctgacatcaagcatgaaccaacatgtaatgaagctcaaaccaagtcatagatgcaatcaacactacgatttcacaacatcgaatttggatgcagccatacatcagcatcaatgtcttaaaacgacactcttttatgaaggggtaatatgcactaagcacaacctttaccaacttcaacaattcattttaattcaatggtgaaacatccacaccagatgaatg

SEQ ID NO: 12722 - DNA, 558 bp, Zea Mays
atcaccccaaattttaactactcatccatcatgttgtctagtccacctaagaccagccagacccatattctagtcacacgaactccggtgactgtgattttcattccagtagggaacttcccatctggtcacccatcccaggtttctccaagttgagcacacttaactttgagattccttcgaaccaggcttccaaacttcgattccaataattcttgtttctaaattctcatcgaattattccctatccaaccatgtcatcccttaagcatggttcatgttccagaaaaatcccaaaatactcttgtcccatattctgcctataactctcctgttcatactaagtcagacgattcattcgtcactattctaaccaacagtgaacttcactgtgctacaccacatacacccagctataaatacacccagctaccctctcactctccacacacactcaacaccctcagccaaggcaaacgcccacccactcagttactccgctctaccggctacacgcatagtgtcgcttcacctccagtccaccctcctggtaagcac

SEQ ID NO: 12723 - DNA, 360 bp, Zea Mays
ggggtggctcgcacggcagggttcgcgcggcgttcagagagagagcagggaggagagagagaatagggagggagagaaggagaacaggggcggcggcggcttggaagccagggagagggcgcgtgcgcgttagggtttatgatggatgggcccctagttgggccggttttagattagggtttgtttttttcttttttttcttttattttctaaattgcgaaatgaatttttaaagagctcaaaaattttctaaaaaatcaccagagttatttataaataaaatacttgtttttagactaataattattatattattcactaggatttttctttaaaaagaattgataataaacatccgat

SEQ ID NO: 12724 - DNA, 198 bp, Zea Mays
ataatatttactctgttcttctctattcatcacgttttaattcaaaaataaaccagcagacaacaaaatattcaaaaacgggacaacactacttattctgtacacaccatctagtcatctcacattggatgtacgtacgttagagatacaatcgaagtcttatttggtatctttatgtaaacaacgcaccaaagttat

SEQ ID NO: 12725 - DNA, 490 bp, Zea Mays
ggtgatagcagttaagcaccgacgtccttatttatggggacatactttcataattaggtctgaccattatagcctcaaatatatccttgaccaatggctcgcaacaataccacatcaccaatgggtaagcaagcttctaggatatgacttcaaagtttaatttaaactaggaaaacagaacaccgtggtcaatgctctatctagtcaagatccaatagaaccatcactactagcaatctcaaaaatcaacttcccaatttatgataaactaagagatgaaatattggagtctcacactcaaggcaaaccggtgacaaccaaccttagtggcgccacacaaatatttggagcttcacgagtgacctcatagtctgcaaaaaaaaaaaaaaaaaaaaaaaacgagtacagtgttccaatcaaaaaacgagtggccggcggcatgtgcaaggcgcgaaggggtttagggtttaaatcactgttccaatcaaaa

SEQ ID NO: 12726 - DNA, 360 bp, Zea Mays
ctctacaacaagattctcagaaaaaagttgaacccttgacctatgactggcacgccaggtgtttagtcaaattttgcctggtacctccgtgagttttcgctaaaactacgagattttatttcgcccgtgtcaggccgatccctgattctgattcgtttgtgtagctctcccgcgtggcgttacgttcggaacagaacggtcaccgcaaaaaaaaaaaaaaaaaaaaaaaaaaaaaaaaaaaaaaaaaaaaaacaatggtgctgctgaacagctgaagcgctgacgcacgcacgccatgtgccaatgctctgccggcttttatgggaccaaaccgactaccgtggcccgtcaatactggac

SEQ ID NO: 12727 - DNA, 522 bp, Zea Mays
ctctattcccgctcactactgggttgaaagtctccacgctaccacctacctcctcaactgtcttccaagcaacgcgatttctgcctccatccctcacgcggtccttttcggcaagtcaccttcctatgatcatctgcgtgtctttggttgtgcttgttatgccaatatcgccgccgccactactcacaagcttgcccctcgctactcgttgtgttttccttagttactcctcgggtcacaagggttatcactacataaatctctcctccaactgcatcatctcccaacatgtgattttcgatgaggcaaccttccccttcgctgcctcacacggtctaactaatactgatttcttatttgagatgggttcctgaaagggaaatgtgcccttgggccatttctaagtattttggtgattgagtgcaaacacaagtgcttaaatgtgaatttatgcccatggatgaacaaagtgcaaatcaagagtaaaggtatgtttctaagccttagtacattggttttgag

SEQ ID NO: 12728 - DNA, 837 bp, Zea Mays
aagaacacaaccaaaactgtgttgattacgagttggggtatcacaaactgatgaacgacaaattcttagatgacaaatatgatctaagcaaaacccaaacactaatatggtggtggttgctgataaaatagagattaggggcgtgcatgacctttggttgcatccctaatatgctccaacacgatacatggcccaacagcccaacatacggtgttgcaacactaaaacagaatctgaacgctaacttgtttcgacgattcctgttgactccggatgaattttaaggtgattccagttgggttggaaagcgtatctccttaggtttccatccatataaagcataacctaatcggagttcggatgcatcttgggcgtctgttttagtgtagactagtcctagacttcgaggtggagacgaagttgagtcagacttggatttctcttgttgtgaatatcctagcttctcgtccttgacatcttggcctttcccaagtccttactagtcctctccaaggttcctaatcataaaaacattcatggcatcaagcgtaagctctaaaacacaattgattaggtaagaatgaacctagaggtttagttgtcgtgcacatgctcgtgttatcagtccatgctttatttttatgggagtgatgtcctcatcatcttctaaccaggcaaccctaggttgccttatggtattagaattagccgttcataagtgctaatttgtgaaatccaactcaacttttagctcaaactgaggtaaaatagggcaaaccttggatgaggtgatttatgactagttcacaagtttagataagttctaactgttcttag

SEQ ID NO: 12729 - DNA, 196 bp, Zea Mays
gttctacaaaagctcttgaataaataacacatgtgcctcattttctcactatttatctataatctttcatggactttcgctatttacctattatctagaagtgtacattatgtgttttctggaatctttgttttttcttgggagattgccttcacaccaatcctttcatgttgcacagtatgattttatgtttttt

SEQ ID NO: 12730 - DNA, 235 bp, Zea Mays
attcaatgtgtatcgaagtcagttaatacaaacaaacattgctgtccagatttggacagattcagactctatagttcaaacagctgtaacttagtctctagaccaccaaaaagggtgctccaaaatttgttggaaagcttaagcaaattactacaattctcctataattactaagagctaatgctaagtttaacttgggcaaacaaggttattttcgaaatcagtacagaatctg

SEQ ID NO: 12731 - DNA, 2939 bp, Zea Mays
cagacccattttagatcaccttttctgccagttgcatatggttttaggggcatcccacataataaagtttgttctcctatagtcatactacgagtttgccatagtgaccacaatctataaatttatggataggacagtagagagctccaaatttgagccaaacacactgaaattcatacttggataataacactaagtctgaaatccaaacctgtcagtccttctttggaccatttttgctcctaattccatatggtttttgggttaagtaacttaaacacgtttgtacacctaaggtagtactacaactttgctacagtgaccagcacaaaaatgtctagaggcaaaaagctataacagcccaaagttagctaattgatattattttcagcaaatcccaaattgcaccaaaactaaatttttgcagtttactccaagttttcctataaaacttggacatctccacacatggaagttgttcaactttctaagctttaccactttggtatatggacttttggcaacttctttctagattttgatttccactttttgggctagtttagggtttcaattgaaattttggacctattaaaatgcattctaggtgtatcaagcaagatgatgataatgcatatgatgagatgccaaaattttagttctcgtaacaccaggggtgttacatccttcccccctaaaaaggaatctcgtcccgagattaaaactccaggctaagtaatggaaaaggaaacacgtcacgatcttattctacctttgttcttacaaggcaggggtgtgcccctgtgggtttacatcaaagacaaaatacacaaggcttaatatttacaggaatctaaaaactgaggaaaatgctccataagatagtcttctgattcccaggtagcctcatcttcggagtgttggttccattgtattttgtaaaacttcataatctttcttcgtgtgacccgatctttttgatccaggacccgaataggatactcaaagtaagttagatcaggttcaaggttcacatctgaaacctcaactacttgttcggggactcgaagacatttcttcaactgagatacgtgaaacacgttatgcactgttgaaagattctctggcaattgcaccttataagccacatgtccacaacgttcaagcactggaaatggaccaacatagcgaggtgcaagtttccctttgacaccaaatcgagccacgcccttcattggtgacacttttaaatacacatgatcaccgacgtggaaaaccaaagatcgacgtctcttatcggcataacgcttttggcgatgttgagctatcttcaagtgatgctgaatcagtttgaccttttcttctgcttcctttaccaaatctggcccaaagaaacacctttcacctggttcggaccaattcagaggagttctacaccttcgaccatataatgcttcaaaaggtgccatctttatactttcttgataactattattatacgagaactcagccaatggcaagcattcatcccacttagcagagtaagcgagaacacaagctcttaacatatcttctaggatctaattcaccctctcagtttgaccactggtttgcggatgataagctgaactatgaattagcttggtacctaaagatttgtgcaactctgcccaaaacttggcaacaaattgcggaccccgatctgatacaatggtcttgggtataccatgcaaactcagaatacgagcgatatacaacttagcatatgcaagtactgagttgcttttgtttactggcaggaaatgagccaacttggtgagacggtctacaatcacccagatagagtcatacccttttgatgttttgggtaaaccaacaatgaagtccatgctgatatcttcccatttccaggctggaatgggcaaaggttgtaacggcccggcatatttcaaatgaacagctttcacacgttgacaaatgtcacatttagccacataccgagcaatttctatcttcatcttggtccaccaaaacctttgcttcagatcttgatacatcttattgcttcctgggtgaatgaaataccgagacaaatgagcttcatctagtatttgttgtcgtaattcaggtacctttggaactaccaaacgattttggaaccaaagaacaccatcttcatcaattctaaaacatgtagcttttcctgcttcaactcgttccttgatatgagctatacccttattcaccttttgagcatcaataatttggctttggatagttgattcaagaacaagattggctacggttccatgctgaattatccccaaattcagcctttccatttcctgacacaaggtgatagttaatggcttcaccgaaagacaattacactgggacttccggctgagagcatctgccacgacattagcctcgccaggatggtaatggacttctaaatcatagtccttgatcaactcaagccatctcctttgcctcatatttagctcagactgggtaaagatgtatttcagacttttatgatcagtatatatgtgacatgtattacccagtagataatggcgccaaatcttaagtgcatgaacaacagcagccaattcgagatcatgggttgggtaattgaaagggaaatgtgcccttgggccatttctaagtattttggtgattgagtgccaacacaagtgcttaaatgtgaatctatgcccatggatgaataaagtgcaaatcaagagcaaaggtatgtttctatgtcttagtacattggttttgtgtactaatatacttgtctaagtatcagaaacaggaagaagaagagaagagaagaattggctttgtacagccaagaggctgtttcggtctggggcaccggactgtccggtgcgccaggttgcctcgagcgaagtggccgctctcgggaattt

SEQ ID NO: 12732 - DNA, 325 bp, Zea Mays
gtgcaatatcacctcaaataaaaactcaaatttattttgattcaatttggcatatatggatcatcctttgccaccacttggtttgtttttgcaaatcaaactcacaatcctatctctaagtcaaatccacttgtagagacataaagagaggttttccatagaaaattgattcaagattccaaaaactcccccttttcccataatcaacacttctccccacaagaagccaatttttgacaagagagacaataaaagagttttgtcaaaacaaaaagctctattctgctattttcaaaatctctcaagtggtagctgatccatttat

SEQ ID NO: 12733 - DNA, 177 bp, Zea Mays
gcacctcacatagactattttcaacactcaagattatttagcaaattgttgattcaaaagaaaaggaaataaaaagaaaaaattagaaaatggaaaaaaaagaaatagaaaacagaaaaagaaaaaagaaacccccctcggctgggccgattttggcccaagccgcgccgcgccctc

SEQ ID NO: 12734 - DNA, 274 bp, Zea Mays
gtcatctcatcatgtgcatacacttgagttgttaggagcacctcacatagactattttcaacactcaagattatttagcaaattgttgattcaaaagaaaaggaaataaaaagaaacaaaaatagaaaatggaaaaaaagaaatagaaaaaagaaaaagaaaaaaaaagaaaaaccctccccccctcggctgggccgattttggcccaagccgcgccgcacccgctctttcccccctctcctcccccggcccaagtgacccggctgcgcgcccc

SEQ ID NO: 12735 - DNA, 377 bp, Zea Mays
gcctggcctggctgggccgttctccttcccctcccatgctcttcgatgtggcaacaactaaagcggcgcgagcaggaccggccggccggacggacggacgggcatgtgatgttgtgatggcagtagtacaaagggaaaaaaaagaagacggcgagaggagaggagtggcgctgcatcggcgcgcgtcccgttcgcatgatgagcaatgatcggcggccatggaatggatggaagctgctgctgcgtcgtctgtttcctccgtgtccgggccgccagattcccttcgcctccctgctcagcggtccctgcatgcaatgcaatgagcagcgcttttgttgttcccgacagcggtgcgtaggtgagtgagtgaatggaaa

SEQ ID NO: 12736 - DNA, 211 bp, Zea Mays
aaaaaacattgtaggtcacagattacattggttaggatgatgatgtgcagtcgtcaaaaagatgcagcgtacaaaagaatcaaacaagcctgagctatgtgtacaagaaaatgttgtcaggtgtacatacagaacaatacagcagtaccaacactgctatggccagaattcaaatgaaacatgatgaaccatgagcatgccgttacaaaaa

SEQ ID NO: 12737 - DNA, 353 bp, Zea Mays
attttttttacaaagttctagccacgacaccggcgttatcctaggctcggcgaacccgatcccgagacatcccgcggtagagttcaaacaacttgtccgatgaataacatggctcataaaggaacaacgaacaagcacaaactatgctgtaatcaccttgagcagttctgaccgaaagggaggggggatgtgagcaggcgtggcgaccacaatcgtaacaacgacagtcagcggacaaggaggcaagcgatagggtgcgctggtagtgtaaagctccgatttgtggtgggcgagcaggtagactcgaacacgagggcacaagaagccttttcactgggcgtaggggaatacag

SEQ ID NO: 12738 - DNA, 278 bp, Zea Mays
cacttttcaaaaatttttttggaaaacaaagcactaattgtcaatccaagtcatgactcatccatattcatggacatggactattctaataggtttttaaactctacgcagaggtatacactttacctactagtcatgtttctactagtcatgtttctgtaatccaccgtcatgagatatgaatgccgaaactctctcttcccttgcacgactttacctagatggttataccgaaaggaacaaggttacctccatacccaaaccaggacaaaccattc

SEQ ID NO: 12739 - DNA, 658 bp, Zea Mays
ctcgtccattgagacgccacaacgtggaggtagacaagtgttgtacttgtcgaaccacgggataactcgcgtgtctcctgtgattgctttttgtgtgattgttgtgattcacaagagctcgctttatagccacttggtattatctctctaacacttaaccaagttttgtggctataagtttcaagtttttacaggatcacctattcaccccctctaggtgctttcaattggtatcggagtcgttctctccacgaaagggactaatcgcccgaagagatggatcctaagggaaaggggatggtggtcaacgataaggagaaggaatctgtcttcaacgagccaagagacgacaagcctactgactctggctcaagtcacaagaaggacgggaagaagaagaggcgcatcaagaagatagtctactacgacagcgacgagccttcctcttcacaaagagacgatgacgacgagaaaaagaaaacggttaactcaaactttccttttgattattctcatattccatctaactccaatgcacatttactttcaaatccacttgggaaaccttcgcactttgatggagaagactactcattttggagtcacaaaatgcgtagtcacctattctctctccatccaagtatttgggagatcgttg

SEQ ID NO: 12740 - DNA, 453 bp, Zea Mays
cacagattacctgatccaggtgaaacaggaaaaactctttacaacaaagtttaacctatttttactagctaacattgccatatgggtctaccttacatctacctttcaaaactaatttacatagttatattgcctaacaaggactaagttgattactacatcttctccagttatcatatctgccagatgtatgttgccatgctccataagtactttttattccactagtgttgaggcataataaaaggcaacattaagcatatgcaccgtttgttgcagatggttgatcggtcgttgtgctgtttgaaattccattaggtaggtattatgcaactcttcaagcacatgatcctgatgacttaggaagcccatggttttcctaagttcttccctaacagtaacaacatacgagtgggtttcttcttgttgttgactcaaaacttttgattttga

SEQ ID NO: 12741 - DNA, 467 bp, Zea Mays
atactatgcgcccggctctgcactcagaaacgggtgtgacactaagtgagatagatataagtaaacatataatttatggtggcatctcatggtggagtttttgtattgcacattaaactaaagtttgaaattcaaacacaaatttaaaatttggaaactgaactaggaaaaaataggaaaaaaacaaaaggaatacaacagccacttgggtctgtttctctaccttagcgcacttcagttgcatggcccagtcccttttcacccatcatcgcgacaccagcacacggggcccactggccggcctcaccctcactcactcctcacatcaccgcctctgtcatatgggaccgcctgggcaggcgcttcttccagccgactttgttgcaaccaaaaaaaaaaaaaaagctcctccggggatccgagattcttgccaaccgaacaaccctgactccagagtattaaacctg

SEQ ID NO: 12742 - DNA, 82 bp, Zea Mays
gaggagaccgcgtgcgcgcagcaaagaagttcggctggggaggcgtagcagccatggagctcggggccgggcacgcagggag

SEQ ID NO: 12743 - DNA, 131 bp, Zea Mays
acagtgtccatggacgcgagcagggatctggtgaagtggaagacgagaagaggcgcggtccgagcgcatgggagctccaggacgcgcggcacagagaccagagagagaaagaggggcgcgacttgggaaag

SEQ ID NO: 12744 - DNA, 447 bp, Zea Mays
gaagaagatagggcgacaggaacactgacgaatgggaagcaggggaattgcgcggagaagataagtcctgggcggctgaaaaatctaaaggggagaagagcggcgagggaaaaaatctgaagagaggcgactgaaaaaaatctacgggagagagatctgtgaggatattttccatttttttttaattttctttttttttttaccgaaaatcacagatatttttgttatgttagtagatgagtctaaaagatatagtcagggatcgaaaaaaatgagacagacaacaataattggacagagttttgatttgctgaatactttggagttaaatgaatttttacccattatttatatccgaagttttgaatccgggcgagaaacgacaacccgaattgaactgatttcaacttcgatattgtagtcagctttggtttatttagaagtcag

SEQ ID NO: 12745 - DNA, 125 bp, Zea Mays
tggcacttgttcagcttgcccatcttcagattcgtccatcagcttcattatgcggagtagtccacccattacgtcatcttggggtcgactcggctcttgttctccgcatcacgtggttaatcaac

SEQ ID NO: 12746 - DNA, 282 bp, Zea Mays
cgtcgaatcgcgtttcatcttcatccatatcgagaattctccggccgcgtactgatttattttcttctgtgcctaatcttctcggatcttggcgtagacgaggatgacgatcgaagacttgttcgagctttttgtcgagcatttggtgaatatcatgctgctagcttcgtcttcgcccgatccataggatttcttaatgacgtacggaacgacgacaagatcgagtttggagcgagctggtgaggtggggtcgagcaggttagcgcgagctctagcaacgac

SEQ ID NO: 12747 - DNA, 76 bp, Zea Mays
gcgcatggtgccatgcgggggcaggcgtcgctgcagtcatcacctcgccagtcggggtcaagcacagatatgcagc

SEQ ID NO: 12748 - DNA, 221 bp, Zea Mays
ctccatgttccaattaacataatgatcttatcatgaacagtaaaaaacaactaataataaaagcatgatcatgaataatgtgtatctcaatatacaaaaccacataaagcaatagcaggtattacccaaacgtgcaatggtaaacaaggtataaagatagtcaaactaggtaacctattgggtcccatcaaaattaacctatgcagatcataatgattaat

SEQ ID NO: 12749 - DNA, 478 bp, Zea Mays
gattattgttacagaagcaagctgcaagcaatatatgagtagtccgtcagtcagtccacagtgaagcctagttagtcagtacgccgtgaagcctctgcaacaattggtagcggctcccagtgcgcagacgggcaaacaacacgggcagcagggacgccggacgcagggcgtgctgtggactttggtgctgggcgggctgggcactgccgcactcgcctggtcgcctggatctcgctcctcgctggcggagtggcggtggcgggtggcggccaggtggctggggcagccgggcagggacgcaggcacgcagccagccagccacgcagtgcggcaccgtggcaggacggcagggcggcaggacggcagggtcgacgccgacgaggagcaggacaggagcggtttctcagcttctgctttctggcggagtggcggctggtggttgagtttgtgcgtgactggctgactgcgctgcgtgagg

SEQ ID NO: 12750 - DNA, 342 bp, Zea Mays
cggcgtcgggtcagggaagagagcaggggaggcgagagaaacgagagaggagagggagagagaagcagaggcggcggctggcttggaaggcagggggagcggctgcttagggttagggggcgcgcggctgttgggcctaatgggccacacggccggtaggattaggttttttttttcttttttttatttcccttttccaaattcgaaatacattttgaaataaccctaaaaatcataataatcaaactaaaattatttataaataagatattaattcttggactaatattattatatatattatttactaggatttttatttaaaacgaaatgctattaaat

SEQ ID NO: 12751 - DNA, 669 bp, Zea Mays
caccaaagctaaaatttaaaaataatacctatacgtcttgcacgctcggcagcttcttcggctcgtttagcttcttctcgagcatcgtgggtttccttttcatttttctttatgcttttgttggccaattctcggccaccgttcacccaaacatcggagtaaaactttccgcccactaaagtagcttcggccgaggggtctttcgtatagtctatagagaaggcgacttcagtctgggctgcagctttaacatggtcacaaccagccttctccagaattgctgcaacccctcaagcgccggcgaaggcacaaatgtccccacgatcactgaggatctctttaaaagcttcggtttctccgcttatccaatcaataacacccttggggtcacctcgaatgaaaatctcttcgaaagaataagcacccaccttggcaaagctggttttcaattttcttacgcaatccaaggttttctcaaagcaactatccttggatttgcgaagtgttgggggccttcgtcttctgaaggtcctaaaaaacacgactaacatgtttcccaggtataatatgtgtacaggaaccttcaggtatgaaatgaagctatacaaaatataagagcgcgattcgagagaaggctgaatcaatgctgaagctacctgtgaagaagct

SEQ ID NO: 12752 - DNA, 768 bp, Zea Mays
tactgttcacgctgactggtattcactcgcgcgtcatacttgaacttttgccttctgtcaagccgaaggtacaaatgtaattcaatattgtttatgctcattcatgatgatataataaagacatatcaatgatgtcatatgattatttatgttatttctcatgttacatatacttctactttcattaatataaactgtgatgatgaaggtacgtccttcataacctttgtctgaatatcattatatcctaagagagataatgcttcgaaggacgaaggactttaaccactaacgttttgtgttgccttgttcttaactcatagcatttaagaacaagtccccaacattggcgcccacctccggtgaactcatctgaccagctttggcaagccgtgaccttcgtcatgctaccgaagaaagcttcgtcagcactaggggctgcactacagccactagacgtcaaccaggacgcactgcgcgaagccagaactcataaaaggaaggctactagtttgacacctcaggaagaagagttggaccgagagatcagggacctcaaagccattcatcaacaggtccagagaaaaaaggagaagatgcttcatctcgctgatcttcagaagaagatcgatgaggccgctgaagaaatgtgtcatctcactcaagatgaccaggaccaaaggcctcagcacagggagcttcatcaagacaactcatttaacgaagatgaatggtacgatgactttcatcattgtaactttacttttg

SEQ ID NO: 12753 - DNA, 50 bp, Zea Mays
cagggatggaggccatgtcacaccatgaaccaaatcaaggaggtacctgc

SEQ ID NO: 12754 - DNA, 703 bp, Zea Mays
gtggtcttcctgggagatcccagtcatactcgttgttttgcggtgatgggatcgagctttgggcagggggttcaggtttggatcgaacggtagcgttctagattaggaacacggataccccttcgccccataaaatccgggtcgtgcgaaagaatctaggtgggtcggattaggtgtgtggcgtggtgaatcctcgatcgtctgtcgcaaatccaacgggcatggttgcgtattgagtcagagttatgtggatctaattatggtcatccgaatctaatccaatggctagaaagccctcatactcctttggccagggaattatgcaaaagagatctcgtagatttattaaatcaacccacagttcactcgtagtcaaaagaaattaccactgagcctcgatgtttacaaatagaaccccgtactttctggtaatgatgtgtgcaatccactgatctcataaaattgaacaaatagtatagtaaacgaatttttgtataaaaataatttcagaaacttgtataattcataaataattcatcttaactcctttttgatccatttcagttgcattaatctcatactaatattgtctatcatctagtaaccttgttttaccatgaaacctatgataaaaatcttgtatcttctctgctttatagcagacacctaaacctttggaaaatcataactttataactgtaac

SEQ ID NO: 12755 - DNA, 572 bp, Zea Mays
gggacacccttggctgactaattaggaaagctagtggaggactacattacccgaaaggggcaagggcagtaggggagtggtcgatatagggaggttctcgggctgtttttgctgcgatggcggtcagacgggggattcctatgctacgctacctagaaactgtagcgggttttctgaagctagtggaactttgtaaaggcctcgtagtggtacccttccttgcttccttggtagaggtgtatgggttctgattaactccgtggcaaatgggtaacacgacttgtgggtaaagatgcacaacctctatagagtgtaaaacgggtatatcagtcgtgctcacgttcatgagcggctcagacactcacatgattaacttatggaattaaactcaatttgtcatttgcattgcattgtgggtgttgttattaatcttgatctcttatttaattgggttggtatctacttatacctagtaactgctaataaattgatcaactttaaaagcaattctcagctttaaccatcttctttggtaagctttgcacttcacatgagctcccacctttagcgag

SEQ ID NO: 12756 - DNA, 296 bp, Zea Mays
ccgagaccaaaggattgagcccaggcatggttttttctttttatttccttttttctttttcttttttgttttcttttctttttagttttagatttcaaatttgaatgaagatttgattgtgaatatcacacctagattaagtgcacaaacaaagataccagcatgaagaagcattttcattatatatatattgttttatttattaagcggtttattcctatttaacttgtgtttgtatactcatgcatgtataaaataaaaaaaatattccctaaacaccaaatattccaactcct

SEQ ID NO: 12757 - DNA, 777 bp, Zea Mays
cattttttctcgaaaccgcaggggaattgcgccttaaatatattaagaagaagagaaaaaggtctatagaagaccagaggttacaacattgaactccttacggaggccagtaacgcacataagtgaaagagtccaaggaaaccggactcaaaaaactactaaagaagaaacagggggggggttcagtcatcaggcaaagaagctgccaagaaggagatacccttggctccagctaattctcaaagtcttctctcatcgtcagcctgctgaaggatagaggggagactgggagtctggccatcaaacacacatctattgcggtgattccagatcatccaggcccccaaagagatcagagaactcagacctttcttgaccattccttgaactgtttcagaagctgtctcccaccggtccaggaaggatgtcaggcccggctggggagccaagttatccaacccaaactttctgagcaggttataccagaaaatccttgcaaacacacatgagaccagcaggtgattaatagattcaggttcttggtcacataatggacaactgctaggatgattgagccccctctttgccaatctgtcagcaatccagcacctgttatgggctaccagccagaggaagaaacgacatttttgatggagcccaagtttttccatacccctcttatagtggccaaatgtgcatgatcccaggaagagaccctttgttaagctgctttcgccaaatactttctatctgggggctacactaaagatatgtctg

SEQ ID NO: 12758 - DNA, 1738 bp, Zea Mays
gaccagaagagggtactatactcatttcccacctccgagacaaggaccttactgaagaacactctggctttacttggaacctgaataggaagccctgtccaaggtcttctagagtcggatttttgaagccacagccatcgcatccggagggcccatccaagctctgggaggctagaaattcccagacctccaagctaaagtggacgacacaccttgccccaagccaccaaacaatgccccctttagcttcctttcttcctctccaaagaaagccctttcttattttatcaatagcatcaacggcccaatggggtatatcaattgccattgcaagatacacagtcatacctgtaagaacatgttgcactaggattctcctgcctgctctggtcatcaaatcagctttccaattaggaagttggtcagcaaatctatcaacatacggctggaaatgatgcttggacaacttgtgcaaggatagaggaagccaagtatttgcaaggaaaagctgtgatttcacatggtagcagactttggacttccaatagagtttcctctgagcactgtatggggtagacattagatttttgcacaatattctttagaccagaagcactgccaaagagctgcaagatatccaaagtaatggagatttcatcaaccgtatggtgtaagaagagggctacatcatctgcataaatggagactctatgtaactgtcttcttgctgctagctgttgtagtaaacctgcctcctctgcctttagaaagatgtatccaaggacatccatgaccaatatgaataacatcgaggaaaggggatccacctgtctaagccctcttctatgctgaatttgttgtccaggaaacccattgagcatgacttgtgtggtggaggaagcaaggagaccacaaaccatgtccctccagatctgtccaaacccaagctgctgcatgacttcaattaaaaagggccaggagactgagtcaaaggccttggtgatatcaagtttgaggagcagccgggacaatctttgttgatgaaacagtcttgatgtatgttgtactagcatgaagttgtcttcgatgaatcgccccttaatgaatgcactttgatttagggaaaccaattcattcagccttggtgccagtcggttcgcgaggatttttgtaatcagttttgcaatgctgtggacgaggctaattggcctgaagtccttaacttgctcagccccatcttttttgggcaccatagtaatgtaggcagtgttaagcttccagaaatagatggccttgtaatagttggtggctgcatcaattgaagatttcaataatccgatgaaggccaagtttaaaatgagtgatctcgggctgccaagtttctgtttgggcattgaggtacatcaagccaaaattaaaataactctcagtaaatctgcttatgccaagagcattatggagaaagcaaggcttaatggttgtaacccttttgttattccaatggagcctagaattaaattgagcaaggagagtgttgcaccaccggttgatggaacaaggtataggagtttagttgggagccttagatacctagtaaaataccaggccagatcttgccttctcagtggggtatgtaagcagattcatggagggacctacagaggagcaccttgcgacttgtaacaccccgtccactcccgaaccggcggtacttactcctggcaaccctctagaatca

SEQ ID NO: 12759 - DNA, 2535 bp, Zea Mays
taagtaccgccggttcgggagtggatggggtgttacaaatggtataagagccgaccctcgcggtttcacgggcgcgtgtgggctagggattcgggcatatggcgcatgtgagcccagagtagtcttccaaaaaagacttcctggtcggacacatagacgtggccaaaaggggaggtttctggcttggggttgactgacgaggacatcggacttctaaggggggtggattgtgatatcctggccccggtggatggtgatatcctgtcccaaggcttaatagaattaatagagtactcataccaacaaggtgcatcttcttttttggaagtctgactcgaaagaacctctaggttaggcgtgcttggtccagagcaatattgagatgagtgaccgaccaggaagtcttctcgggtgcgcatgaatgaggacaaagtgcacacaaaagacttgtgttggtctgtagggatggtctatggtcctaaggggccgccagaagtaagtaccaccggtacaggagtggacggggtattacacgactataaagctcattatgaactatgtggctgggacagtggattatgggtgtgggtacgcaacgagaaaaattggaagttgttgggctatatggatactgacctagctggtgacgttgatacaagaaaaagcacctcaggcattattgtgtttttccttggcaacaatttgataagctggttgtcccagaagcaaaaggttgtagctttatcaacctgtgaagtggcatacattgaagctgcctctgatgcatgtcatggcatatggcttgcatgactgctaggtgatttgaggaataaaaaagttgaacctgttgatcctaaggtggataacaaatcagctttggtgccgatcaagaatccagcttctcatgacaggagcaagcatattcagacaaggtttcacttcagtcagttgatgagggggatatctgtccagattatattggcagtgaagggcaacttccaaacatcctgattaaggcgcttccaagggcatgtcatgtacgggcgctcgtacgccaggcagcgtcgcgcccgtgacaggcgccgcgcacaggagcgtgcagatcgccaggagcgcgatctgggggggcagatctgggagatcagcaggaacctatggaaagtagtggccaggaaggaaaatagaagaatggaaagttgagggaaggaaaggagagattgattagtgattgattggtgattgattactgattgattagtgttaccatgtttaggcttgcctaaaataaaggctccaggacagcaggccaatggctatatatgcggcacagggagacaggaataaagggcagcaaacaagttatctcctctccacctctctctctaccatctaagcctacggctgtgggggataaccatgccggagaagacgacgaaccgcggctacgaccttcgtagccgagggccccctgctctaaacgctcaggcccttgacaacctggtatcacgagtcaggcgatcttcgtcctctcgatcccacacctccgatcagtccctcgacgtcacccaaccaccacccagccctccaccctcaccgtcgtcggcctcctccattatgagcaccaaaaccaacgacgatctggctgcgatgatcgagaagctcacgagcatggtcgctgccctccaaaatgacgtcgagtcgttgaagaaggacaaggggccttcctcctcgccatccggcagcggcggccacgacggccagcaccacatcgatcggccaccaaggttccaaaagatcgacttcccgcgttttgacggcaagtcggaccccatgctcttcgtcaaccgttgcgagtcctactttcatcagcagtgaatcatggaggaggagaaggtttggatggcttcttaccacctcgagggcgtggcccagtcgtggtacctccagctacagacggatgaggggactccacgctggcatcgcttcaaagacatcctccagctgcgcttcgggcctcccctacgctcggcgccactgtttgaactcgctgagtgtaggcggacgggcaccgtggaggagtaccagaaccgcttccaggagctactaccgcgcgccggaccactggaggaacgccaacgcgtgcaactcttcacgggcgggctgctgccaccgctcagccatgcggtgcgcatccacaacccccattcgctcgcggcggctatgagcctcacgcgacaggtggagctgatggaactcgacagggccccagcgccagcacatatccggcctgccgcgcgcggcgtcctacctcctccgccgccgaaaccggtgcctatggcgtttccggcgccccacgttcctttggcgctcccggcaccaccggcgggcgcagcttcgggtcgtggcgagggcagaaggctcagcactgaggagatggccgaacgtcgtcgcctcggattatgtttcaattgcaatgacaagtattccaggggtcacaacaggttctgcaagcgcattttcttcgtcgaaggcgtc

SEQ ID NO: 12760 - DNA, 997 bp, Zea Mays
aacgccagtgcgccgccatgatcgagcaggggatcgtccgtcacagcgattcgtcgttcttgtcgtcggtcctcctcgtgaagaagcccgacgggtcatggcggttctgcgtcgactaccgcgcgctaaacgcggtcaccatcaaggacgccttcccgatcccggtggtcgacgagctgctgaacgagcttcatggtgcccagttcttctccaagctggacctgcgttccgggtaccaccaggtgcgcatgaggccagagaacgtgcacaaaacggcgtttcgtacacacgacgacatgtacgagttcctggtgatggcgttcgggctttgcaacgcaccggcaacgttccaggcgctcatgaacgatgttctccgtcccttcctgtgctggtttgtccttgttttctttgatgacatcttgatatatagcaagaattgggaggagcacctgcaccacctcaggatggtcctcgaggaactgcaacgccaccaactctttgtcgagcgctccaaatgcgccttcggagccccgtccatcgcctacctcggtcatgtcatctcggcggcgggcgtggccatggacccggcaaaggtgcaggccatcttcgactggccggtgccgcgctcggctcaggcggtgcgcgggtttcttggcctggcgggctactaccgcaagtttgtgcccaactacggcacggtcgccgcaccgctcacgaccctcctcaagaaagacggcttcgcctgggatgacaaggcagcggcggcttttggcgccctcaaggccaccgtcacctcggcaccagtcctcaccttgccggacttcacaaagacctttgtggttgagtgtgacgcgtcgtcacacgggtttggcgccgtgctcacccaagagggacacccggtggcattcttcagccgtcccatcgctcctcgtcaccaggcgttggcagcctacgagcgcgagctcatcggcctagtccaggcggtccggcactggcg

SEQ ID NO: 12761 - DNA, 1990 bp, Zea Mays
gaaagcgggctgctagcaatctccgcgcccccacttcgacttcatcacgcgccttcgtcaggcccaggccatggacccggctctagcggccatccatgaaggagtcggcgtcggcacccgcgatgcaccgtgggcggtggctgacggcatggtcacctacgaggggcgcctgtacattccaccggcgtggcccttgctgcaggagatcgtggccgccgtgcatgacgatgggcatgagggcgtccaccgcacccttcaccgcctgcgccgggacttccacttccccaacatgagacgcctggtgcaggacttcgtacgggcgtgtacgacgtgccagcggttcaagtcggaacatctacatccagctggcttgctgcagccgctaccggtgccctcggcggtctaggcggacattgcgatggacttcgtagaagcgctaccccgggtgcacggaaaaacggtcatcctctccgtcgtcgaccgcttcagcaaatactgccacttcatctccctagcgcacccgtacacggcggagtctgtggcacatgctttcttcaccgacatcgtccgcctcctcgggtttctgcagtccatcgtctccgaccgcggccccgctgttcacctcgtcattctgtagcgagctgatgcgcctcatgggcaccaagctcctcatgtcatcggcgttccacccgcagacgaatggcccagacggaggcggccaaccgtgtcatcgtcatgtacctacgctgcctcacgggggatcgtcctcgccagtggcttcgctggcttccctaggcggagtacgtctacaacacggcctaccagtcatcccttcgcgacaccccattccgggtggtctacggccgtgatccgccctccatccgctcctacaagcccggcgacacaagggtggcgacggtggcacaagaaatggaagcacgggaagcttttctggctgacgtccgcttccgtctcgagcaggctcagacggtccaaaagctgcagtacgataagcaccaccgggaggtcacatatgaggttggggactgggcattccttcgccttcgccaacgtgtggcggcgtccctaccacgaaccatcaccgggaagctcaagcctcgctacgtgggaccctaccgcgtcaccgagctcatcaatgacgtggctgttcggctagaattgccgcccggcgcgcgcctgcacgacgtgtttcatgtcgacgtgctccggaagtacgtgggctcaccacccaccacaccgccgcctctaccgcctctgctcaatggtgcggtagtgcctgagcctgcaagaatagcgggggctcgcttgtcgcgtggcgtgcggcaagtcctcgttcactggagcggcgaaccagcttcatcagccacctgggaggagttcgacgacttccgcgcccgattcccagccttccagctcaaggacgagctggtcttcgacgaggggagagatgtcatgtacgggcgctcgtacgccaggcagcgtcgtgcccgtgacaggcgccgcgcacaggagcgcgcagatcgccaggagcgcgatctgggggggcgcgtagatctgggagatcagcaggaacctatggaaagtagtggtcaggaaggaaaatagaagaatggaaagttgagggaaggaaaggagagattgattagtgattgattggtgattgattagtgattgattggtgattgattactgattgattagtgttaccatgtttaggctttcctaaaataaaggctccaggacagcaggccgatggctatatatgcggcacagggagacaggaataaagggcagcaaacaagttatctcctctccacctctctctctaccatctaagcctacggctgtgggggataaccacgccggagaagacgacaaaccgcggctacgaccttcgtagccgagggccccctgctctaaacgcccaggcccttgacagggcaagatttcaggtgctgcaagatcgaat

SEQ ID NO: 12762 - DNA, 511 bp, Zea Mays
cccgtggctcctgcccagctgctaagccgcaaccgcctctcgcctcggacctcggtcgacgcctcgacggacgacggtccctctcggttctcgcgggtcacggctgtctcctggctggctggcttgcaagcaggaagcagctttgtctccacgcgggccgcggctagctcctcctcggtcttggcttgcaagcaggtgcaggtgaggtgactagcttttgaagtcgtgcggttgcagcagtctttgaggttgcagttggccagttgcagcaggtcgtgcggtgaggcacatagaattgttaaagggcagcgacaactcagtatatgttttacttttggataaactggataaactaaatgtctgttgtccctggcagctatttgtacatatttcatttttgttgtttgcatatgatctgtgccatagcgtcaaactatcagtatacttgtatgtgacatgagtgtagatataatttctcactcaaataatatcattatgtgtttatgttgat

SEQ ID NO: 12763 - DNA, 1069 bp, Zea Mays
ggcagcctggcgcaccggacactgtccggtgcaccaccggacagtccggtgccccagaccgaaacaacctgttggctgtacacagccaacattctccttttcttcttctctctgtttctgacacttagacagatatattagtacacaaaaccaatgtactaaggcttagaaacatacctttacttgtgatttgcactttgttcatccatgggcatggattcacatttaagcacttgtgtttgcactcaatcaccaaaatacttagaaatggcccaaaggcacatttccctttcaatctccccctttttggtgatttatgccaacacaacataaagcaactagaacaagtgcaaaattacttcaaatagaactcaaatctattttgattcatttttggcatatatggatcatcatttgccaccacttggtttgtttttgcaaatcaaactcaaatctctatctctaagtcaaacacacatgttgaaacatgaagagagtcattccaaaagagattgatcaaggatttcaaaaactcccccttatttcccataatcaacacttctccccacaagaagccaacttttgactaaagagacaatgccttatttcccataattaacacttctccccacaagaagccaacttttgactaaagagacaatgcaagagttttgaacaaaccaaaagctctattctactttttttaaaatctctcaagtggtagctgatccatttattgctttggcctttattttctccccctttggcatcaagcaccaaaacggaatcaactttggcccctttaaccccattgcctcaccaaaatcttcaattaagagcaaatggcaataagagttcatgagatgaacttggaattagttaccctctcatcggagtgcagtggaagtctttcatggtccaagtccacctttttcctttcaattctccttcgagactagatcaagcaaactcaagcatatggttagtctcaaagggtcaggttgtaacacatctccccctaaacatgtgcatcactttgcaacggacttgtgaggtccagggagtgttt

SEQ ID NO: 12764 - DNA, 590 bp, Zea Mays
cttgcttttctaaaagtatattcttttcattcaaggcatcaattaattcattaattttgtctatcttagatctatctaagcccttgaacaaacatgaataatcttctcattatttagcccggccgcctcaacttgcgccaccttgcttggtagcgcttccttgctccttgttgccttgagagcaatgggttgaggctcatggatgggaccgttcaacgcgtcgtccacgtatcttgcctccttgatcatcattcgcccgcttacgaacttcccaagaatttcttcgggcgacattttggtgtacctgggattctcacgaatattattcaccaaatgaggatcaagaacggtaaaggaccttagcattagtcggacgacgtcgtggtccgtccatcgcgtgcttccgtagctccttattttgttgataagggtcttgagccggttgtatgtttgagttggctcctcgccccttatcatcgcgaaccgtccaagctcgcctgtaacaccccgggatccacaaacaccccagaatgctactaaactacacatctaatattcatatataaaatttcgacaacatctcctttgaa

SEQ ID NO: 12765 - DNA, 135 bp, Zea Mays
ggaataattagtataaaaggtataaccataaatatattgcatatcatgctgattatttgtttgttgcatttatatttgatgtgctaaactcaaacatgaaatcaaatttgagttcaaagtgaaaatgaaattagg

SEQ ID NO: 12766 - DNA, 448 bp, Zea Mays
agtggttgccatttattttcctttggaatgatttttttattgcccataatcgatttttgaatgtttaatagcatttcttcttaattgaaaatccaaataagtaatttaataaatattagtccaagaattaatattttattttggtttgactattatgatttttagggttatttaaaaataagtttttgaaattaggaagaaaaaaaaagaaaaaaaaaacgaaaccctaattcatttggcccactaggggcccaactagaaggagccgactgcccctgctccctgtaggctgtagccgccgccgccgccgccaccctggctctccacctccctcccttttctctcacttccaagcgggccccactctgcatgccacccggcctctctctcctcccttctctccttcctgctcacagccgccatggaggatgccgaccacgccagcagc

SEQ ID NO: 12767 - DNA, 325 bp, Zea Mays
agtggttgccatttattttcctttggaatgatttttttattgcccataatcgatttttgaatgtttaatagcatttcttcttaattgaaaatccaaataagtaatttaataaatattagtccaagaattaatattttattttggtttgactattatgatttttagggttatttaaaaataagtttttgaaattaggaagaaaaaaaaagaaaaaaaaacgaaaccctaattcatttggcccactaggggcccaactagaaggagccgactgcccctgctccctgtaggctgtagccgccgccgccaccctggctctccacctccc

SEQ ID NO: 12768 - DNA, 101 bp, Zea Mays
tcgaatctaccattcataaaacatgtaggtttgattcaagataatagtggaaaatgataagacgatgtgtatggtaataggtagtggtcggaagttgtccc

SEQ ID NO: 12769 - DNA, 601 bp, Zea Mays
aggatgctttggtgctaggacaatgccgggaggtattggcgtgcctcaatccgaaggcgtggctgactggcgcggcagccatgttcttggattgagccgcgtcaatatctccccttgcttgtctcgcatctactagctagtgccttgcctctctgatcgatgcccctagctcatggagaagttgattcgcataatcacaagctaagcaagagttgtctgttactgtctccatttcgttttagttgtcgctagatagtgcaaaattgaactatccagcgaaacggagggatcggagtacctgccgaagagtaagatatcttctccacacaatgcaagaacatgcacaatcgtctttcgcaagcaagaatcgtctgttgcctggagcaggatcaagatatcttcttcacacaatgcaagaacatgcacaatcgcaagcaagaatgtatgttttgccagctgcagcaggatctatatggaaagttcaagatatcttcacacacaatgcaagaacatatgggcaaaactcacttctggagccaatggattaggtatgtgcttacttgatgcctcgcctcctcattaagaatttcttcaatccaag

SEQ ID NO: 12770 - DNA, 1189 bp, Zea Mays
ataaaccaaaggtataaatatcgacatcagttcgaaattattcaacatgaaaaatattgtattcatctgttaccttcaagaagtaggtagcatgatctaaaggctaattgtacagttatgcatatattgcaaccagttacaaaatgatggcttatatggcatcatgccatatttaagtgggtcattatccaaaataaacataagttgcagtgcatcagttgacttcaccttttagtagcgcgactgaaagttatgtatatgcaattacaaaatggtaagattaattgcaaaagatgtgacgctgaagatgcttgttctgttatgccccgctcttttgctcatctcttttacattgctggtaaaaataatattttgatcttggttccttttgtttgaacctacattatgccctaccagattcagaataaaagctgatgggcatcaatacggtccatatgttgaagctttggcaagcgatttttatagactatcattttagaaaataattaaagatttttttatttttaagtggatctagtcgcacacatgcccatatggaagggcttggcaatgttcaatgcctatattggtctctgaaaatgtgtgtgtatgctattcgttggaaaacactgctatatatatgtctctattcattggaaatcggatcgattagggatgtcgaaatctagatgtaatgtttgaaaattctatcgtgtcttaccgtgacgccaggtagctgtcaggaactcaggatgccactgccaggcaccagccccctctcgaaggctctaataaactgcatcagaagtgaagcgaccccgtggtcgtggtcgcggtcctgctctcagatctcgtggcagaagtctttgatgtagtcagcaagcgagagccacatgtcactacggattcccagaccagagcaaaggaatccaacatgcggcagcgaccggtgctctttggcaaatccttcaccgtcaaacaatccttcgtgtccggtggatgagggagccacactcacctactgcctcgcccgcgaggtacgacttcgccgtcggctacctacgaggctgcgacgattgagcgtgcgtgggcgtgggctgttagtgtggaatcggcagtggtaaggatgtgcgcagtgcgtgggggaggcgctcgagaccagaagcgtcaaactttcaccgaactcaac

SEQ ID NO: 12771 - DNA, 815 bp, Zea Mays
ggttacatgagctctctctagctcaacaccttagacttaacttgcttagaatctttgtaaagtgcttatgataaataataatgtgtagagctagaaacgagtctggctcggatcagtgcggctcgatggtataacgagccggctcaaccacattacggaacggaggctcgcgagcctttacactcaaccacagtcacgaaccaaatggcgccacactgcataacaaaatcagagggaaacaagcatagttgataatctatagttgatacaaccacgccatataggaccactgtatgtatcatgtacgcaagatgcaatcgttcaaccagtgtcattgattcaaaagaacaacgaagtacgcaaaaatgcaaaatagtgtcattgatccataagaccacgcacagaatagctcccgtattttgtatgcactgcacctaggcaccaaggatccatcgtccagtaatccaacaccacatgagggcaaggctgcacctgcaccctgcagcgtctggggtggcctcgtgccctcctgggcagtggcagagcgatcgacagaagcagaagacgggtcgggggcgcggtgcgatgggcgaccgccgacagcaggtttagggctgggacgagggaggaccgtagcgggctggcggcggcggagtcggacttcggagtcggatgtcggtgctcggcggcagcaggaagcaagaacgagagagagacgccggtcactcagtggcactgaagaaaggcggcggtgggcgtgccaccgcactgctctgtacctggcgttaggcacttaggccattagggtttagcgg

SEQ ID NO: 12772 - DNA, 731 bp, Zea Mays
tagaccgcagatcgggcggatggttatggtggccgcgcgtttagctcgtggtgcggttacggtgattcgctcggcagcttctaactaacctaagctaagaacgcggctaaccagggaagtctaccaacttgcgttatacatgcatgggaaagtggacgtgggtggctgagcggtcatggctcatggtgagtggcttttttattttttttttgtttttttaaatttctattccaaattcaaatgagtttaaattttaatattaaatgctcaagaacataaaactccggcatgcaagataaaattttatgttagttatttatttatcatcacatttatttatgccaatgcttttaaatgtacaattcatacacacaaaataatataatttaagaataatttcttaggtataacccctcaaatgtatactccggttaaaatacaatttatcattttttacttctcatttagatgaatgcttgtaggcatataaaagatatgtaactcaaataattaaataaattgagtttgagataagattttgctccaaagaaattcagtttaaaatttcacaagtcaaatctaaattagaggcataaacatctattatttcattggtttaaaaattacttcaaaggcaagaaaaattccttttctgtttcaaagttctcacttcaaattcaaactcccattttgaacttcaaattcccaagtgaatataacttctactgttt

SEQ ID NO: 12773 - DNA, 105 bp, Zea Mays
aagatttgcaccacgcgacggagatccgagcggcaacgaatggcaccttgggaggaggagatgggggggcgactagggtttgatgtgtggctgcaagtgattgag

SEQ ID NO: 12774 - DNA, 853 bp, Zea Mays
acacagcagcacaatccaccagcgcactactgccacactgcacgacgcataggataggaggagcctgtgactgtgagccaggaccacatgagagcttcttggagagccatggcggcggggcataccggccggaacagcaaacagcaggccgccgaccggttcagccggccgtgctttggctaacagtggatcgctccatcatcatacatgcgctagctgtcgctgttgccaactttttctgtactgccgtgccggggcctctgctactgctagtgctagcttatctccaacgaccagctagcagcaatgcaagcgcgacgtccccatccatccatcacccacatttcctctttttcctctgtgacttgcccgtgcgccttgtgttctatggtacagcggccgtacgcaaaaccagcgccatctagctaagctagctgctgcctgtaactactaatacatgcacgcactgatgagagactgcatgtgcatcatacagtgccgcgttttttaatttaatcgatcgctaatgaggtgtttgttttgaggaataagccagtcctttatcttctcactcttcactttttttatccttggttcaatttgtatatatgtttaacgtgcaaatcatatatataaaaccagtggattcgctagggaaaggagtctctaatcgtcgtcagatgtgtgaatagcaagctgaatgtatgtcgtcttgtcagctgtcaagttaaagtttttttttctaatattgattccgtgtggtgattgatatctgttagattcttctcctttctcgctcgctcctctctttatcctttccctctcagctatccgattttattttattttattt

SEQ ID NO: 12775 - DNA, 317 bp, Zea Mays
gggggcttagcgtgggaggcattgaggcaatggctgcccccgtcgacgccgatcgaatccgccggtgaatccaaagttctgtcaggaaagaaaacaaacgcatgtgagcgccaccctttcgtcgcctcctttctttttttccctatggcatactactatgtagtagtgggctggcggatgacatcgatatcagaatcagatcatctttaccaaccaacagctggttttacttttgatggattccttttccttcggttgattcatctcctctcctcggctaagcaatcgcttaaccacacaacaccttcacctctttt

SEQ ID NO: 12776 - DNA, 143 bp, Zea Mays
ctgggttcaagcttaccctgtcccatatccagggcatgtgaccagttaagatagtccttgatcatacaggcctacatacgcatccaatccttaattaacctgggcggagcatcacctgttcctagcccaagtcccgatttaag

SEQ ID NO: 12777 - DNA, 578 bp, Zea Mays
gcgcttcttcccatctcccccgctcttcttatcgcgcgcgtagtacgaacatgaggcggcggcgtcccccagccaaacagtcacgacagaatctgcagttcggatgaatactgccggtggccaccgtggcccagcgccatcactgccctccctggcgacaggaacatggtcgtcatctcttcgctttctatttgaattgtttctctaattctctctatctctctcgcttttgctttgctttgcttcttttcctaggactgatgatagttaaccgcttagagtgggagctattagggacaaaatcaaatagttttgtgaaagcgaataagcgatggtgcagctggggagagcaaggagcaagtgacacggccggacctatgaacagtgccaccatcttaggacctgcttggagggttttaggaaaaatatatggagctgttagagcactatttttttattggatttaatacttttaaggcgatcctaatgtctaatgtttcgggagatatattattggtacttgttggagttgctctcaccccggtgggaaagaaacttctttggctactgaattattt

SEQ ID NO: 12778 - DNA, 379 bp, Zea Mays
gttctattcttttgttagaatcgctaaaagtggatgtttacataccttaaaagatacaatatgacaatttgaataatatgacagaagattcaatcatatacttgagtaatacttattgcactatctagactctagagtcacataatttctcccatacacacaagtaacacacagatattgtgacaaaccacaggcaacaacctaaacatcactcttcactgaagaattgtagccatcttgatcatcatagtacttgaaccacatcatgatccctccatatttccctgagttattgatcaatggaagcacctaagacttgatgtcatcagcgagtataaaaccattcccagctgcctaaggcgaagatgggaggccaaga

SEQ ID NO: 12779 - DNA, 1310 bp, Zea Mays
atctcattcagtgattactgcctcatttctaaggtcctttttagacgcacatgtatccacgccaatatgtctgtgttgaaatggacacgcatatattgagtttagagcaactcgaaggaactctttatattctgactaatttataggaatagagatttcggtgaaaaagtattctccaacagcttctttaacttaatctccaaatataaatatcttctgttgcagccaaagatgaagagggaggatagctctctagaatgtattttgaattctttataccttatctaaacctgagttcaagctaagatcactaactcattgttatgctgaatatgtgcatactgtttgaatttataagataaaaattgattaggcgtacctctctttttataaaccatggtatgcaaatggcgcttcaacctgtgggattaaagaagaaaatactgcttaatggtcttttcttttctgtttataacatctagctttctgtttataactcgagttgaggaagtcatactataaaaatctgaggacatgcggaatagaaacacattagaataaagaagcgactaacgttaattcatgatacttcatctgaatctggttaaagctgtgaaggtagaagtgattgttcatagagtaaaaactagaaattaatgatctcacagaggtttgctgtattaattcataatcctgtcatattatcttggatgctgttaggtatctttgaataagatcctttgcagactgtactcatacttccatcataatgaaatatcacaacataggatttgttgttgtgcattggcttctactccgtaagatcttaatatcattttttggttgcatgccttttgtgttatatcatcatctttgtttggatgtgcatctatctcactagctacttaagggtgtgtttggtttggctttggcttttgctccctaaaagccaaaccaaaggttggattcagaaagcagctttttctaaaagccgactttctcgcagtgtaaaactgaaagcacatctggacctgcgttttgtgacttttagatggaactgtgaaaatatatatggaagaatttttagcggcttttagtggttttcaccaaacggtttttagatttttagcagtttatagttcacaataacttttttcacagctcacagcccacaacagctttttttacagccacgccccaacctaacaaaccctaatacctgtttggctgtcccaaattttctccatttagcctttgattatgggtttattatttttgttaacgatgaaccatgaatttcttgctataat

SEQ ID NO: 12780 - DNA, 277 bp, Zea Mays
atcaacttacatatcctcgcatatatatagctggactaatgtgcacactttgagaggaatagcaaaaagtgagaaatgaagttggaaataggctttggaaccttttgagctatcaagtttgccaagagctaagatttggagattagacttctaaaagagttaggtgttgtttgtgatattttacaataccaagttaaatagtttacaaaatatttttaatttaaataataaaaaatacatatggaattcgtactaaagacgtgtcccgaggcttcat

SEQ ID NO: 12781 - DNA, 215 bp, Zea Mays
ccctcccctctctcttccactcttgcagccgccccaatccctctccttcttccccaagtgattgcagcgccacccctcaaccctagcccccccccacctcttcctctccaaggtggagcctccccgcttggtgtccgtcgtgtgggtgcgagtcttccatgggagtttggagggaggaagaaggaagaaaagaaggaggaaaggaggaacccaag

SEQ ID NO: 12782 - DNA, 477 bp, Zea Mays
gctgcaccttcgtaataagaaggttgtggaatcaagtggtggtaaaaacaatgttcttaggtggttaaacagtttgatattattttacttgctgagatgtgtcatctcactcttgcattactcaatgcaggtacttgatacatgttgggaatgaggggagtagcagcacgtccactttcactctcacaataacgctgcccaggcgtagccatgatttaattagaaacttattgtcaaaggaagtttgtttttttaactagtcgtgcgcactagttaattcacttcatgtcgtatgtttaacttctctttgttagccgattaataatacttagtatgtttttgtcatgatatatgtttatacactgttgccccctcatttatgcaattttgcaagggggatgctgccgaaattttatatatagatgtcagaagtgttgtttagtagcattccggggtgttggtggaccccggggtgtt

SEQ ID NO: 12783 - DNA, 1082 bp, Zea Mays
ttagttgccacaaagcctagatgtggtttaaagtggttgcctgttagtcatactaattgtagaataaatctttgattctcttgatccattgattatgtattgatacattgaggatctgatggttcccttttcgatgcatgcttgtggagccaattttttagaccacctatctattggtttgaaggaagtccttgcctagcctagagttggttgggtgtggctagtcacctattcctagatcatgtggtgtttacatcagtttaatatgtttgtcaaatgtgtgaaggattaggggttattattattgactttgtatgtctggtactttgagtgcatcgtatgatagaatgaaatgtaagtttctgaactacagtagatgaagacttatattatgtgtaggttatcctaactagttggatatttttcttagttgagatgttgaatgaagtatagtgacatgggttaagcaagtattgtgttgttgttgggctatcagtgctctatgtagagtttttggcatttcttcgatgaactatgccgcacaagatgttattggcttcttttggctttattgctccattagttctatagattttctcccttttggtggggtgcaaggaatgttagattacatgattatcttttcatgatggcaagaataaggtttaggaagattaggagttttgttccaatagaactacttgtttcatagtgctttaaggtgaggtgtttgatcttcttatacattcgtcgggtgtagatgtttcaccatttaattaaaattaatggttgaagttggtaagggttgtgcttggtgcatattaccccttcataaaagagtgttgtcttaagacattgatgttgatgtatagctgcatccaaatttgatggtgtgaaattggagtgttgattgcaactatgacatgctttgagcttcattacatgttgtttcatgcttgatgtcaggtcgtgtagttttcttagacaattagtccaaggtagaagttcttgtgttaattaagaccaataatggacccatgttttgaattgtggtgctatatggggtaccttgggtgttttgc

SEQ ID NO: 12784 - DNA, 805 bp, Zea Mays
atttgaggtttgtgttgtatctgaagaaagtgaagtttattgataaatgtagcatgccatatacattgcatgactcatttgcatatgaagttttgtcgtgacctatggtccgaccgtaccggtacaacttagcatcgtacgttgcccgagaaggggtacgatgcggcttcatacccttagaggtatgaaggcagaggacatatgcattgcattcatatgcattcattgaagtgatatttgcagatgatgtggttttatacccccagaggtatgaagatagagtacctacacattgcattcctatgcatacattgaagtgatatttgcaggtattgttgacgcagggaagtgttatagaacctattgtggttgttcgaggaaatgagatggtattggttatagtgggactactgagttctatatctacaagcatttctgatttttaattgtgtctcttttaaaatgttgatgaattcaatttgtggtttaaatatctcgtcagaacaattagcttgctgagatgtttcatctcactcttgcattactcaatgcaggtgcttgttgctcatcaaggggagtgggaagtagcagcacatccaccttcattctcataataatgctgcccagacgtagtcatgatttaattagaaacttcttgtcaaaggatgtttgtttttaactagtcgtgcgcactgattaattcagttcatgttgttatggttgtcttcccatttctagcagattattaatgtcttatatgttttcttatcatgatatctatttatactttgttgcttcccccatt

SEQ ID NO: 12785 - DNA, 1395 bp, Zea Mays
ctcagattaaacttgaagatcacaaacacagtcgaagtacaaaatcactatggatccttggctaaaaactagagtcgtctagagatgggaaatatgagtgctaaaaccctaagccaaaacaaatgacagcaaagtcatactagactaaccagccatttcctctatttatagagggttatttttatttcctaaactagccctatttacatagagtctatgcactccattgggtgcgaaatagaccatctcctaagtttttgatctaacggccacacactctacacgaagttgcttcgcctcgatgcacccttcactgtgatgtcatgtgccctcactgattctctcttgaaccgtcgccgccgagttttgaggcccaaacccagcaaaacccaccatccgtagcgcagggtggttttgaggctcaaacaccaaaccaccgtgagtatcgcaccgcgtgcacgtcctccacaaccagacgcatgtcccaccagtcctcgaccacgtcctcgtgcgagtgttagccaccacggttggttacccgtttgctccggcccgtcagccaagacccaacgctcgtccttcaccgctcccagtccatcagcacgagcccgcatgaccttcaccttagccgccgaccaccgtatctatgctccacatctacacaccacaagcggaccgacatggttgcacatacataatctcacactctggtcagtccactgactaccccagagtgctatccgttgataatcactcatcatcaatccaaaccacaagggagaagtcaaccttatgttcgcacaaaagcaagtgtaaataggagtttcaaatatcacttgcatccaacacaaaccaataagttgtataacctatttcctgttggtttatcgtattcatcaaatcagcaaccatcaaggacatggtcacaaattaatttgacaaatatggctacaatatagaagcaaatccatatcccaaatgtgatggctacagtatagaagcaaatacagacatggttgtgcttaccttgtgcgtgtagcacgatagcccagttcctcggatgctcttcgctgaggcaatatagtgctgcgagaactagtgatgggtgggtggaggagaagtggtgatgagaatggctaacgacggagaactgctgatgggagcggccgacgacggagaactgtgggggcagttggcggtagacaactagtgatggaggcaggcgggtggaacaagagttgggtggaccgggaaaaatgtcgatgtgatagatgggaccgacgacgattattttagggcaaccaaaatattccctgtttgtagatacagatgatggagatttgagggatataaaaaaagatggaagaggttcaaaggatccgttggaggtttcat

SEQ ID NO: 12786 - DNA, 213 bp, Zea Mays
gtgaagtttgcgctatatcttagtttaacataacatgctttacatagatgatgaaaatcaaaccaattgaaagtttaagaaccgaaagtatatcaattgaaatcctaaagggtaaagcatgctaatatgaatctcaaacctcataatgaaggatttcatataaatatgtcactacatcttcattatttggttgaaagaaagagaaaaaaatat

SEQ ID NO: 12787 - DNA, 403 bp, Zea Mays
cgacggtctagggttagggttttcttacctaacactagttaccagatcgagacaacagagacctcaaagggttcgggattttaaatccacgaccaaaacacaagatcaaaaagaaatagagatagaacgcattagggttcgtgaccctagtttccacaaatcgtcccaggattaaatctgtcaatagaaaaacagatatgtcatcggggatacccagatctacgtgttttttttttcaactcaaaactcgatcccaaaaacatacataagatccatttcatacagtcatacacacagtatgggaatcgaaaaaaaaaggactagatccgggtgtatagaactcatagagaaagggccagatgaccgggttttatctcgcgccattcagatcaccttcggtgct

SEQ ID NO: 12788 - DNA, 401 bp, Zea Mays
cttggattggccttttctttttcccttcttattctcaagagacttgtaatctgtaacatcccaaaaatctcaacccaaggtttggaaccctaatctcctaaaccccccttatttctatttttctccctaaactccacccttaggtcatctcatcatatgcatacacttggattgttaggaacacctcatatagattattttcaacccttaagattatttagcaaattgttgattcaaaagaaaaggaaataaaaagaaacaaaaatagaaaatagaaaaagaaaaaaaagaaaaacccttccccctcggctgggccgattttggcccaaaccgcgccgcgcccgctcttcccccctctcttcccacggcccaagcggcccagctgcgcgcgaacgcgccgc

SEQ ID NO: 12789 - DNA, 668 bp, Zea Mays
gaaaacaacaaacatgaaactatgcattatgtgagactatttcatcatagtttcaaatattcttacatgatgtgttaatcgtgtccatgaaactctcactgagaacggcctaaggagagtgggtccgtcttactaagtacggcgtaagattgcctacaacgaatctcgcaagccccctcccctattattgtgcatcgtataggggctacaattgccctctaaagcacacaacgtcgcccctcctactctatccaacgagaatcgtctctctcacccaagatgtaccagctctgacgttgtccacgcgagagctcgtgtcgtcgctcggaaggtttcgttggggcctgcgctttcggagacgaacgcaactcaccggcctttgtcgtgactcgacagtggagcccctccggcatgcgcagcgacgacgagccaccgagtcaggctcctaggagagttactcgttcatgaagcaacaagtcgcaggatctccatcgtcgaccaccgccgccggtagaagaagaacgttgccccgactccgatacaaccacccgcaaactatgccttcgccgctaccgaggtcgtcgcgctcgctgagcccatctcttggctgtccagcgcgccatcggctacacatggatggagagagattgcgtggactagtagttgag

SEQ ID NO: 12790 - DNA, 361 bp, Zea Mays
aggcttgttcgatttattctcatcacatgtggatcgaagtggattgaaatgtattttgacctgttatggatttaatcccacacaatacatatggattaactacaaaatgaacaagtccatacctccaacaaacagactgagatggttcaactgttggtttccactagagcccggctctattgagatggttattgatagccagtttgaagagatttggtaaccttgcatctagaaatctcgaatctgatgatgttaccgcccatatttcccttcagctggcatttcatcgagcacttcattggcatgaagaaacaactccattgtcatttccctccgtgagaagtagggagggaaatgcgtg

SEQ ID NO: 12791 - DNA, 62 bp, Zea Mays
tagggatcactgacacaatagaacacaagttccaagcattgataaacacaccaaagctcatc

SEQ ID NO: 12792 - DNA, 471 bp, Zea Mays
aagtcttgctgagtaattgcgtactcagggttttatcccttgttgtttttgtaggagaagttttattcccttatctttgggttagttacttcttgtggaggacttcaagcttagaaggtttttatatatctctttggaaaggcttcacccttccaattattgtagttaagttatgcacttcgagtactatcaggacttgtaataattacaattcttcttatattgtaaaacttgagctttggaaatgtaaaatatgttttgtaaagtcttccgctttatctccgaagtgtgtgtgtatcgagtgtgattactgtaatatgcatgaatgtgggagatccttgggatgatgagttcgagttgatgaactcgatagccttgttaagttacccggtacacgtgcacagccatctgaggccgttaatggcaagggttggtgcatgtgggcctgataacttgggagggctgtcacac

SEQ ID NO: 12793 - DNA, 380 bp, Zea Mays
gcgagattcctttaagtgggtaggtttgtaacatcccaaaatttaacccccaaggttagaaaccctaatctcctaaccccccttttattattccctagactccacctcataggacatttcatcatatgcatacaccttgattgttagaagcacttcacatagaaaatatttttttattacttaagaatatatatatctaaataatggttcaaaagaaaaaggagaaaaaaagaaatataaataagaaatagaaatagaaatagaaaaaaagaaaaaggaaaaatcccccctcggttgggccgtttccggcccaatccttctctctctctccctcgcgcccgcgcttcctcccttcctctcgcggcccaagaggcccatct

SEQ ID NO: 12794 - DNA, 251 bp, Zea Mays
cttgcagccaccctccactacttactcctccctctagatctcccccccacgcagcaaggatcgagaagaggaggagcaagatggattgaagaggaagagaggatcaaggagatgttctacccccatctcttgcagattttcttggggaaaccctaggtaaggataggatccttgttcctccctataattatatgcttttggaggttgtggatcatgtggattgaaggattagaggttggattagatgtggg

SEQ ID NO: 12795 - DNA, 1362 bp, Zea Mays
tgaaaagtagtgaaccctaggataatataatcaagacctcccaatcttcaaacaaattttgcctatgatgcataatttcatcagccttatcgctattgtacatgacaaagcacatcagtaggttcgttgaatcttctggcagcaacttaacacgaaacttctgtgcaccaacactcccatcctcacgtgtttcttcctttggaagggcctttgcaatcaccccgtagatctcaatcacttagccactgccaccattgctccacgtttgctcctcccatccacatggggcaattgggcactgatcgaccactcatagtaatcaaacaggcagatcctgaccctcactactaaaaaatcaccttcttgcaatgggcaaaaatcgtggcgatagactataaatcattgcaataggcaccaattgcgataaaacaactgttgttgcctgctgttgcaaaaaatagagtggcaataggttatagcaacatttttacgttatgttgcaattactatatcctttgcaacgtgttcaagtgttgtaactgtttgttgttacaatggactattatgttgcaaataagttatattgcaacatttataatagttgccaaaaactatattgccacaacatatttcatggtaataagtgttaatgccacgtttgaatctgttgcaaatggctttgttaccacaagatgcttcatggcaacaaaacactagtgccacacaagtgactcgtggcaacaagatgtatccaatgtgtccgtaacacagtggccttctgggagaacaagccggaacaactgaagtacaaccgctaatgcacttttactaagaccaaacatgcatttaatctgaaagagccttactataaaagataccttagtgacctccttgcaacctggatacaattccttctttgcctctgttaatagattaaagaatgcctttgcttttgcatttggctcttcattaatatttcctatgatgtcttcatgtatagcaccactgattagcgttgaaactagttcggtcacagaaccactgtcacctgtttcatcatcattgacaactgttgcagcattgccctcatctgaatcgtttgcttggtttccttcttcgatgaagctctcatcaaaccctctaataaccaagtgactctgaacctgagattgtgttttgtaggacatgcatcgacatcttgaacatggacatggtgcagtttctcctctagtagtgccaccaaatgtagtttgtatgaactttttgaaatttgtttgccactcatttgtcgtgaagtgcatgcgcatccaactcctactattctgagacatggctttctagtcaaagattcaaatcaccagt

SEQ ID NO: 12796 - DNA, 882 bp, Zea Mays
attcaaccaccaaaattaattagggactaggtgtaagcctaattccctttcaatctccccctttttggtgattgatgccaacacaaaacaaagcaaatataaaagttcataattgaactaatttgcataatgtaagtgcaaaggttgcttggaaatgagccaataaatgttacttacaagatatgcatggattgtttctttatttttgacttattggaccacatttgcaccacatgttttgtttttgcaaattcttttgtaaattcttttcaaagtcctcaaaggtgaataaataggattttgagaagtattttcaagatttgaaattttctccttttgattgagatgcttttcctttgactaaacaaaactccccctcaaataaattctcctcttagtgttcaagagggttttaagatatctattttgaaagtactactttctccccctattgaacacaatgaaataccaatttgaaatataccaattgaaaatcattaattttaaaattagggtggtggtgcggtccttttgctttaggctcatactttctccccctttggcatgaatcgccaaaaacggatactttgagtgagatataagcccttcgaagtactttctcctcctttggtcataaaataaatgagtgaagattataccaaagttggagagatgcttggagtgatggcgaaggatgagtagtagagtggagtggaagcctttgtcttcgccgaagactccaattccctttcaatatacctatgacttggtttgaaatacacttgaaaacacattagtcatagcatatataaaagagatatgatcaaatgtatacttgtgtgctatgtgtgcaaattagcaagagaagttcctagaatcaag

SEQ ID NO: 12797 - DNA, 29 bp, Zea Mays
gacaatgtcttccgcccggatcggccccg

SEQ ID NO: 12798 - DNA, 297 bp, Zea Mays
aaatctgcatcgcgtattttccgcaatgtccttttttcgcagaacaaaaaagccgttttttcctttcctgttagttattggagtcagttaggaatgtttttctgatgatgttggtttggtcctttcctcgtcctgaaaagctgcctcttcttctgccctttgtccagttccctctctgaaaaaatcgcagatttctgttagtatcatcaccagttcgccatcatctccgctctgtgggggcagaagctccgcttcgttccaagaaaggcccccgcgtcttcctccgcaaaacctccc

SEQ ID NO: 12799 - DNA, 233 bp, Zea Mays
gaccttaattgccacaaattctccaaggtcggaaatgatttccaatgttaactgaaaataagttgcaaacttcctcaacggtgaggaggctggcaactggctggacatcaagtgatcgagccactggaaatgtttctctgtcaataagtttctctcttttttatataaaaaagtgtccagaaccactggtctgtggcttgcaattctttagtcacggtttgactgcctacatg

SEQ ID NO: 12800 - DNA, 315 bp, Zea Mays
atttatttgcctttgggatgatttttgaatgctcatgattgattttgaatatgtaatatcatttcttcctaaatgaaaattcacataaataatataataaatattagtccaagaattaatatgttgtttataaataattttggtttgattattatgatttttagggttatttcgaaatgtattttgaattcggaaaaggaaaagaaaaagaaaaaaagaaaaaaaagaaacaaaaccctaactaaattggcccatttggcccagcaaggagccgcgccgcgcccctgcccttctccttcctgtagccgccgccgg

SEQ ID NO: 12801 - DNA, 360 bp, Zea Mays
atgctttattccgtccataaaagtaggatcttgacaacatccatgcagttagtaccgttggatccagtttagcttaattatcatccaaatttaggtgttactcttctctctctcactctagtttctatctctctctagcttctctctctcttttttccttttgtgtagatttagcttaattagggagggattaattatttttcttggccaaaacattatgagtcatgaaatgttgcatcatgctgagtttaaatattctttgaattgttgcatatgtttgaattagcttgaatttgaaacttggtttgaaattgaattgaaaacctagagaaaataaatagaaaagcaattggaaaatcc

SEQ ID NO: 12802 - DNA, 301 bp, Zea Mays
ctcactcttgcattactcaatgcaggtacttgatacatgttgggaatgaggggagtagcagcacgtccactttcactctcataataacgctgcccaggcgcagccatgatttaattagaaacttgttgtcaaaggaagtttgtttttttttgctagtcgtgcgcactggttaattcagttcatgtcgtatgtttaacttccctttgctagccgattaataatacttggtatgttttgtcatgatatatgtttatacactgttgccccccctcatttatgcaattttgcaaaggagatgctg

SEQ ID NO: 12803 - DNA, 2067 bp, Zea Mays
gtgtacgtgaatttctgatccgggcacgtacatggttcgcattcggtttaccttcaaaaccgggtgtgacataagtggtatcaaagccgtgctgactgtaggaccgctgacctagagtagcattggccgttttaaggacttattgattattacttcacctcatccttgattttacttcaaaatattagtcacctcgactaattctatgttgtgctcctatatgcccccttgccaaaagtattttattctagtatggtctatatttctctcaatctattagatctgatctcactcttgtgcttgcaacatctttgtagatgcccctgaccataaccttcttgtctttttgggattctttcctctttcgttattaaatttctaccatctggcgaactctagttctttggtattgacatgcttgtatccctttaatactcttgtttcgaatacttgcctctaaatttctactgcctacttagacatttcagtttatatgcccatgatcttcctgtcttttgagaccctttcctcttctgttgttaagtcgctatctttcggcaatttcttgtctcttggtattggtatgctcatctccttgaaatctttcatactctcatctttttatgcttacctttatatcccaagatctgtttaagatatttcattctacatgcccttgaccacccttgtttcttaatgacccataagcggtcattttattttgcacccgtggtaatctcgttgtttccttgtaactttcttcgataatgaatttttacttcaactcttctatcggaacctcacttatcttatccttaattgttttctccatttcttcactttgcgagtcctgccttaactctatccatggattatgcttttcatcattatcacctttatccttatcacccctatatcttaccttgatgtttatcttataccaacctttaaaatatcctcttttccatctcaatctgagagttgtaacttacctacttttcccttggtcgtatcctcttctttatcacatgcgagtttttaactctatcctttgttgtgtttttgtttgaaatttcctttacccttctcatcactctatcctaccttgtgattacgttatgtccgttatctaaaaactccaatctcctatctcaatgtgagagcgatgttttacttaccttacccttggcaatattctcttctttactgcgtgaaattctggacgtactccattctttgtgtactcatatcactggctcttcaatgccttcatcttttctctcataccctagtccgttatcgcctttgacccttgcgatatttatgtattctacctaaatcctcaccttaaacttatcctttaaaagcctccctttcttttcacccagtttgagagctgtgagttacatatctctcccttgatttctttcccctccttgtcgccttacaagttttgtcttaatttcatcctatgtggtgtttttatttgctatcaccattaccttgtcatccatcggtctttccttgatacttatctttattcttgctctttaagaatctcctctcttccacctcaatttgagagtggcaatttacctatttggcccttggacgtacccccaccttttccatttgcaggtccggtcttaactccatcctctatggtactcatatcttttgttcttatgcctgtttacctccttccctacgtccttgcctgttattacctttaaaaccctcgtgatatctatgcccttgccttcctgcttaccttaaacctaccctttgaagcatcctcttttccatccctattcggggataatgcctcatctatttcatcatcaattgctcccccttcttcgacgccttgcaagttttgtctaaaatacatcatttattgtgtttttgttcgttatcaccttaacccttgtcatccctcgatctttaccttgatgctaacctccattttaaagtcgcctctcccatttcattttaagagtgatggcttacccatcccactcttgttcgttcccttttcctctatcgcgttgcaagtcttagcttttg

SEQ ID NO: 12804 - DNA, 659 bp, Zea Mays
agaaattcgagatgtcgatgatgggcgagttaagctacttccttgggttccaagtgaggcaactcaaggatggaaccttcatctcccaaacgaagtacacgcaagacttgatcaagaggtttgggatgaaagacgccaagcccgcaaagactccgatgggaaccgacggacacaccgacctcaacaaaggaggtaagtccgttgatcaaaaagcatatcggtctatgatagggtctttactttatttgtgtgctagtagaccagatattatgcttagtgtatgcatgtgtgcaagatttcaatctaatccaaaggagtgccacttagtggctgtgaagcgaattcttagatatttagtcgctacgccttgtttcgggatctggtatccaaaggggtctacctttgacttgattggatattcagattccgactatgctggatgtaaggtcgataggaagagtacatcggggacgtgtcaattcttaggaaggtccctggtgtcatggagttctaagaaacaaacctctgttgccctatccaccgctgaggccgagtacgttgccgcaggacagtgttgcgcgcaaccactttggatgaggcaaaccctcagggactttggctacaatttgagcaaagtcccactcctatgtgataatgag

SEQ ID NO: 12805 - DNA, 2290 bp, Zea Mays
gtttatttatggtgctcaagttgtacaagcactccccggaccttaaaagtccagttgcaagtgatgcacaaatttagggggagatgtgttacaacttgaccctttgagactaacatgtgcttgagtttgcttgatttagtctcgaaggaggattgaaagggaaaaggtggacttggatcatgcaagacttccactgcactccgatgagagggtaacttattccaagttcatctttatgatcttattgcctttttctcttagttgaagattttggtgaggcaatggggttaaaggggccaaagttgatcccgttttggtgcttgatgccaaagggggagaaaataaggctaaagcaataaatggatcagctaccacttgagaattttgaaaaagtagagttagagtttttgtttgtcaaaatactcttgtttgcttcttattgtcaaaagttggcttcttgtgggaagaagtgttgtttatgggaaaaagggggagtttttgtaatcttgaatcaatttctcttggaacgactctcttcatgtcttaacaagtgtgtttgacttagagatagaaatttgaggttgatttgcaaaaacaaaccaagtggtggcaaagaatggtccatatatgccaaatttgattcaaaacaaatttgagttttcattggcagtgatattgcacctgttctagttgctttatgttgtgttggcataaatcaccaaaaagggggagattgaaagggaaatgtgcccttgggccatttctaagtgttttggtgatttagtgtccaacacaagtgcttaagtgttaatatatgcaaagtggtggacaaagtgcaaatcaagtcataaggtatgtttctcagacttagtacattgttttagagactaatgtattgtgtataagtgctggaaacaggaaaagaacaattggaaatgccttggctcgagcagccaagactctgctaagtctgggagcaccggagtgtccggtgcgccaggctggctcgtgcaaactcgctgctctcgggatttcattggcggcgtacggctataattcaccgaactgtccggtgagccaacggtcggccgggccaacggttggctgcgcgatctgcgcaagacacgtggccgagccaacggtcgagagggggcaccggactgtccggtgtgcaccggacagtgtccggtgcaccaacggctcccaggtgccaacggtcgactacgccacagaaggaaagaaatccgcaccggacagtgtccggtgtgcaccggactgtccggtgcgccaggcgacagaaggcaagatttgccttcctggaatgctctcaacggctcctagctgccttggggctataaaagggacccctaggcgcatggaggagtacaccaagcattctcaaagcattcctaagcactaagacatcgattccgcgcctttgattctttgcgatagcaattagagctctagttgagttgtgaactcattgagttgtgttgtgagctcttgttgcgacttgtgtgcgtggtgttgctgtgatttcttgtcttgagtgtgttgtttatccctctcttactttgtgcttctttgtgaacttcaagtgtaagggcgagagactccaaagtgtggagattcctcgaaaaagggatatagtaaagcaagcaaaacaccgtggtattcaagtgggtctttggaccgcttgagaggggttgattgcaacccttgtccgttgggacgccacaacgtggagtaggcaagcgttggtcttggccgaatcacgggataaaccactgtgccatctctgtgattgatctcttgtggttattgtgttttgttgagactcctctctagccacttggcattattgtgctaacgcctaatcaagttttttggattaagtttcaagtttcacaggatcacctattcaccccccctctaggtgctttcagattgcttttaggtctatgcgctatgtcttccttggatacagcaatatgcataaaggttataagtgtctagaggcatccactaaccacatgtacatttctcgtgatgttgtttttgatgaagtctttcccttcatagaactatattctaatgcatgtgttactgcgttcagagatcaatcttttgccttccaacttactcccttcatccaactttgaaaatatggtggattttgatacagtacagccgatcaatcattgactatttttaatgatgaaaattctggaggatcccatatttgtatgaaggatggctcagggaggatgctaatgatgaacactag

SEQ ID NO: 12806 - DNA, 665 bp, Zea Mays
aaaatatattagaagttcaaaagactagcacaccacttaaatgtcgacctaaggggcagcaatctcaagaagcacctccaaagtcattccctaggccaacaacagtatcagaaccaaaatttatagcacatccaacaacggtctacacagaccaaaggccccatgcaaagctacaagatggcaccgtgaaaaaaataaagtatggatgtgtaacttctactggagaacctcaagatttgtatgatttaaaagatacaaattggaagtgtgatatgaatgctgagtttaaagcactagctaaaacaagacctagcatttggttccatctgaaggagctaaaaatataacacagattgcaaatgggtatacaaaatcaaaagaaaggctaaaagtactctagacagatacaaggctagattggtagcagaaggtttcaaacatgtatatggcaaagattataaggatactttcagccatgtggttaaagcaactactatcagaatcatcttgtctattgctgcgactagaggatggtccttgagatagtttgacgttcataatacgtttcttcatggtactctcgaggaggatgtttacatgaaacaaccaccaggctatgaggacaagatgcagctacgctacatttgcaagctagacaaagccat

SEQ ID NO: 12807 - DNA, 612 bp, Zea Mays
ggcctgccgccgccgctgctgctgctgcgcggtcacgaggttgaggtgacgcttttcaagtccgcctccttcgccttcccctcctggacgggcgtatggctggggcttcattcattgcccgcctaggagcacacagcagatcaagcagccaagcccacgcacggcaccaacccagcttcttcttacggcgcggcggcccaatttctttgtcacgacaacgacaacgacgacgtgccagcgggaaacctttgtactagctgttagtatgtactccatacagtatcgtcaccattcttatgtgtgtggctgtgtgcaggccagacaacggagatttgacagaacctatgcacggcacacttggatacgctgcgccgacccccttctctcggcaccgcccgcacggccgcacggctacctgctacagagtactactcctagtacgcacgtacaggggtgtacgtgggtattgctgccaactgtgcagcgtcgcgcacgggccatcaatgtgatttgatgcctcagtcatgtgcccgcttcaacagcctgcgtctgcgtgtctcgtggacgacggcaaggccaaggcccgccaacggcagcccagctagactccag

SEQ ID NO: 12808 - DNA, 192 bp, Zea Mays
actcgtcactcaggagttggagtggggagaggtgctggggcgcagagcggccgcatcggcgtgtcggtgtggctgagcagtggagtggagtgggtgtgccgcaaatggacttactatataaaagttcgattattttgttgtatatctaagtctaggtataaaaggttacagagattgaggtgacactatggc

SEQ ID NO: 12809 - DNA, 271 bp, Zea Mays
gtgggattagaaaaggtgggtgagctcacaagaatccacatgctaaccatgatgacaaataatgtgatcggagacacaacacagacacacagttatctgtcttgcgacgaaaacgactgaacctctggaagacagcgttttagaggtaaccaatatacaaggacatgagataaagacgttgatgtggcatgtatccatcccttgctcctgcctatgccaactgccttttttttgattcgtatgctacactgaccgaaacctgctgatccgg

SEQ ID NO: 12810 - DNA, 374 bp, Zea Mays
ggcgactggtgaggtggcgcgtcgtcgtggaggacggacagggaactctcaactctgggttggagactggggcggcgggtcggtcggtggccgcgccgttaatcgggaaacggggaagaagcggtagcggacagtccgattttttttttattttttatttttgtattatatccttttctcgaaaaaaatcacgtttagaccttaaaaattttaatgtcattttttaatccttttctcggcgtcatagtctatggcgccgaggtaacacagctcggcgccatacgtgttgcgtagcacgtatctcggcgtcatagtctatgatgccgagtcgtgttacgtcagcgtcatatactatgacgctgagcaaatgatct

SEQ ID NO: 12811 - DNA, 591 bp, Zea Mays
aatagaagaaggaaaaatttcatcagatcgctggttcgtgacgacaggttactcaccagtcaggaagataaactgcatgaggcccaccatcatttcactgaagctattggtagaaggggtgagagacagagggccgttcggtggggtaacctaggctatagtccatttgacttatcagatttggatttcttgttcaatgaggatgagattaaaaatgtggttatggggatgcactctgaaaaggcgccgggtccagatggttttatcgggatcttctataagagttgttttgagctgattaaagatgatctatcaagtgcaattcatgatttctatcaccatagatgcaaaaacctaaacctcgttaacgaggcaaatatcgcgcttttacaaaaaagggagggtgctgacaggattgacatgtttaggccgatcagtctcatcaatagcttcatgaaaatattgaccaagattttagcaaacagacttgcaccaagaatgaatgagattgtctccactgcccaaaatgcgttcattcagaaacgttcaattcatgataattttctctacgtccaaaaagttattcagaaa

SEQ ID NO: 12812 - DNA, 420 bp, Zea Mays
agatggtctgcagatggggaatacagttcaagtagcgcatacaaaattcagttcacaacgaacttctgtaaaattcacatcaaccccatttggaaagcaaaaactgaaccaaaatgtcgtttctttgcttggacattgttgcacaacaaaattttaacttcagacaatctgcaaaaacggggatggccttgcaatcaaaattgttctttttgtaatgtagctccggagacagcggcacacctatgtaaagattgtcccttcgccgaggaagtgtggagcatgatcttgacttgggctgatttgcgattcctggacggtatttctaagactggatctctgcacacgtggtggtttagactgaggatgctctgtagcaagcaatcaagaaaaagcttcgatggccttctaatttatttctgg

SEQ ID NO: 12813 - DNA, 309 bp, Zea Mays
atcttttggcaattctactcttaccctttattttgcttgggcgttcaatatatattctctattgtgtggcatataattcggattttcaattcagctttgcccttcttgcaaccacggtaccacaccacttctgatttttttttgtttcctttatgttagatagatctttgtgttgtcgatctttcttttcaattcgccggagaacaatagtgtgatgttcatgttatctgtcgataacataactacataagcaataaccaagcatgacaccctgatcgatatctatctgaatctctgaacaaattgtaa

SEQ ID NO: 12814 - DNA, 229 bp, Zea Mays
tgcgacgcggggctggatctcagtggatcgtggcagcaaggccactctgccacttacaatgccccgtcgcgttttaagtcgtctgcaaaggattcagcacgccgcccgttgggaagggagcttcgaggcggcccgccgcggcgcgtcggccgggcgggctgagccaatggcacggggcccttggggcgcgaacgccctaacgtgggtcggggcgggcggcgagcagagg

SEQ ID NO: 12815 - DNA, 336 bp, Zea Mays
ccgattctcatatcaccctgggacgaggccgattcaaccgacctccaatcttccacatcctccctcgcgtctcagggggagaaggacggtcctctcggcgcccttctggcagcggaagagccatggccctagccggagtagaagaagcggcggccagcggtggcgccgcctcgggtagaacgactgccaccgctacgccgaggagggatgccccatcggttaaaacctccgggagaacacaaaggatggtactgcaataaggcaggcagcgggagtcgacgctgccagcactccttggacgggcaaggaggtcggcacgtgcgacacaagcttcat

SEQ ID NO: 12816 - DNA, 3413 bp, Zea Mays
gaaatcagtaggtcaatctctcctctcacctttacatcgtctttgtatttacaaagttgttgatgacttgatgtagaggctgtacctgctggtttgctacccctagctagctatatgtcgtccaatcctagttgagctctcgatctggatggccctctgattagtcgtcctttgcttggtggtgcctgctgtgtatatcgccaccccggccgcttgcttccgctagtagctagtcccttcttctcttctcgatcagtttgtttaattggcagagcgtatgtatcacacccaaggcgaaggaatgtcgtcggcggcccagatcgcgccggtgccggagcatgtatgctacgtgcactgcaacttctgcaacacaattctcgcggtaatatatatataaccccgatctgatctctagctagctagcctctcgatctgtttgcccccctcagctcgttttctcccccggctctctcgatcggttttttccctggttgccggcctctgaactgaagcgcagctatatatatacagcagaaagatgcatgaaaaatagttgattggctgcgtgcgcctgcatcgtcgtcgtatagtagttagttttaatttgtacgaattggctgttccgctttctggatttcatcagcttctggatcatttcatcagagcttttggtctaaattgaaaattggggatggttcttgcatcaaattaagtcttgggaacaagatgactaattagctagcagtcttagacgaagctagtcagcaagttctcaaagcattctcgccttctgcaggccctcctgtactttttttctgggaaattatcgtcatcatcgttgatgagtggtggtctttatattaattagatctcaagtatatatagctttgtttgcctgcaggtgtatatgtgtgatatttgtacatatataaagcttcttcagcaccgcgctagctagcttctttcgcataaccagagtccgatccggccggtggttaacttatttcagctaatatttgaaacacaatacatgtatacgacatagggcaatagatttactcgttaccttcttgatcgaactgcaacagagagtgcatgcaataataaccatttttaagacgataaaaaaatttagtgtgtaccgcgtggatctttagcttttatgcttttctatataatatgtagaccatatctcacataaatcgaggtcgtgtcctaataaatatactaagagatatattgactaaaacaaaggccttttttattgactaataataataacatatatactccctccgtttctttttagttgtcgatgaatagtttaattttgcactatccagcgacaagtaaaacgaaacagagggagtattaattattgcccaatatctgtactacgtcgtagcattgctactttttattcatatattggaacaaaaaaaattccgttacgtaaggtttttattcattggaaccaaaaaaatattgttacgtaagtttgagtacggtttgctggaaagagttttaaaatgataaaaaatgttgatgtggaataattaataaacgaagagcgaacatatcattacaaaatatgtatatatagtgtactgccgatgacctggccgcccaaaaaatccaaatcattacttcatgatttttcttttacttgttttgcttttttcatggccctgaggtttttttacattttcttttttggatttcctagtttaccaagtttctgctcggtagattatatatactccatcggtctcaaataagtattcgttttaactcttatttttatgtctatatatttaaataaatgatgatgaatctagacacatatacaaaacacatatattaattattgtatgaacctattaaaaagctaaaacagattttatcatattccacaaaccttagtgacaatgaatacaaggaaaataaaatactccgctatgctaaaacattattcacgtacgtgttctcaaaagaactaattaaggaggtgttcttgcaaattatacagaatttatgcttagtttttcttcaattaatttcctttttctatcgttgttctcttgtgcattaaattagtgttcatagttctttatccacatggtcaacctctcttcatggaatcatggatggggcggtgatagataacccatcatcatcgccatttcagtgtaaacattgcctataggtttgcagttgttaaagaaaacaacatattacatctagcttattcattattcatcatgaagttcttcctttctagctagcttattcattctaacttctcgcgccgtagttacagggaatccatacatcaaagggtacagattccttcttgtactatttatgtttgcgtctagcatgcatactagtagagaaattatgggcttcagtccttgttgggatctggattttctcaaccgggaataattagaacaagtctctcgtatgtgcgattcgtaggactcaaacccaaacctcatgtattgtctcgcgcttagctttattttaactatatggataatatgtttttcttttaaactgacccagaaaagacccttgagtctcgtttgataatgttggactaaagatcctccaacgtccagctcttattagtcctaaaaaagtcaaaccaggactgatatgcttactggagacgtgttctttgtcgagtgcctcagacactcgacaaacgttttaccgagtgccgcactctgcaaagagatctagtaaaaaaatcatcggcgaaagattctttgtcgagtgctttctatcgggcactcggtaaagactttgccgagtgctgaatacatactcggcaaagaaaaggtgtcatgacaatatgtgccatgtatggagtatttgtcgagtatctaggtgtgtcactcggcaaagcaaggtttgaaatggcccacgcaacggatttattgtcgagtgctatggcctgccgcactcggcaaaaggtggcgactttgctgagtgccttggcggcacgggataaagcaagtttctaggtgccaaggcatattcatttttccatatttcatgttattgagtatcatttttccatactcgataagtgtgcaagaaaaattgatatggcctgccgcactcggcaaaggtggtgactttgttgagtgccttggctctggcactcgataaagcaagtttctaggtgtcaaggcatatccatttttccatattcatgttattgagtatcatttttcattcattttttctattattcgaatgacttgtagttcagatttgaattattcgaatacatttaatttaataaaaaaaattactagatatatcaaacacttatagaaatgtgctaaaaatttgaaacatatagttccatatactctcacaacagcactgtacaccatttt

SEQ ID NO: 12817 - DNA, 828 bp, Zea Mays
cacgtccctctctactactcacgtctctctccctcacgtctctctctcacttctctctctctcccactctctcctctctctgctctctcgcgtgcgggcgctgggcagccgcgcacgccaggggctcaagccgccgccatcccgcgcgtccccgcgctcgccagcgccgcacgcgctgagccgaccggccgcgcccggccccaccgcgacgccgcagcggcaagcagcaagcccgcgacgcccgcaggcgagccgacctcgtgcagcgcgcacccgaaaccgccgtctgttcgtctcagtgttaaagagattaatttctaccgtttctaacctccctcattcctcctctccattacgtgcagtaacagcagcaccattgacagcctcttgaatgacgccagtgacctctcctctcccctccctctctctataaaagggaacagcagagcctctccattcctgcctactcgaatttgcctctccctctagcactcttcgctcatcgctagtgtgttgccgttcgtcgccggagtgtgccgttcgtcgccggagttcgccagagccgcgtactagctgtccgtagtcgagccccgctctccgtcgatccgtccccatcacacgcacgaacccgaggttgttggcgacccaaatttattttatgtattttataaagtgctttcgattcgattcatgtgttgtatagttcgtttgttgtaatatgaacacatgtgattccaatttatgtatttgtgtgcgctacggaatttgttaaaaatatatgattagtagtgcaccgtgttattccatgtaatcgatgcgttgattttg

SEQ ID NO: 12818 - DNA, 1609 bp, Zea Mays
ggcacattcgcaatcacccatcttagggcaacttctgtgccccttgatgaaatttcaaaaaccatcacactgcattttacttctacaaatgtagatactgttgaattctaaacaatggaaaagcaatagtagcattcagtactaaaaagtgtcctctaacaaaacatccaagcacattaaccatgcgttcagagcatgcaatgtttttctatttggcaatgtttttctcaggagcaaccgacgaagaggggcgacttgaggaatcaggagcaacattcacgtcagccactatgtcatcaggaacaaccacgccaggtctcctcatcaagatccgtcccgcgtgaatagttttatccatagctttatcgcgctgggccctcagggtagcagaagtttcttcagcaaccttgacagccaaccgagcgttttctagctcctgagcgacggatttcttggaagcacgcagatccttgatgacatcatctttggtcgacaccaactgcctgaggcgaatctcatcatccaaggattcttgcagcttataacgatgattgtcaaactcctccctggtgaagcgatgactcctctccaagatggtcaacgagttgctggagtcacggtatagcctgtcaagattgtcacgagaagtaacgagggcacgtttttcttcctgcaaacaagaatcagcttcttcaaacgtcaagcaagcaataaaaacacagcaaaacaaagcccggattcacatgtcaccttttcagagtcgagctgagcgcggagagtagagttcagcgtgttagcatcattcagagaagcagaaacccgggccagttcagtctgaccttgagaatacttttcttcaaggtcagagcaccgccgggccagttcagcttgaccttgagaatgtttttcttcaagatcagagtaccgccgagcaatatctgtcaagaaacagtcaagcaaaggtgtcaaaataaaaagcagtttaaatcaggtagccaaaaagaagcagaagaagcactgaccgacatttgccgcctctaaatcagatacacgccgctgaagcagcactgggttccaacgcgccagggacaaagctccttctgggacagaggcaccttgcaacttcagccgactagacatctcatcgaccaacgcctggcattaaaagcagacaagcatgagaacaactatccgccaaggtaaagtcaggccaaaagaaaccaaaatacctggaggttggagaagaatgtaacaccccaggatccccaaacatcctgaaatgctactaaactacacaactaacattcatatataaaattttgacagcatctcctttgaaaatttgcataaacgtggaagcaacagagtataagcagatatcatgataagaaaacatactagacattaataatcggctagcaataggaagataaccataacgacatgaattgaattaactagtgtgcatgactagttaaagacaaacatcctttgacaagaagtttctaattaaatcatggctgtgcctgggcagcgttattatgagagtgaaggtggacgtgctgctactcccctcattcccaacatgaatcaagtaccttcatccaac

SEQ ID NO: 12819 - DNA, 4261 bp, Zea Mays
tggaaagcttatgaaattatctacaacttcttttaccaactcacagtttaattctgttgataaaattgcctaactcttaagagaacagattctgcacagaattatgagactgaaaaactgctataatgaaactgccataactttctgttctgatgtccgattgagatgttcttcgcggccacggaaagatctacaacttatctacgactcatatataaactttttatttttttgaggccactaagaccacggaaaactggcatgaacagaaactgtcgaatctgccattctgcagaaattaaattcgagatcaaaacctaaccccacatctaatccaacctctaattcttcaatccacatgatccacaacctctaaaaacacataattatatggaggaacaaggatcccatccttacctagagtttccccaagaaaatctacaatagatggggggggtagaacatctccttgatcctctcttcctcttcaatccatcttgctcctcctcttctcgatccttgctgcgtgagggaggggaagatctatggaggaggaagaaatggtgggcggctgccatgggagaagaggggacgcccaaccaagggaaaaatgggggagggtggcggccaagagagggggggtggagggaaaaggggtggcccccctagggttttgtgggagaaaagaaccgacgccccagatgacttttgcctttgcatccaacggatcacaaccctttcccacatccacgcaccgaagatcaacttttagacaacatttttttgggatattacactctaccccccttaaaaagaattcgtcctcgaattcggccactccaagcaaaacacccaaggtaccccatatagcaccaccattcaaaacatgggtccattattggtcttaattaacacaagaacttctaccttggactaattgtctaaggaaactacacaacctgacatcaagcatgaaacaacatgcaatgaagctcaaagcaagtcatagatgcaatcaacactacaatttcacaccatcaaattgggacgcaactatacatcaacatcaatgtcttaagacaacactcttttatgaaggggtaatatgcactaagcacaacccttaccaacttcaataattaattttaattaaattgaaacatccacacccgacgaatgtataagaagatcaaacacctcacctcaaagcaccacgaaacaagtagttctattgaaacaaaactcctaatcttcctaaaccttattcttgccatcatgaaaagataatcatgtaatctaacattctttgcaccccacaaaagggagaaaatctacagaactaatggagcaataaagccaacaagaagcgaataacattctgcgcggcataggtcatcgaagaaatgccaaaagcttcacaaagagcactgacagcacaataacacaatacttggttaaccaataacaactcaactaagaaaaatatccaaaccagtgaggttaacctacacataatataagttttcatctactgtagttcataaacttacatttcattctatcatacgatgcactcaaagtaccagacatacaaagtcaataataacccctaatccttcacacatttgacaaacatattaagctgatgtaaaaaccacatcatctaggagtaggtgactagccacacccaaccaactctaggctaggcaatgacttccttcaaaccaatagataggtggtctaaaaaaaatggctccacaagcatgcatcgaaaagggaaccatcagatcctcaatgtatcaatacataatcaatggatcaagagaatcaaagatttattctacaattagtatgactaacaggcaaccactttaaaccacatctaggctttgtggcaactaaaacacacaatagaagaaagacatgtaagccattctggctatgaaaagacttcccccaaaaatccatataaagtaccaatattcatttctttcagaactggtttctcaacataaacaatcattctttgcaatgatagttggagctatccaccaaccgctcaacaacttaaattcaaattgatgattaccttgtaccccaaaacatgcaattcacactcctcttagaaacatccacaatcaagcatatataacaatattattgtaataaaactcaaccatgaaaaacatggtgaaaacaacataggcatacttgtatatcacaagcataataacaacttcattctcacaaatgaccagcgatatctatcgcattaataaaacaatatcaaaatttcagaaataaattatatcaagcattaagccataaacaacttaccacataaccgtaaaggaatagggaggggtgaggttattgtcatctgcacttcaaagacactaacatatatcaaagatatttaaacccatacccttcctatatgtgcgagtgtgtcaaatttatcttcaaattgccaagaatctaaagcctatgctttgataccaactgtaacaccccaggatccccaaacatcctgaaatgctactaaactacacaactaacattcatatataaaattttgacagcatctcctttgaaaatttgcataaacgtggaagcaacagagtataagcagatatcatgataagaaaacatactagacattaataatcggctagcaatgggaagataaccataacgacatgaattgaattaactagtgtgcatgactagttaaagacaaacatcctttgacaagaagtttctaattaaatcatggttgtgcctgggcagcgttattatgagagtgaaggtggacgtgctgctacttccctcattcccaacatgaatcaagtaccttcatcgaagaagaagaaatgtactaggcatgatctggagtgtagccacctgctagcgggcataaaacttagtacaaatatttcacaaacatttgccatcaatcaacaaaacacccctacacttgaaaccaagacccagtggaaagactcccaccctgaaccacatgccacacagcagcaacactgtttgttaattttgtatctttaaaattaaaacagcggtgatatcaaacaaatactctaggagtatctacataaaatactctacaacttcagtattcaatagataattaaattctgccatctacaagttctaaaacatctgacaagataactgactgaatctgttttagacagcagtatggttaactttaaaattcgatatctcccaaactactgaaccaaaaattatgaaattctgctggaagtaagaacttttatccctctacaaaagtctccatagttggaagagccaattcgaccatttactagatgaaacccaccagtgaacagacccactcatttttgtcaggttaacaggaacagccacagtaaaacaaacataactggagtttcacaaatcatatgaatgcactctttaacaatctggaaagcttatgaaattatctacaacttcttttaccaactcacagtttaattctgttgataaaattgcctaactcttaagagaacagattctgcacagaattatgagactgaaaaactgctataatgaaactgccataactttctgttctgatgtccgattgagatgttcttcgcggccacggaaagatctacaacttatctacgactcatatataaactttttatttttttgaggccactaagaccacggaaaactggcatgaacagaaactgttgaatctgccattctgcagaaattaaattcgagatcaaaacctaaccccacatctaatccaacctctaattcttcaatccacatgatccacaacctccaaaaacacataattatatggaggaacaaggatcccatccttacctagagtttccccaagaaaatctacaatagatgggggggggggtagaacatctccttgatcctctcttcctcttcaatccatcttgctcctcctcttctcgatccttgctgcgtgagggaggggaagatctatggaggaggaagaaatggtgggcggctgccatgggagaagaggggacgcccaaccaagggaaaaatgggggagggtggcggccaagagagggggggtggagggaaaaggggtggccccccctagggttttgtgggagaaaagaaccgacgccccagatgacttttgcctttgcatccaacggatcacaaccctttcccacatccacgcaccgaagatcaacttttagacaacatttttttgggatattac

SEQ ID NO: 12820 - DNA, 63 bp, Zea Mays
cctctcgtgtgagctttccagtcgttaggtcaggatgtcgcgcacgaagaatgtgtcggcgcc

SEQ ID NO: 12821 - DNA, 57 bp, Zea Mays
tgacgcccaggcagacgtgccctcccccagaaggcttcgggcgcaacttgcgttcaa

SEQ ID NO: 12822 - DNA, 859 bp, Zea Mays
aagaaaaatatccaactagtaaggttaacctacacataatataagtcttcatctactgtagttcagaaacttacatttcattctatcatatgatgcactcaaagtaccagacctaaagggtcaatactaaccccgtaatccttcacacatttggcaaacatctcaagctggtgtaaaaaccacatcatttaggaataggtgactaaccacacacaaccaactctaggctaggcaatgacttcattcaaaccaatagataagtggtccaacaaaggctccacaaacatgcatcggggagagaaccatcagatcctcaaagtattaatacataatcaatggatcaagaaaatcaaagattttattctacaattagcatgactaacatgcaaccactttaaaccacatctaggctttgtggctactaaagcacatgatagaagagagacgtgtaagccattctggctatgtaaatacttcccccaaaatccatataaaagtaccaatattcatttctttcagaactggtttctcgacataaacaatcattctttgcaaagatagttggagctatccacccaccgcccaacaacttaaattcaaattaatggttaccttgtaccccaaacacgcaattcacactcctcttataaacatcctcaatcaagcatatataacaatattattgtaataaaacttaaccatgaaaaacatgttgaaaacaacataggcatacatgtatatcaccagcataatagcaacttcaatctcacaaaagaccagcgatatcaatcgcattaataaaacaatatcaaaatttagaaatgaattatatcatgcattaagtcataaacaacttacc

SEQ ID NO: 12823 - DNA, 2602 bp, Zea Mays
aaaatttcgacagcatctcctttgaaaattgcataaacggggaagcaacaaagtataaatagatatcatgataagaaaacataatcgacattaataatctgctagcaatgggaagacaaccataacggcatgaactaaattaaccagtgcgcacaactagttagaaacaaacatcctttgacaagaagcttctaattaaatcatgactgcgcctaagcagcgctattatgagagtgaaggtggatgtgctgctacttcccacttccctggatgagcaacaagcacctgcattgagtaatgcaagagtgagatgaaacatctcagcaagtgaattgttttgacgagatatttaaaccacaaattgaattaaccaacattttaaaagaatcacaattaagatcagaagtacttgtagatatagaactcagtagtcccaatataaccaataccatctcatttccttgaacaactacaataggttctataacacttccctgcgtcaacaaaacctgcaaatatcactttaatgtatgcataggaatgcaaagtgtaggtactctgtcttcatacctctgaaggtataaaaccacatcatctgcaaatatcacttcaatgaatgcaatgcatatgtcctctgccttcatacctctaagggtatgaagccgcatcgtacccctcctcgggcaacgtacgatgctaagttgtaccggtacggtcggaccataggtcacgacccaacttcagatgcaagtgaatcatgcaatgtatatggcatgccatatttatcaatatacttcacttccttaacatacaatacaacctcaaataatactttatttaccttcagatacaataccaacctcaaataatacttcatttaccttcagatacaataccaacctcaaataatacttcatttaccttcaagggtgtgaattattctcatgagtcatactcaaatcataatcatcatcaatatatgattgagcatcagtataatgcaagcaagtaaaacatcaccatagagtccaattatgaaagaatctgatacttctgaatattatagtgtaggcaaatagaaataacaagtcagaacggaagcaaccaccgctacattcacttgccttcatcgaaggagaaaaatgtactagtcatgatctggagtgtagccacctgctagcgggcataaaacttagtacaaatatttcacaaacatttgccaacaatcaacaaaacactcctacacttaaaaccaaggcccagtgaaaagactcccactctgaaccacatgccatacagcagcagcgctgtttgttaattttgtatctttaaaattaaaatagtggtgatatcaaacaaatactctaggagtatctacacaaaatactctacaacttcgttattcaatggataattaaattatgccatctataagttctaaaacatctgacaagataactgactgaatctgttttagacagcagcatagttaacttcaaaattcgatatctcccaaactactgaatcaaaaattatgaaattctgctggaagtaagaacttttatccctctacaaaagtctccatagttggaagagccaattcggccatttaccagatgaaacccaccagtgaacagacctgctcattttttgtcaggcaaacaggaacagccacagtaaaacaaacataactggagtttcacaaatcatatgaatgcactctttaacaatctggaaattttatgaaattatctacaacttcttttaccaacccacagtttaattctgttgataaaattgtctaaatcttaagagaacagattctgcacagaattatgagactgaaaaactgctatagtaaaactgcaataactttctggtcggatgtccgattgaggtgttcttcgcggccacggaaagatctacaaattatctacgactcatacatagacttttcatttttttgaggccactaagaccacggaaaactggaatgaacagaaactgtcaaatctgccattccgcagaaaactaaattcgagatcaaaacctaaccccacatctaatccaacctctaatcctttaatccccatgatccacaacctccaaaagcacataattacagggaggaacaaggatttcatccatacctagggttttccccaagaaaatcttcaagagatggagaagaacatctccttgatcctctcttcctcttcaattcaacgtgctcctcctcttctcgatccttgctgcgtgagggggggatctagagggaggagaaagccatggagagggtagggggcggctgccaatggggaggagagcaagagagggagggggggcggctgcaactaattggggagaaggagagggggggcggcggctagggttgggaaggagaggggggctcccatccactggatcgagatcaatggcccaaactcgctctcccctttgagctcccgaccccagcggaaaaatgccaaaagatctactgttttctaaggaatgcctcctaaaactccaaaccccaatgccacagaacatgaaagaaaagagagaaagaagtttaacttcttttcagaaaattggggtatca

SEQ ID NO: 12824 - DNA, 385 bp, Zea Mays
ctgaggttcgaggtggcgaacttcgactgcgggtacaacgccatcatcgggaggccggggctggccaaattcatggccattccgcactatacatacatgatactgaagttgccgggaccgcaaggaatcataactgtgcgcgccgacttccaaggcgccgcagaatgtttccgagtggccatccaagcagccctcaccaccaagccgtcaacggttccttctacgccggcgaactctaagcctgaggaagacctcgccgtaccggcaaacgaagctcaggccgtgacctctatgcggccgactgaagaaaccaagcggatcaacctggggttcgctgatgagcgcaagacggccatcatcagctccagtttgaatgacaaatagg

SEQ ID NO: 12825 - DNA, 1105 bp, Zea Mays
tgatctcgaatttagttttctgcagaatggcagattcgacagtttctgttcatgccagttttccgtggtcttagtggcctcaaaaaaataaaaagtctatgtatgagtcgtagataatttgtagatctttccgtggccgtgaagaacacctcaatcggagatccgaccagagagttattgcagttttactatagcagtttttcagtctcataattctgtgcagaatctgttctcttaagatttaggcaattttatcaacagaattaaactgtgggttggtaaaagaagttgtagataattttataagctttccagattgttaaagagtgcattcatatgatttgtgaaactccagttatgtttgttttactgtggctgttcctgtttacctgacaaaaatgagtgggtctgttcactggtgggtttcatctagtaaatggccgaattggctcttccaactatggagacttttgtagagggataaaagttcttacttccagcagaatttcataatttttggttcagcagttttggagatatcgaattttaaagttaaccatactgctgtctaaaacagattcagtcaggtatcttgtcagatgttttagaacttgtagatggcagaatttaattatctattgaatactgaagttgtagagtattttgtgtagatactcctagagtatttgtttgatatcaccgctgttttaattttaaagatacaaaattaacaaacagcgttgctgctgtatggcatgtggttcagggtgggagtctttccactgggtcttggtttcaagtgcaggagtgttttgttgattgatggcaaatgtttgtaaaatatttgtactaagttttatgcccactagcaggtggctacactccagatcatgtctagtacatttctttcttcttcgatgaaggcaagtgaatgtagcggtggttgcttccgttctgacctgttatttctatcgcctacactctaatattcagaagtgtcagattctttcataattggactctatggtgatgctttacttgcttgcattatactgatgctcaatcatatattgatgatgattatgatttgagtatgactcatgag

SEQ ID NO: 12826 - DNA, 378 bp, Zea Mays
ggaagagataccaaatggcatgtccacagtttaaaatactactctatttttgtactacctggaaagacgatgtggccatgtcatttttttctatctcagtattttccaataaaataacgcactataaaagaaaaggtccaacaatttaaccaagttctgatgaaagctagaatactagttccatctgcatgcagggtgggatctttatgtcttatactatatagcaatagcaaaatgaaacgtaggaaattatactactagataccaaatcccaattaatatggtccttttgaagtacagagagctttactgcatgcatctgctgtttcttcaggattttatacggaatgagaaaaacgagaagagaagtactaatcc

SEQ ID NO: 12827 - DNA, 515 bp, Zea Mays
ctactataaggctccggcctccgagcagagcatacagtctgctgctagatctggcaggcagcgagcggcatggaacccgaagcctgtcgcccgccgagacggtggtcctcttctctcgatcgggtccgggtccgtgtccgtctgcgctgtgcgtgcctcctcgctcctcctcctcctcctggtgaccacgcgggcgggcgaacgacgaggaaggggagggacagggacagccgcaacgacgcacgcgcggagacaggcgtcgtccggagtcgctgcggtttcggcaggcggtagagacgtagaccccatatacgatcgatcgagactgaggtgaacaataatgcgacgattcagagcaccgccactatatgggccatcgccagaccgtattgttcgtcacttggcgagctggccagagagagagagagatagagagtcgttcgagaactcgttttgttgttgttgttgttgttgttgttgttattattgttgatgatgctgcgtgtgttgtggaa

SEQ ID NO: 12828 - DNA, 614 bp, Zea Mays
gctggtctcatgtttatatagcgccaatgtttatacaggatctatctatagctaacaaactagcaactacctgaaggtattcaatggataatcatctggaatggataatcactgtatagatatatcactgtataggatctatctatatatcaccgtaacagacaggaacatcttccatcttcaattccagcaaggacgacgggccggacaccgggctttatatccatcgtcacgaacaagaatccaattgatgaggagattggttgttcgattcgaacgccatcagacattcagttatgcccctctcggtgatcccatcctaggcagtcagaataatgattaatttagatctgcatttgtccaaacctctgtttgctactgtgcagttttcaacactggagatggttaaaaactgaattttaaaaccgattgcaaatgggtagtgcgcggcgcgaggctgggttgaagactggcgccgacgagggcagcgacatcgcagaccggagcacaccactggatggacaaacggcgaccggtagcggaccaaccatgcatcagcaagcaccgagagaacctgccaccaagaggtgctacaacgcatctacgatggaaag

SEQ ID NO: 12829 - DNA, 440 bp, Zea Mays
cttgattaaaagaggtaaaaaaatctaaatttgctcctaaggttgtagaaggctttttacttggttatgactcaaacacaggggcatatagagtcttcaacaaatccactggattagttgaggtttcttgtgacattgtgtttgatgagactaatggctcgcaagtggagcaagttgatcttgatgagctagatgataagaggctctgtgcatcgcactaaggaacatgtccattagggatgtgtgtcctaaggaacccgaagagccaattcaagcacaagatcaaccatcattttccatgcaagcatatccaccaacccaagatgaggatcaagctcaagacaatgaagaagaagatcaagaagatgagccacctcaagaggaggacaatgatcaagggggagatgacaatgatcaagacaaggaagatgatcaagaag

SEQ ID NO: 12830 - DNA, 599 bp, Zea Mays
agttgaaatacctgaaattattaagaaagatgcttctacttcctgctttgatttaattgatgattctaagccctgcaaccaagttcttgttgagaatattgttgtagaaacatgttcagatgaggttgcaaaggaaaatgaacaattaaagcaagaagtggctcgccttggcaaggccttgtatgacaagaaaggcaaagccaaacaaatccgacctccacaggataacaccactgcgggagtgaacaagcttatagagggagaaactgtgatttgtaggctgtgccaaagggaagtccataagtctttccaatgcaaggcgatgaccggggataaacaaaggcaagagctcaagcaaaatctccaacacctacatcaaaaaggtggacaaaaaggctgctacaccatatttgatcaagaagaaaaagaatggaaaggtgatagcaatcaaggccaacaagcaagccaacaaagaaaagggagccaaacgcatctgggtgccaaaggaaataatttcaaccatgaaaagcaccaagaaggtttggatcccgaaagggaagtgagtagaccaaaggtcaaacgggaaatttggagacttg

SEQ ID NO: 12831 - DNA, 639 bp, Zea Mays
cttacttttgcttaaacccatgcctactaggtaaatcacatggtaggactgcttgttttcaattcatacacttaagcaaacctacatggtttaaaatgtgtaattaagcatgacacatagcttctatatcactccatagtaaatgatacatcaattgattctcaaatgctacaagtgtaaaacgcttatattctacaatttgtgtcatttaacttatatgtgccaaagtttggattacagatgatttgcccctcttgatatcaaatcaaagtgcatgtctcctgcaagtattcaaaacttgaatgcacaccttcagggggaggttactctataatctaatacttcgagactaacaccttttcaagtctatttcatgtgatagtctcattgtaaggaaaatgaggttcccggagaaagacaacaatcttccactgcaaaatctccaagaactctcatgtctctcaagctcgccattgaatttcaatcggtatattttgagactacatctaatatcatttacatgtcttctccaatatttgattagattatatttcatatcatatacttccatgttgctaaaaatgcataagtggttaactcatattctgttacctatgcataatggaagttagtcttttc

SEQ ID NO: 12832 - DNA, 319 bp, Zea Mays
cgtaaggcaacacaataaactagcggggaaaccacccggtagttttttaactgtccatcaagaggtacaacaatgctgacattaaggtaccatttcttggttactacatgccaaaattcaagttctttttttttttttttgaatctcgccctctggatggtccttacaggcttaaggccacgtggttgagagttctaacgatttaggttttattatctctaaattttaatgtgccttaggtcacgtgcaatctagagattctgaatcgttttttcaagtatcggagacaactaagagactgatacaaccttaaattttt

SEQ ID NO: 12833 - DNA, 591 bp, Zea Mays
gttgatttgcctttcttatttagttaaagtgagatgccagatttctatacttgcaaaatatatatttacaaattgctgcgacctttcccctaagagggtgccgcattccaatttaatgatatgtattgtatcgagctaaggaaccttgcatgtttctaaaatgtgtgtgtaattagggtgacttcattaaataggtgatgatagggcaataacgagcatatagatctggctattaagaccattcaggtaacatggtaatgtgcattggcatgtagaagtaatctacctacttgaaaaatacatgcttagaatggaaaaataataatataattgtagtctaaattcgtacccccagtttctgagctaggtccagatgctctatttgagccaaactctgttgataatttcttagactccctgggtagaaagaaaataggagtaaaaactcttcttcaacagattttactgatattacttgatttgttcactttgatattaattgcttttattaaataccgtccaggtaacatgatattaatgtgcattgccatgtagaggtaatatacctacttgcaaaatacatgcttcaat

SEQ ID NO: 12834 - DNA, 384 bp, Zea Mays
gggagagagaagtgaggagagagagagagacagccgggtgggagagaggagagaggaaggtggcggctgggagagggaaccaggggtagcggcggctagggttagcaggggcggcggccggctggggaatgggccaagtgggccaattcggccagctaggttagattaggttttcttttttttctttttttttctttgcaaatttcgaaatacatatttaaataatcataaaatttgtaagaatcaaaccaaaattatttataaataaagtatttatttttggactaaaaattattatattagttatgtaaatttttatttaagagaaaatgctattccatatctaaaatcaataatgagcaatcaaaaatcattccaaatgca

SEQ ID NO: 12835 - DNA, 1473 bp, Zea Mays
gagttccggaggccatccttccttggagcaccggacatgtccggtgtacaccggacagtccggtgaattatagcggagtcccctctggaatttcccgaaggtgacgagtttggagttggagtcctctggtgcaccggacatgtccggtggcacaccggacagtccggtgcgccagaccagaggtgccttcggttgtcccttgctcttttgtttgaacccaatacttggtctttttattggctaagtgtgaacctttggcacctgtataacttatacactagagcaaactagttagtccaaatatttgtgttgggcaattcaaccaccaaaattaattagggactaggtgtaagcctaattccctttcaatctccccctttttggtgattgatgccaacacaaaccaaagcaaatataaaagtgcataaatgaactagtttgcataatgtaagtgcaaaggttgcttggaattgagccaacaaaagttacttactagatgtgcatggattgtttctttattaatattttggaccacgcttgcaccacaagttttgtttttgcaaactcttttgtaaattcttttcaaagtccttttgcaagatagttaaaggtaaatgaataaaatttgagaagcattttcaagatttaaaattctctctcctcgttccaagtgcttttcctttgactaaacaaaactccccctcaaataaattctcctcttagtgttcaagagggttttaagatatcaagttttgaaaatactacttgctccccctttagaacacaaagagataccaatttgaaattttcaattgaaaaccattaatttttaaaaatagggtggtggtgcggtccttttgctttgggctcatactttctccccctttggcatgaatcgccaaaaacggatactttgagtgaggtataagccttttcctaactactttctcccctttggcaaataaagcatatgagtgaagattataccaaggatggagagtgatgcggagcgacggcgaaggatgagtagtagagtggagtggaagcctttgtcttcgccgaagactccaattccctttcaatatatctatgacttggtttgaaatatacttgaaaacacattagtcatagcatatataaacgagacatgatcaaaggtatatttataagctatgtgtgcaaattagcaaaagaaattcctagaatcaagaatattgagctcatgcctaagtttggtaaaagtttgttcatcaagtggcttggtaaagatatcggctaattgatctttagtgttaatgtatgaaatctcgatatcccccttttgttggtgatcccgaagaaaatgataccgaatggctatgtgcttagtgcggctatgctcaacgggattatctgccatgcggattgcactctcattatcacatagaagaggaactttggttaatttgtaaccatagtcccgcagggtttgcc

SEQ ID NO: 12836 - DNA, 505 bp, Zea Mays
ctacgtttcttttccgcactttgatttattgtaaggactatatggacgtctcagacgtatgatgtaatcgactatgatttccccttttaatactattttgagcactgtgtgatgatgtccatgttatgtaactgctgtgtacgtgaataactgatcctggcacgtacatggttcgcattcggtttaccttctaaaaccgggtgtgacattggttcttcatcctccctgtcttgatcatttgcatctcccccttgatcgttgtcgtcatcttgaggtggctcatcattttgattttctccttcatcaacttgagccttgtcctcattttgagttggtggagatgcttgcgtggaggaggatggttgatcttgtgcatttggaggttcttcggaatccttaggacacacatccccaatggacatgttccttagcgcgatgcatggagcctcttcttcacctatctcatcaagatcaacttgctctacttgagagccgttattttcat

SEQ ID NO: 12837 - DNA, 280 bp, Zea Mays
cggatgtttattattaattctttttaaagaaaaatcctagtgaataatataataattaaataatataataattattagtctaaaaacaagtattttatttatagataactttggtgaatttttagggatttttgagctatctaaaaatgcatttcacaattaaaaaaaaagaaaaaaaacaaaccctaaccctagccggcccaactaagggcccatctattccctaagccgtcggctccctctcccagctgaaacagccgccgccgccctgtgttcctct

SEQ ID NO: 12838 - DNA, 475 bp, Zea Mays
agtgcttctcttccacaccaagctttgaatgagccatatctctctttctactgacatgctgccatctatttgtacattggtcttttttctcattcctgccagcttacctacaggctacagccatcctccctctctctagacacccaggcagggaagaagaaaagaacatatacagagagggagaaggtgagcaaaaacattaggaatcttgtaatcttttcaccttcttgtcctctacagtctgagaatgcaggacactagctggatttgtgggatatggtcaaagcatgcactgtaaggcatcctgctgcttccttgcttgcttaggtgtctccatctccacgagatctttctctctttgcctctctctttatagtacaaaaaaacttgctggtacatggtgatggaatgacttcagcatcaaccaaaccacacacagacacagctaaaaagtttgatcactctccatatcacc

SEQ ID NO: 12839 - DNA, 421 bp, Zea Mays
cacctacttctgcatcccaatgagaatctggggcttgtattatgtgtcggtgtgattagttgtttacatgcttgctttgcgctaatctaagcaggtatacttatacttaatacaatccttcagtccaaagtgcctgttttaaatattagaagcattagctgttactgttagcctgttcctttgttcttagttcttacaaaagaccagagagggatgcaacctttggcctgaccttctcaatttgcagtatctattgaaatgcttgtattttttacagatggttctaaatgcctgtttcaccaatggtagggcttcgcattaaatctaattaagcgagaaaaatggagtgatttctctatcaaaccgaatagattaagtcaaacatgtaactgtcccagtgaacgagcaaaagaatagggcc

SEQ ID NO: 12840 - DNA, 886 bp, Zea Mays
cttagattcaataatctaatactacactgaactgtggattattctaaaaatagatcagggactctttcgtaagtgtatgcggtcgaaggggtataggtatatcagcgtcattcgatctgaatcgacaacatcgattaaacgtttctcagcttgaaccggtacgcgatgaccgccctaggatcgaggatgaacaaccacgatttaatgaagtgggattcgatcagaaccacccgatctgatccagtgacccggattgaaacgtgcgaagggtgattctacgtctaataacagtcacatgtgctcggatcaacactccacacagctcccacgcttcggggctgtggtgcccgattcccaaagtcaactaggtgataaatgatgcaggtgctaaggcgaaatcgatatgggtgctcttaccgaggattacatcgcgtcgtcctccgcccatcgagaagtgcgttccgcagtggcgctcccgtcaccggcgacgaattgccatggctctgtggtcccgcacactccactgcttccccgagcacgcaccatacacctgacagaacgccttcagtcacattggggattctggatggtggcggaggcgaatgatgtcgacgacggctatccttctccctttctccctctctgatcctcaccgaaggtgctctccaattgggtcgtcgcgatggttcgatttgatggatgaggaggtggttcagggcttatatatacaccctgcgaggcgaatcggataataaccagccgatcacaaccggccgcgcggatcctgggtttgctgtaatcgcccagcgatggacttcgatgaggatgacgtacctggcgcgctggtccctcatgtaagcgaagcaaggacgcgatcgtagtctcc

SEQ ID NO: 12841 - DNA, 329 bp, Zea Mays
tctggctgcaccttcgatcctaacaccactggaccgcgctgcccgtgataagcccggccgatccgtatcccatcgtaataccggtttaatttaagaccaaattaaactaccatagaaatacaaacggtaataactgcgtactagtagtgtgagtgtctgcagcgtctatatacacgacacatgattaaattcatatgttacgctttcaaattcttttgttctttaaatccagcaaattcatgtgtaaatatatagccactctctctgtataaataagtttcacaggtcggtttggatgtctaaatcttccatttgtattttttttttct

SEQ ID NO: 12842 - DNA, 230 bp, Zea Mays
agccattctacttatttttttctcgaacacgcaaaagaactgcgcgtcattatattaagaggaaagaaaggtcccaagtggacccaaaaaacaaagtgcccgaaaaggcaacaagcgagatgaggggacaaaaaaggaaaaaagaaaataaaaaaaagagaagaagaagaataaaagaaactagaaacaagagggaaagggggcaacaaccccacaccatctaaattaag

SEQ ID NO: 12843 - DNA, 607 bp, Zea Mays
cttaggctaggctattgtttccaggttcggcggactgcgaatcgggtaagaaaaagaaaaagggaaaaaaaactgccagcagtgatgtactgctggtaccggtgccgcatgcatctggataccgataccggtggtggtgtaccgaacagatatgcctctgcacagcacgcaccgtatcgcgggaagtggtccgtgagatcccccggcccggcccggctcgacggcgatacggttctgatatatatactcctactgaaacgtttctaatgtcgccgcccacttgcactttagtagtagcacattcttggcaaaaaaaaaaaaaaacacatcggattctccctgccgcctgccctctctctcgacctggttggttggcacttggcagacagtctatcttcgatcgctccctccctccctcctgtgttggcatgtcgcagcgtcgacatcaatgtcgagggccagatcaggccagtcgcgtgcactgtcgctgaacgcaacgcaacgcagtgcgccatggatcgatgagcagtactggccccgcacgccgacggtgcttgtgcttccattccctgcccggaaaccatgagtccatgacacagccacggag

SEQ ID NO: 12844 - DNA, 365 bp, Zea Mays
cttaattccgcacgaaaaaacacagaaactgctagactactgctgttcacccaccacctaaaattctggacagcccccctctaccccaatcgcaaacgcaacctctaatcaattaaattgcagcgcaaatgaacaagggatgaacacaaaaatcaccttggattctccccctttccttcctcccttcttccctccaccaaaacgattgaagactcacaccacaacgacgatgatccgagcggcaaggattggcaccttgggaggaggggattgagagggggggggggcggctagggtttggtggctgcaagaattgagagaggaggagatgggcacggggggcggcggccaagggggaagagaag

SEQ ID NO: 12845 - DNA, 305 bp, Zea Mays
attctggacagccccccctctaccccaatcgcaaacgcaacctctaatcaattaaattgcagcgcaaatgaacaagggatgaacacaaaaatcaccttggattctccccctttccttcctcccttcttccctccaccaaaacgattgaagactcgcaccacaacgacgatgatccgagcggcaaggattggcaccttgggaggaggggattgagagggggggcggctaggttttggtggctgcaagaattgagagaggaggagatgggcagggggggcggcggccaagggggaagagaagtgggg

SEQ ID NO: 12846 - DNA, 671 bp, Zea Mays
cataacaattttatcgttgcacaccactgcgagcagatgtactatatatcatacccaagcccaaagttagaagcatggtgggtagttcacaaggtaaaccctaggaaacttttacatactacttgcattgctggttattgatttgaagacgactaggtcgatgcgttttgccaaaaagaagaattgctaacttcttttgttgacgatgagggtgttgcacccaactcactagtcggagaacgagacgatatctatactttctactatattttaatacattcccttaaaagatttcaccattacattcaatatatctcctaaaatccccccccccccacctatctctcctatatgaactaccacatatatttaattgttttttttccaacagttggggtgtgcctgctacatcacctggcattggcattttatcaaacaccacgcctgcacaccgcggctagcaagccggtgctcgccttcgatgtgtactgctcatcttctccagtgcgcgtgccgtgcagacgctcgctgggcgtagagagcagctcaccgcactcgctgcggaggccgaccgccgagctcagctagctccttatatgcggttgatacagtgctctccctccctatatgcggtttgaggacgtttctacgcatctgttagagagagagag

SEQ ID NO: 12847 - DNA, 182 bp, Zea Mays
gacttttcttcccaagtcttaagcaaagttcttaatctgagccctatactctaatacacaacaccatattcattgaaattttttgacctagtgaatgcattctaggtgtatcaagcagttaatgcaagtgcagatgatgacatgcaaaaattttagttatcgtaacaccaggggtgttacag

SEQ ID NO: 12848 - DNA, 390 bp, Zea Mays
ttttatctaatcgcgcgcggctcaccgctttaaccggtgattggcgccaaatcgatcgtgctttggaaagcagcctccctcatctgcaggctgccgtgcagtgcccgccttttaaccctctccctgcaatgtgcaaagctgatttcatccagaggggggcccctctggcccttctgatgtgcattgcacttgcaccgcaggacttgacgaattgtgtcattgtgtgtgtgtgtgtggcttccttgcagagctgaccagagcgctatgtactgccactgcaagtgcatggccgccgcgattcctacccttgtagtgcttgctagctttgtgacttgtttaattagcttgttcgtatgctgtcgtgccgggctacagacatataataatatt

SEQ ID NO: 12849 - DNA, 1287 bp, Zea Mays
cacgaggagaggctaaacgcacacatgcgagccgagccgacactgcagggaataaaagaaacgcgggacgacagagcccttcctccctctttctgtcggtgggggcgaaaagagagagacacacagagagagggaagaaaattcgcacgctgagctgagacgaggcgagcgcgtgagcccggtccatcaaccaacgctgtagaccccatcgcccgtcgcgacggtaggtgctgcaacctggacgtaccaacaacccgtggcgaccatgcgagacattaacaacaataagtttttttactttattttattctttaattaatcggtatcggcatcaagatctccagctgtagtgtagtaccgtagtctgtgggccagctccaacaacccctgtgcatccctctgccatagcgcctagcgggagcaagaaacgagtgcagcttgcagccggggaaactgatgcatagtgggtggggcctgcatgttagcgagtggaaaggactgccggtggacagcttggttgcttaaacgtctgcatggctggatgtattaggagatatagcctgtgcatggtcatgtcatgtcctttatgtagggaggccattaatttatatttacacactagtttctcgaggaaatattagatcatgattgaaggtcaggcaggcccaggctcgtgtccaataaaactcaaaaaaatgatacttgaattctctcatcctccatttgaatgtggatattggagggcgatgaattaaattgatttcaataccaaattctctcatgctccatttggatgacagaagcacgtttctgctcaagaatagcagacgcaagcttcctgtcggaaatagttgtttcccccaagattagcattggtattaacttcacaaataccaacaagtttgcgaaccagtggctgttgccgctttcatctttcaagaggagctcatcggtgatcacttggcgtcacgcagtcacgcttgccgtcctgcggttgcattagcacatcgttgttaagactttacacccgagaacgttgctacgtacgtcgtctgagatgggacaataaattgggaatatgtatgtacaatgattctagctcgtaactgatttccgcaaaccctatcaaagagaaatgatagcaagcaaaatgtaaggctcgctgagctggaaggtggaagcagcatttgatgcaattggcaatctgcatgtcgtcatatggtgtgcttggaagttaagccaacgatcacgggatatacatatataatataatagtttgcactgtac

SEQ ID NO: 12850 - DNA, 436 bp, Zea Mays
tgacaacataaaatattttgaagaagaaataaattaaattcccaaaatagaatttaaaatctaaaagggaattctagaatttaggaaagagagcactagttatcatgaaatgagtattaaaaatagataaatttatccataccatgtctaggatgaatgattaatgagaaaacaaatctaccagaaagtttgaatttgaatgacatttagactttatgaatgtaaaaaaaataaaaaaaagaaaagaaagggaaaagaaaaaggagataaacctctattgggccacaaaaccaaattctagcccacccttttccttcgctcgactcaacagaacgtgtgtgacttccgcacgttggtgccgaccagtgggcctgctatgtcaatgtcaccgcaaacgctgttgcgcaggcacctgtttggtccaatggcgcgtggg

SEQ ID NO: 12851 - DNA, 390 bp, Zea Mays
gatgactaaatatatatatgtggcacacaagtcagtaacagatagcaatgctgaataagtgttccaagtactcgtcctatttgctggcctagaaaatgtaatagaacagttggaccaaggcacaagaaaggaggtacaagtatatgggtgcagcgagaaaacaggcttggggcaaaataaccacagaggtgcacagaacactggcgtttctggttatgtgctacccttcttttttttacgattttctttttttttcaaatattttttttatatttttctattttgcagcagcacataataagataacacatcaagtttcagatttttttgtgcaatgacgcgtcctctggaatttctgcaagtttgccctaaaatcggaataaatgtttg

SEQ ID NO: 12852 - DNA, 254 bp, Zea Mays
catcgtaaagaattggattataaacaacttatatattacattcaaaattataaaaattacatacattgtccagcaaatattacatttcaaatgtctttataataacagctaatcttcttttaaaactacttctgcagcttcatttaatagttgatcaacaactttatccataatagcttcggccatttttatgatttcatcatcctcctttgctttggggtccaccaatggctcgacgggctctgggagaggag

SEQ ID NO: 12853 - DNA, 1420 bp, Zea Mays
ctttttacaatcatttgtttgtatggtaatgcggactgtgggcgtcagtcggaccaaatgaaaagggacgtacacgaaagaaacaggaaacaagacaagcattgttcagtttgttgcagttcgcctgttctctagcaatcccttaagagttaagactacggtgaatcaatttgagtgatggatactacgctacacactcaacagcaggaccgcctcggaatgtgaggctccttgcataattcagttcatggtgatgtcaaggtcacgtttgttcttcttctaaattatataaactggattatgatagaaagtacgagagtaaaatattattttattatcataaataagttaaaataaggtaaccaatgctaatttactttagcttatttgtggtcttaaagtaatattttatcctcctactctttcactataatacatcacttcctcgatattaccgccaaacaccggctccaggatctcttttttcaccagcgtcagtacaccatcgacatccaggagcgggctaacatgtccgactgcaagcactgctccacgcctgtcgacactcaggcgaagctctctgaggacaacggcccccggtcaccgacgcggcgtcctactggagcctgaccggcgcgctccagtacctcaccttctccagacccggcatcgcctacacagtccagcaggtgtgcctgcatatgcacaccctatgggagccccatctcaacgctctcaagcgagtcctgcgctacctccccggctccctcgactacgacctcctacttcgaccatccccgacgtcgaagctcgtggtctacactggcgttgactgggctggctgtcccgacacaagccggtccacttctagttatgtcgtgttcctaggcgccaacctcgtctcctgcgccgccaagcgacagcccgtcatctcccgctccagcgcagaggccgagaaccgtgttgtgcccaacgacgtggtggaggcatcctggatgcgccagctactccacgagctccacagccccttcagtgcgccaccatcgtatactgcaacaacgtctgcgctgtctacctcatcacgaatctcgtgtagcatcagcgcacgaatcatgtggagattgacctgcacttcgtccgcaagtgtgtcgcttcaggtgacgttcgggttctcagcgcccccaccacgctgcagtttgtcgacatcttcactaaggggttgtcgtcgagtgtatttttagactttcgatccaatctcaacatttgtacaagatatagttgtgactgcggggggtgttagaatacccgtaaagggtttggtgctttccccgtgtaattaccctctcacccctgtataatgggcctggcccagttaactcaagtctattaatacaacacccaaccctaatccagggttagg

SEQ ID NO: 12854 - DNA, 800 bp, Zea Mays
cgaagcgacactatgcgtgtagccggtagagcggagtaactgagtgggtgggcgtttgccttggctgagggtgttgagtgtgtgtggagagggagagggtagatcggatgatcgatgaatagtaacggtaaatagtaacggtaaaaagtaacggtaaaaagtaacggtaaatagtaacggtaaaaagtaacggtaaaaagtaacggtaaatagtaacggtaaatagtaacggtaaaaagtaacggtgaaaagtaacggtaaatagtaacggtaaaaagtaacggtaaatagtaacggtaaaaagtaacggtgaatagtaacggtaaaaagtaacggtaaatagtaacggtaaatagtaacggtaaatagtgatggtgaatagttcgtatgaacgaacgatgaacgatggataggaactatgaacgaacgatgaacgatcgaatgatcgaacgaacgatcggaatttcggtagcataacggcaggaaaaagattatttggacgaacgaacggacgaacgatcgaacgatcggacgaacggacgaacgaaccatgaacgatcggacgaacgatcaaacgatcggacgaacgaacaatcggaatttcggcagcataacggcaggaaaaagattatttggacgaacgaacggacgaacgatcgaacgatcggacgaacggacgaacgaaccatgaacgatcggacgaacgaacgaacaaactaagaacagggggacgaacgatccttgtgctagtgtgtgcttgtgtggaacatggagtgggtgtgtgtgggggggagagagtt

SEQ ID NO: 12855 - DNA, 765 bp, Zea Mays
gaccattctagtctaggttagcggtcctatagttagcaaggctttgataccacttatgtcacacccggttttggaaggcaaaccgaatgcgaatcatgtacgtgccaggatcagaaactcatgtacacagtgattacataattggacatcatcacacaatgctctaaataaatagcggaaaggtactttattacatcaagatgtccaagacatccatagagtctaatacataaccattgttcaacataaatatcaaagtgcggaaatacgaaacgtagaagctaagcctacacaggtagctgactgggggtttgccactaacaaagaactagaactcgtcatagtcctaaaactcctcgaagtcatccatattgccagcatcacctcctaagaaccaagtgcaatggggacaacctggggtggggtggtttgtaaagcaagggtgagtacacatcaacgtactcagcaaatgtctcgtttggctaaagtggactagctgtatatggggttgaggtcaagcagctgcttttaggttagtcaagtatttattattattagtagagccaacttttagtaataaacccagttattacccaaaagtacttcctcaaacgaggaaataccagagatcaaattttataaccatcattcttaattatcatcataaaagtatccaaagttcttctaatcaaagaggatcccaaggctgctcttaaccgtgagctcggctgatataccaatttttaacactctgcagaggttgta

SEQ ID NO: 12856 - DNA, 437 bp, Zea Mays
ctagctcagtcggtagagtgcaatgcttttaaccttgaggttgtgggttcaagccccatggtggacgttcaatatttttttgtctttgtcactattttttttgtccatatttttcgtttatgtcgctgatttgtctgtccagatttatttttcatctagtttttttttatttttatgactgatttatttattcatctagatattttttgtttttgtttttgtttattcaaactccgtgacgcaagtaccatgcacataagtaacccaccctatggaagtcgaagtactttataaaatcatcaagtcactgtttatttacacctagtatatttatattttggactctaaaactccaataatctaatgtattcgaaattatacttttaaatattaattaaaatttatcatagctaaaccggtagccgctaaccaatgca

SEQ ID NO: 12857 - DNA, 230 bp, Zea Mays
cttgtacatgcagccgtcggaaagcccagcatggatggacatagcaactgccaagttttttgcaaggtcggttcggcctggaaatgaataaactgggcctcgttagggcatgtacagtggagaaacaccaaaacggttcttcaagcacaagagacaactaagagactctattatacaatggagtgtctataaatgtagtctactaataaatacagaattaaatgcatttg

SEQ ID NO: 12858 - DNA, 287 bp, Zea Mays
ccaagggagctccagtgattagtggtacttgatcagagatactttggtacaggtggttatgagattgatggttttggttatgactatggtgctggtaagtggtattctttccgtttggaaagggtacatcgggttaacaacttgggttaatgctaaaacttggctttctattagtaaataataatctgaccaactaaaagcagctgcttgacttatccccacatacagctagtccactacagccaaacaggatacttgctgagtatgttgatgtgtactcacccttg

SEQ ID NO: 12859 - DNA, 1196 bp, Zea Mays
aattgctagttaattttatattaatttaacattagaaaagactaacaatactcataattttatatatcacactatttaaaccctaaattaacatagttcatcacttattaattcactcaatacatatataggctttgttttgcaggtaaatgctagctcattcgagctaacgagctgactcgttaacgaaccgagctgagatgttagctcagctcatgacaaaattgaaacgagccgagccgagtcaccacgagtcaagcgagctcacggccacgagtattttgttcgagccctacgcggcactcctatgcgcaggggcgttttaccgtatgctactgctaccgatgattggtttgcgtcgtcttgtatatgagaactttactcgcacattgcaagttccatctacagatagatctttgagacagattcggccgtcgatatgcttatatccgaataatggaacagaatacaaatatccgtggtgaacttactctttgggatcacattctctaagtactcggtcgatctgcaactaccacaagcagcaaagacgaccttgtgctgctgctggtggaggatatataatccagttttcatggtctacactctacaacgacgatctcgcatggactccttgttcatgttggtctattggcacgtgtggaacgaacacggaatgccacatgcttccgaggatatcaacagctacggtgacctagcttctccaaatcatcaaggacaagggttcgtcgttggatacagtacaactcggcgcaagcgggctcagaagccttgactgggactgggatcggaggtcgtagtcgccaggttcaatggtgcactctttagctgtttattgaaaaatgcagcccttaatgtatcccgtgcggacgccacatgcacgatgttgctggtaacataaactcctttcactcgtgcgtaccaagagaaaaaaaaactaacctactagatatatatatcccatccgtcattgagactttttttttcactttagttaaagtcaaataagctttaatcatcagttttcttttttttttaaaaaaatatagctttaataggacgagatcgattgtggaagaagataacatgagaggctgttacaagtacgggtggtaatagtctaatagaccatgatcaaatgtttcttcataatttgtttaaatctttaattaatt

SEQ ID NO: 12860 - DNA, 784 bp, Zea Mays
ctcccctctcaaacgcccccgtcccccatcccctagcgtcacggtgcccgccgagagggccatcccccctcgacgtcgtcttgctttttcctagaagtggaagaaaagcttaggagccgctccagctgtaggtgattaccttgcccggttcattggttgtagcaaacaatttgagctcctcctgcagcctgttgagtttgtccagatgcccacaactcttcatccgttccctccccagcctcccctcatgccggacgtcccaattgacaccatcatcgtggtccagccgtcgttgaggtcttctgtctaaggaagtccaccataggcatcaacaactacaacacgaggagtgtaaacatgaattctagctattacgtatttgatatcagtttatggtgctgggtaattcaagatattatttggatttaatgtagtatcatatcatggtacatagaggcaacttgaatggattgtttgaccttgtgttatatacttatatacatgtttatttcagcaaataaaatgaatgatctttgacgcagccaccgatgcccatgcggccacaccaacgacaaggtcgttgacgagtgcgagcacgatattaacatggagggccccctctatcctgacgacaagcttcgccacaagttaatggaactatcccacataacttctcatggctccccaatcttcagatattgtaagtgtaatgtcacacccggctttaaggaacaaatccaagtgcatctcatacatgcgccaagaagacaacatatataataac

SEQ ID NO: 12861 - DNA, 432 bp, Zea Mays
atcatggtcaacaccattacaaaggagctctaagtgacagttctaaatctatttttactgacgttttttagaaccgtcggtattagaggccagtaaaaatcattattttacaggcgggtaaccgaggaccgcctgtggaaaatcgatttccactggcggttgagttaagaaaaccgctaatgaaaatcgatttccactagcagtcgacgtaataaatccgctagtaaaaattatttttagaaacattaaacgggtttttaaaatagcaaaaaaaatatttaaggagaggattcagcctactccaccccacccacttgtctccgtcgaagtcgcaagtcgcggcatttttcacgcgctacgcggttgttagtaatcgaattgtcgaccctaccctcgcgcgtaccctccactaccactccatctatgacatgc

SEQ ID NO: 12862 - DNA, 202 bp, Zea Mays
attttttatttttttacatacgtatttgtcatactcttacatttttttagtatagtcatactctcaaatgtattgtacatattttagttttactaaaccggttgtttaaagtattcaaatggatagagaagaggatagaaaatctctaaatatatagaggattcagttacgttctctaaatttagagaacagtaatttagag

SEQ ID NO: 12863 - DNA, 237 bp, Zea Mays
gcgcgcgcgcgcacacacacacacgacaaagaaaactaaccacacatcaccatgccgcaggcccgcaagaacatcgcaaaactaaccgctgtcaccgggcccccttgttttgcagatgtacaggacagtgaagagcacagacagatcgttgcacatagctacaggtatatatgtgtgtatatgtatccacacatagatcatggacttcgtagtcctagctatttcatgccgagcggg

SEQ ID NO: 12864 - DNA, 320 bp, Zea Mays
aaacgatgacaaacaggccaaaagcatcaagggttatgaattatctattccgttttgagagactggatgtgaggttgcctaatcttggtggttgatgctggtgggtggcagtggatagtgtacttgttaatggcgcaggcaggtttctagatctacctggcacgagcgctccagttaacctctgtactgcagatgagttcgtttttttttatgaagatatataagcagagtttgatagtagtctggtttttcctgtgagcatttaatacactccatgcataaggcatcacaactcacaagattcaaaacttacattctcg

SEQ ID NO: 12865 - DNA, 175 bp, Zea Mays
ctaggctttgtttagggtcactcacacacaacgcaacacaacacaagcagcgaagcagcggggcccaaaagaatggaagaaaagattggggctcagcctcaaaagcgtcgaaagcggggcgcggggagggtaaaggaggggggccggccgtggtcgtgcgtggctggctgccctg

SEQ ID NO: 12866 - DNA, 207 bp, Zea Mays
cgcccatacacgggcccgcaccggcgccctgctcagtgctcggcgccccgtcggccgtcgtacggagtacgcgtctctcgcctggcccatcacgtcccgtcaccgcgctgccaccctgccccaggtgtctcatcttttttgagcgctgaccaccttttttgtgtgtgccaagtgccaactgctaaggtgaccccgattagacaaaaa

SEQ ID NO: 12867 - DNA, 117 bp, Zea Mays
tatgatgtgccagagagtcttatatcatgtatgagagagtatgccataggaaaattttactaatgttcataatctcataactgctgaaatgtcagttagatcttgatgacattcaac

SEQ ID NO: 12868 - DNA, 595 bp, Zea Mays
cgagccctagggtcaggcgaggcggagcttcctatggtgcccgaggccggacttggctgctgtcagcctcactctgtcgagtggcacagcagtcggagcgacgcaggcggcgctgtcttctagtcaggccggtcagtgaagcggcgaagtgactgcggtcacttcggctctgtcgactgaagggcgcgcgtcaggataaggtgtcaggccatccttgcattaaatgctcctgcgacacggtcggtgaaagggaattaggcttacacctattttcctaattgattttggtggttgaattgcctaacacaaataattggactaactagtttgctctagttataagttatacaggtgccaaaggttcacacttagccaataaaaagaccaataattgggttcaacaaagagagcaagggataaccgaaggtagccctggtctggcgcaccggactgtccggtgtgccaccggacagtgtccggtgcaccaggggacttcacgctgaactcttcaccttcgggaaaatccagaggcgcctctctataattcaccgaactgtccggtgtacaccggacagtgtccggtgctctagacgag

SEQ ID NO: 12869 - DNA, 742 bp, Zea Mays
cccaaatcgagcacttcaactcctaagctacaaccatactcctcgcttctctaagtagagaggagtacaacaaggtgcaaggattaaagagcaccaaggaagtttgggacgtgcttgtaggaaacgggtgacgcctaagaggggggggggggtgaattaggacttctaaaactttcgctaaactaggccacaattaaatccctagagcaaaacctatgcaaatagttaaactagaatgtgcaaactaggttttgtctaagtgttgctatctctaccgcaaaggctaagtttcaatctacactagatatgtatggatacaagattgaaacttaaatgcttaatataaatgcggaaacttaaagagcaaagtagagaagcaaactctcgtggatgacgccggtatttttaccgaggtatccggaaccgtgcaaggtcccgactaatcctcgttggtgcccctacgcgaagggaagcccacgcgagggccaagcacctcggtctagtaactccgtagagagccgcgggccttctccacacgcaagtggtgctccgcttccggctcctctcagacgctccccgccgtctccactatcgagcttccggccgaaacgccgcgggcctcgttccctccggtacacggtggcggccgtgacacaaacgcggttgtcacggtctcgcaagactctcgccccactcggtacaattacaatggctcacgcaagagccaaggggttgtgaggtt

SEQ ID NO: 12870 - DNA, 550 bp, Zea Mays
attgtttcttcgtcctcggaggatgatgtgcatggctgattatcttcatcatcatcactttcttcttcttcctcttcttcgcttgaggaacttggagtgggagccttctttttgcccttcctttcatcacatgcaaaaagcatatggtcttgaggatgttggctcctctccccgactcatttttcgcgacatctcaaaagccgcaattttcccaatcacaatggtcggggtcatgttgctcaagtcctccatgttgtgaaggatggtgatgatgctcccatatctttgttgtggtagtagggaaataatcttcctcacaatgtccgcatcacctagcttattaatgccaatcgaattgagctcattgataattagattcaaacgagaatacatgtctctaacaagctcatcatctttcatagcaaaagaattataatcatttaagacaaggcaatgtttttgctcacggacattggatgtgccgtcatggagctcatgcaattttagccaaatctcattagcagtttttaagttaaatacttgattaaaa

SEQ ID NO: 12871 - DNA, 2276 bp, Zea Mays
taatagtactgacaacccccgttttcattaatgagcaaatccataagaatgcacaagcaaaccactgttttgctagcatcattgtgcagggatgagtacaacaaagtgagcagcttggataacaccaagcaaatctgggataccctcaagatctctcatgagggtaatgatgccaccatgatcaccaagatggagttggtggaaggcgagctgggaaggttcgcgatgatcagaggagaagagccaacacaaacatacaacaggctcaacaccctggtcaacaagattaagagttatgggagcacaagatggacagaccacgacgtcgtccgacttatgctaaggtcattcacggtaattgacccccatcttgttaaccttattcgtgagaatcccaggtacaccaagatgacgcccgaggagattcttggaaagattgtgagcgggcgcatgatggtgaaggaggcccgatatgtggacgacgctctaaacggtccactccccgtccacgagcctcaaactattgccctcaaggcaaccagtagcagggaggcgctaccaagcaaggtggcacaagttgaggcggctgggctaaacaaagatgagatggctctcatcatcaagcgcttcaagacagctcttaaaggacgcaaggagtaccccaacaagaacaaaacaaggggaaagcgctcctgcttcaagtgcagtaagactgatcactttattgcaaactgtcccgataatgatagtgaccagggacaagaaaagagcgggaagaaggagaagaaaaagagctataggaaggcaaagggcgaggcacatctcggaaaggaatgggactcggactgctcctcctccgactccaacgacgaaggactcgctgcctcagccttcaacaagtcttctctcttccccaacgaacgtcatacttgcctcatggcaaaggagaaaaaggtaagcgttcgagaaacccctaagtatactacttcaagtgatgatgactctagtgatgatgaagtagattataccgatttatttaagggcttagatagagcaaaggtagataagattaatgagttaattgatgccttaaatgaaaaggatagactcttagaaaagcaagaggatattttgtatgaagaacatgacaaacttgttagtgcacaaaagtctcttgttttagaaactaaaagaaatgaattgttatcctctgaattgtctatgtgccatgaatcaatctctagtttaaagattttgaatgatgattaaatgctaagctagaggtagcaaataaaccaagttcttgtgtagaacatgttgtaatttgcaatagatgcaaggattttaatgttgatgcttgtgatgaacatttaatttccatttctaaattaaatgatgaagtggcaagtcttaatgctctacttaagacttgcaaaagtgactttgataaattaaaatttgctagggatgcctacactgttggtagacacccctcaattaaggatgggcttggctttcgaaaggaagccaagaacttaacaagtcaaagggctcccattcccaacaaggagaaagggaaggctcctatgactagtagcattcaaaggaatcatgcgttcattcatgatagaaaattttctaggaatgctcattataatagaagttatgattcacatgctatgattgcttcaagttctacttttgtgcatgatagaagtaggcctaagagaaaccttgtgtctcatgtgcctagaaaaatgtgtgatgaatctgctactgttttccatgcttgcaacactacctttgtactctcatgtagaaataagaaagtggttgctaggaagttgggagccaaatgcaagggagacaagacttgcatttgggttccaaagacaattgtgactaaccttgtaggacccaacaagagttgggtacctaaaacccaagcctaatttgtcttgcaggtttatgcatccgggggctcaagctggattatcgacagcggatgcacaaaccacatgacgggggagaagaagatgttcacctcctacgtcaagaacaaagattcccaagatacaataatatttggagatgggaatcaaggcaaggtcaaaggtttgggaaaaatagccatcacaagcgagcactctatttccaatgtattcttagtagagtcgctaggctataatctcctgtctgtaagtcaattgtgccacatgggctacaattgtttgttcacaaatgtcgatgtttctgtctttataaggagtgatgat

SEQ ID NO: 12872 - DNA, 229 bp, Zea Mays
aaacaaggctcgacttgtggcaaaaggttattcccaagtcgtaggtttggattttgaggagacttttgctcctgtggctaggctagagtctatccacattttgttagcctatgccgctcaccactcttttaggttgtttcaaatggatgtgaagagcgctttcctcaacgggccaatcaaggaggaggtgtacgtggagaaaccacctggctttgaggatgaacggtac

SEQ ID NO: 12873 - DNA, 425 bp, Zea Mays
cgacgaacatgtcgaccttaacaaaggaggtatgtccgttgatcaaaaggcatacctgtctatgataggttctttactttatttatgcgctagtagaccagatattatgcttagcgtatgcatgtgtgctagatatcaatccgacccatgggaatgtcaccttgtggccgttaagcggattcttagatatttagttgctacaccttgcatcgggatctggtatccaaatgggtctacctttgacttgattggatatttagactccgattatgccgggtgcaaggttgataggaagagtacatcggggacgtgccaattcctaggaaggtccctggtgtcttggagttcaaagaaacaaactttcgttgccctatccaccactgagaccgagtatgttgccgcaggatagtgttgcgcgcaactac

SEQ ID NO: 12874 - DNA, 428 bp, Zea Mays
ccccattagccattttaaccttaaaaggttgacactccttcatcaacaaccccaaacgatccaccaattccctgttgacaaaagtggctgaacttccagaatcaatcaatatcaatagagtctgattgcccactaatgctcgcacccgcatacattctttactcgtagcaccactcatagcatgtagagacatataagaacactcttcctcttgctcctcttgttcaatctgatccaactattcctctgtcaatgtcatcccgagttcctcctttgttagtgagttcagttgcaactgcaccctcttcgaacacttcagttgatggcccagctcaaatttgtcaccacaactaaagcacagaccgttctgacgtcgatattccttcaccaaacgttctttagaaagctcagccataccggtacctccc

SEQ ID NO: 12875 - DNA, 163 bp, Zea Mays
atcatcacacagtgctcaaaatagtattaaaagggaataatagttgattacatcatacgtctgagacgtccatatagttcttacagtaaatcaaagtgcggaaaagaaacgtagataactgcggccttcacaggcagccgactgggggttgccgctaacccac

SEQ ID NO: 12876 - DNA, 57 bp, Zea Mays
gttgcagggaacaacagaggtggagcatgaccctgtgcggcgccaaggctctgcatg

SEQ ID NO: 12877 - DNA, 605 bp, Zea Mays
ggggcctggagtattttgggtcggttgttttgttgatagccgtgtctgctttttgcttgtgttggccgattcaccaatcatcggtcctttgacatatgtcgttcctattttgatgatgtctccttttatcatcctattggaggttgtagctgtatgccccctgccggattaatcggtctttgcatctgagtggtccgacaatcttgttgggtccgtgcttgtggagcagattgaggggctttcaatcggtcttgtactggaggcgtcaacctgtcaaaacagatgattgaggtgcccccaggcggggtattgtggtatcctgaatggatatggtggcgcgccccacttctgattcgggatatatggtggcgatggtatgtatgtataatgacatgaatgggtatatgtggaggtggaagtgtccacgcaggtgcgttaggttttaattgaacattatgacctcctgtcctttccgattggtgaggtggtccaatcagcataacctgttgtcgctcctaggtgggtaagcgaggtcgctttggtggccagtcactggggccgaccttctttttcacatatttagacaataattgatcaaaggttgg

SEQ ID NO: 12878 - DNA, 177 bp, Zea Mays
gcagctttcatcttcagcattcttttgcgttgtcaaagcgttgctaagaattaagccctgcaaaaagataggatcagcacgagaatacaagacaagataatctatctttaagttcgtcacttctgtaccttcagactgttgtatgcaaggctgtccgcaaggtcattctttgacatg

SEQ ID NO: 12879 - DNA, 178 bp, Zea Mays
aaattcctgaggacgcgtcattgcacaaaaaaaattgaaactttgtgtgttttcttcttatgtgctgctgcaaaagagaaaaatataaaaaaatatttgaaaaaaatcacaaaaaaagagagagaaaaaagaaaagagtagcacataaacagaaataccagtgttctgtgcacctctg

SEQ ID NO: 12880 - DNA, 291 bp, Zea Mays
gaaatatacaaatggtgaaataggcattaaataatttggaaaattaagatttggagaaaaggaaggaagaaaacaccataaaacacaaaataaatccataattaaataaattcatcccactgttgtgttcaaattgaatatttaatttgagtacaaatttttctgcgaaatttgaatttaaattctagatttgaaaataaaaaagaaaaaaaaacagaaaagaaaagaataaaacaaacctaacctaaatgggctgatcgcctcacttctggcccagctagccattccgga

SEQ ID NO: 12881 - DNA, 523 bp, Zea Mays
tcgatttgaggcattagtttgaggcattgttggagatgctctaaagagactagtagtaacgtgcatggaatgcgatggcatgttcaaagctgttgaataacgataacgtaacgtgtgccctgctggaagcttccagagctgtatccgacgtgtacagtacagcccgatttcaacgcatacggccatacaaagggagtaaaagtaaagtacagcaccggccctattggctattgcaacaccatgacctcaatgaataggcccagttctctctcaaaaaaaaaaaaaaaaaaacataccagtggccctgttgcatgcagcagcaaatccacagccatgcaatattgacctgatcacagcttataaatctttattgctgatcatctcgaccagatcacctagtgcaggctacatagagagactaataatctacaaagttaccgttatgtatatatggcctgggggcctgcaatcacgattcatatccatgctgcagataacatacctggagggcccctgcaatcac

SEQ ID NO: 12882 - DNA, 187 bp, Zea Mays
gggcgggagtggcgcgtggtttgggccgcctgggccggaaagagaggggagggaggcgggcgcgcgcgagctgggctggaagtcggcccagccgagggagggaggggtttttcttttttctttttttttctgatttctacttctctttttcttttctactttagtgtcttttgtttcttaaccaaaa

SEQ ID NO: 12883 - DNA, 121 bp, Zea Mays
gtcggtcgttgctgttgaaagggaatggattgagggtggtggggctttggagcgtgtaggcttgggatttgtggttaattggctgtgaataaaggagagattgagagggacagaggaggat

SEQ ID NO: 12884 - DNA, 169 bp, Zea Mays
ggttcctttttccgccacttagccgaagctccctcgcgcgtagcttcggcaatggttcaaccttcgttctgaccttgctttccatattgtatacaacttcctcccatgtgcgaaggttcctgcacatatattatactttgggaaacattgttagtcatgtttttgagga

SEQ ID NO: 12885 - DNA, 1555 bp, Zea Mays
gtgttagtttgagcattgttagtgtgttattgataagtcttatcatatgctttcttgcagtattatatgtgttgtatcatatggactagtgtttccgctgctatgaattaattggtttctatagtgtaatagatagtcatgtggttaatggtgctttaagattgctttaaattggtatcttagtttaaattggtatcttaatggtgaatagtggtaggttgatattcctgtgatatatccacttaagtgaatggtgtttaactctgattctgtgcatttgtgttgctttaaattggtatcttagtttaaattggtatcttaatggtgaatagtggtaggttgatattcctgtaatatatccacttaagtgaatggtgtttaactctgattctgtgcatttgtgtgttatacgcatcatggtttgatccttgacacaatgcatcccataggtgctaaggtgtagcaatgtttcgatttagcctaagtatgtgcattttggcatttaaggccaaagctaagtttttaatgcaagcacatatttagggggagcattctacaatcttagaactcaaaatttgtgctttaaatttcactcttatgtaagctttaattgtgttgccatcaatcaccaaaaagggggagattgaaagctctcttgtgggttttggtgtttggatgacaactcaattaaaggactaactagtgtgctaagtgttgaacaggtgctcaatgtaaagctaacagggttcaacacaagtgaacaagtgtgatggtccaaggactagatgatgatagataatgggcatcacaagtaagatggacattgcaaaagtgatactcgggtgcgtagcttggagacaactgatcaagccaaggacggaggcaagaagagcttcgaggtaccaagtgcacgggagaaggtcaaggaggctgaggaacccaaagccaagggtgaagaagaaggcttgcaaagtcaagggtgatcgagttgagaacaactatggcacatcaaggatcactacataaggacgtgacttacaaccaatgaggtaacagctacagttatgtggtgtaagtcataaggctcaagatcaagctctaagaaggagatcaaggtcactagaaggagaacaagtgtcaaaaccagaactagaagtagcccaaaagagctaagttcaccttgatctttagtttgggttgttcctatgtttggagatgttctatgtgacttttgcaggatgttggagctaagaaatgtcaatctagatcaagtcaagctgacttgatgatttatgagtccaacatcaaagctcaagcatgctatagatgtaataattaagagaaggtatgtttctagacttagtacattggttttgtgtactaatatacttgtctaagtgttagaaacagaaggaagaagaaaaggaaagaggtgcaaaaggcttggctgtgtacaaccaagactcagctcagtctggcacaccggactgtccggtggtgcaccggacagtgtccggtgcgccaggttgaactctggtgaacaggccgctctcgg

SEQ ID NO: 12886 - DNA, 435 bp, Zea Mays
gggggcgccgcacgtggggtgtcgcgcccgcgctgtgccgcgagaggccgcgtgctcgtgcgccggtgccgcctgcaccgtcgccgggtggccgcgcgcttgcgccgggcagccgcgcctacccggcctgcgccgagccgccgtgaggccgcatgcccaagccgccgccaggcgctaaccgccgctgctgtggaggtagtggccggttagggtttcatgtcgtccctaatgagactgcgccactgtgcttatgggctgccgtccaggcccatgtgcgcccccacccctcggcctggccaaaaatggcccgcccccagcaaaagcctgggtgcctatgactggctgtatgggcctacattttatcattttagcttttatctttctgcaatttcagacctaatgtttatttgtatcacaattactatcagttttgag

SEQ ID NO: 12887 - DNA, 346 bp, Zea Mays
gaacaagagagctgcaattggatctgattcaacgccgacacaagacacatcctcccatttcagaacggagttctcctctaccttgcaacgtacctcgcaattgctttccatcctctaggtctaggtctctgcgcgtggacatctgccattgggggagcccgcctgcgagacggagcagccagcccttctcgactgggtttcaaagctctgaccatcgactccgtagccgcctcctacacatgtgctgcctctctcgccaccgctctccattccttcctccgcacccaagcgaaaaataccgcgggaaagtaccggcgaagcacgcgcaaggatggatgaggaaaag

SEQ ID NO: 12888 - DNA, 592 bp, Zea Mays
gtatgtgaccatgttcatttcactaaatgcatcaacagtttgacagacataatataatggcatataaggaacattgatcatccagaaacacgtctcaaacatatcctgataatgagtcattacaatatttgctaagataaaatgaacgcactgtctcccggagttgatattacaaatagaaatcaaaaaaacctgaaatggattaacaagtccatgaacggagatgcatattcttcaatattctgcccacgggagtaggatctcgtggtgtccagaatggattaataagcaaacaagggagtatttgacttcacttataacctcagcttgccgccgtcgccgccaagggagtgagggcctgagggagagccggagagggtaggccgcctgcacggctgcactgccgacctggcctctggcggtctgccgtcggccgtgagcccgtgagccgtgacagcctgcactgccgcctgccagtctggcgcctggcggtctgccgcccgccgtgagcacgagacagggagtggccactggccagccgccaacgcgaccacgtgagaggagagtgaggattagagatttagggttttag

SEQ ID NO: 12889 - DNA, 322 bp, Zea Mays
ctgcgtcgccgagttggagccgaagagttgacctaaccggctgccttttctgttaactgtccgcatcagtgacctctctcgggcctcggctctcgcccaatcatccacgaagactcgaagagggggtgtatttcttgtcggcagtgaaaaaaaaggattctgtggcaggattaattcacgcaggatacgttcgtaccaattaatccgctaatttggtgaacttgtgatgacactctttgaaaaaaaaggaactaatctcgtgggaggggttttcggcattccaaacaaggatagcctgaactgacgaaagcggagggatccg

SEQ ID NO: 12890 - DNA, 1125 bp, Zea Mays
caaagtgtgaaatccacatttgtctttagaaggaaaaggtaagaataatcagagtaaagcagaaatagatgagaaaagattaagataagtttatgaaagaatcatagtagtaaaggtaaggttaatcagagtagaacaatagaaggtgagacaggatcaagataagtatagaaagaatcagagtaaggtaagtaggtaagggttttgtccatttctatctaggtttcgtcctacagtcaacattgctctgataccacttctgtaacaccccgggctttaagggacaaagccaggtgcatctcatacatgcgccaaaggagacaacatatataataacagagtgtatagagataaatgtcacaataatcagagtacttaatacatagcggaagacttacaaaaataaaagataaatataacaggatctaaaatccatccttggtgccaaaaagtcaactgggagacgccacctagatcgaatcgaactcctcgttgtggctcctcttgaaccacctgtacttctcctgtggggggtgagacaacaagggtaagctcatacatgttcatcgctcaacaagttgtggggaataatgtgcatgaactcacaaaaaatgggagttcatgtgaagtgtaaggctaatcaacaaataaaggtggaagctgagcattgcttttataagttggtcaaaattttattagcagttactaaatgtaagtgaataccaaaccataataaataatagaacaaaattaataaataaccccatgcaaatgcaaatgacaaattgaatttaggttccataatttaatcatgtgagggtccaagccgctcatgaccgtgagcatggctagtatactagttttacactctgcacaggttgcgcatctttacccacaagccgtgttacccatctgccaaggggtcatgaatcccatacacctctaccaaggaagcgaggcaggataacactacgaggcctttacaaagttccactagcttcagaaaacccgctacaatttataggaagctccagtgcaggaatccctcgcttggccgccatcgcagcaaaatcaacccaaggacctccctacactgaccactcccctactgtccttgcccctttc

SEQ ID NO: 12891 - DNA, 512 bp, Zea Mays
atggaagattgtctaaacaagcttacaccttgtaatggatcatgatccaaatgcttcttccaaaaaatagggcccttaaataattttagttcaaaaataaataggaatagagcttgatcctaacctgatttgatccttaaattttatagtgtaaaatctagagcccattaccacccctacttgcacccaaggataagagaaagtggtgtaaggctaaggctcttacaataatcaagacttaggatgatttatcaagtgaagataaatcccagcataagagacatagttagaagcatttaacttcacacttctctcacaaatgccttatggcatgaggtaacactaaaaactcatcctctagtgagagtgatagtgatgataaaaaaccctctaataaagaacttacaagccataaaattctttcaaaaagtttgtaagaaaaaaagttcaattaaaacactaaaatcaaaattagttagcttacaaaaaagtttatcaaaatttgcttgaac

SEQ ID NO: 12892 - DNA, 551 bp, Zea Mays
aattggtagcaccaactgaatctgaaccaaaatattattgtttgcagcatgaaccttattcaagtgtgtttctctgaaattgtacaaatgatccttattccttttctgaaccttattccgtatgtattgcttccgatgttccattatcttaaataacaattcatactcgcaacaatacaaccaatgacttagttgcggtaggaagaaaaaagtaaacgaaaaagcagaccaacaacatgtttggttctgctgcacctaacgatatcattcagtcaagcactacttgccacaactattcatgctatcagattattcagctcaagctatcatttagaaccaatagcatccagactccagagctattcaggctgctgcatcattcagttcatggacattacaatagtaattgaagaagctgccaacaaatacaaagcaccatatctctgcaaccatatctctgcaagacaaatcaagataatacactgttaaaaaaagttgtataagaccattaaagtatgagcatttagctaagagttgctctgtgttttttt

SEQ ID NO: 12893 - DNA, 1682 bp, Zea Mays
cttctacaaacatcagggctcttgtatcactattctagcggtttatgtttgtggcagaaccacccggattattccagcttaagtgcccaagtcgcacccttaagggcagcaacacacttaaacaggaataacctgtcagtccctcggatctagtccgataaagccacttatccaggatcgaataccactagctcacacgaaggtgaggcacagagaaatacaataaagcataataccacaaatttaataagtatcagtagtaattacattatcggagtttcagaaatagtaaccataattttaatgcaacggaaataactaacggagaaaaccgagtaacatggcgaagcctggccacgctactcctcctggtcctctcctgcggaagcagtaaccctctcaaccatatatcccggtggcagggatgaaggccaagtcacaccatcaaccaaatcaaggaggtacctgcaaaaattatgccacaagcaaggctgagtatactaatactcagctagacttacccggtgtgagggagtctactcctctacctctagaccatgcagctgtttggctgaggggtttggtttgccaaaagcactagctgagtctaaaaacaagttttagcttttcaagttctagaataataatttagactagatgagaacctatctattcatacatggtatcaaacattatatcaatcaacatctttttccagtcatctcatttccacttattactcaatgcagtacaatggatcaagcagtctcattagctgcgagaagcagacgattcgaatcgagttttatccttgcaaggtaaacctaaacacacgacatgtcagggcactccgtccccacacatgtcaaccgtccccatcgattccccgttcgcgtccaggcctcaccgccttggcatacaatgctccactgaccccggccgccgccgtgcagtggccgcacttgtacccaccatatctagaatgggagacccagtctcaggtcgcgtgagggataaagtccgcgcccggcttcaatcaggtactaggtttaccggttaccatttttcccgacatgtgtttagtacattcaaaagcttgacacaggtatccgcacgttaattcttattccaatttttgtctcatagacaacgcatccccatggatccgtgtccacagaccatcatcatgccgttatcaaaaatggatacaaccaattcctgacctcgcgcgagtgctagaaaaatcactcgacttctaccgagatcttgatttagcatagcagctactcgacctagcatactagtattcatctcaaaaggaatcctgagttcatgcaactagggtttcaaccaactcctacacttaagtgcacggtacaagcctacaaacattaagtgtagtaaaatagcatatataaacggttatgcataaaaccggggcttgcctttaatttaacacttagacagtgtttgctgggggaggtactcgcttggcgagcatccactggttaagtccatcattctttaggtcgtccaccaactgcatcttgtggttggcaccacatcacttgcacgatcatcatctctcgttcctaaatgagatgcaagatgcatatgtatgaatatgatgaaaaataccacaagatatacaaagacacagtagtgaactaacattaatttag

SEQ ID NO: 12894 - DNA, 126 bp, Zea Mays
ccgccgctgctaccgaaaagcaggttcagtgcacggggacacggccacaaccagcactcacacccgacagcgacggcggcaccacgcggcccgtataccgtacaacgccggcacctcacccagcca

SEQ ID NO: 12895 - DNA, 437 bp, Zea Mays
gtaacggtgaatagtaatggtaaaaagtaacggtaaaaagtaacggtaaatagtaacggtaaatagtaacgataaaaagtaacggtaaaaagtaacggtaaaaagtaacggtgaatagtaacggtaaaaagtaacggtaaatagtaacggtaaaagtaacggtaaatagtaacagtaaatagtgatggtgaatagtcgtatgaacgaacgatgaacgatggataggaactatgaacgaacgatgaacgatcgaatgatcgaacgaacgaacgatcgaaatttcggcagcataacggcaggaaaaagattatttggacgaacgaacggacgaacgatcgaacgatcggacgaacggacgaacgaaccatgaacgatcggacgaacgaacgatcggaatttcggcagcataacgacaggaaaaagattatttggacgaa

SEQ ID NO: 12896 - DNA, 1179 bp, Zea Mays
gttaaataagctgaattcagcatccccaacatgtgagtattcccttgatggagtgaattaatggcagccaacagatctgatttaataatatgccaacaacatttgtagaattttccagtaaacccatcaggaccaggagccttatcagcagggagagcaccaatagtgtcgcgaacctcctcctcagagaaaggtgcctccagggaactcaaatcaattgcaactctgtggcaagcagcgaggttaagagaaaacggtctctggatattagaacccaaaagaatggagaaaaaatcgtccagaacctcctgcatttgttcatggctggtgacagtcctcccatcattctccaaatgggaaataaaatttctctttttgcggaagcgagcctgtagatgaaaaaattttgtgttggcatctccatctctcaagtagtgcaaccgggaacgcaagcgtgcaactgtcctttctaaagaagcaagaacaaggcagtgctgtttcaatttctgcagcaaccatcgctcatctgaggataacggcctgctgtcctgcgccatctccaacctgtgcagcaccccacgagccagtcccagctgagaattgacatttccaaccgcactatgaccccaggactgcaacctccgcgccaatcttttaagcttcaatgacaccctctccagagggcaagaagactgaaccggttgatcccaggaagcagcaacctcctccaaaaaacccgggagtttaggccaaaaattctcaaaatgaaacctacgcctccccctaagatccgcattgagtttaagaattagaggacagtggtcagaaatttcagaggcactgctgtaaagaaaacaatcagggaaagcctcctcccaacaggtagagcaaaaaacatggtccagcttaactagggtgggaaccgcccgctgatttgaccaagtaaatcttctaccattcaagggaatctccttcaaatcgaaggagccaataaggcctctgaaattgcccaaagaagacctgttaatattagaattattcttgtcttctgacttgtaaatctgattaaaatcaccagctactatccacggacccacacaagtatttctaatatctcttaattcttggagaaaagcagatttcaaactgtcttgatgaggtccatataccccagtgaac

SEQ ID NO: 12897 - DNA, 196 bp, Zea Mays
ctgttgaacgcagcgtcgggtagaacacgacaaaaggcactggagctggggaatacatggtacatgctagaataacaaaaacatgcaccatcaattctcctccggatagaaaaggtctactgatcctgataaaatgtacagttttgtccaaaaggatcttgtttagttactgggctagtgggttttcacggttcac

SEQ ID NO: 12898 - DNA, 1286 bp, Zea Mays
cttgtccttattgtgtctattgtgcttcacaagagctctcctctctactcacttgatttcattgttctaactcttaatcaagtttgtggtgttaagtttttaagttttacaggatcacctattcaccctctctaggtgctctcactttttactgtcagtgtttcctgagtttcatgcttaaggaaaatgtagtaaagcctattggttgtgaatttcaccttcaaaccatgaactgtatgcaatgtcactatgatcatttcagctagatgcaatttaatgcttgaaactatccccaagtttgctagatggaaccttatgcttcagtcttatattgagggtagagtttatacatttcagataggagtgcttgtgcttccttcctgcattgccacattcttgctaggaaaacattgaccttggtagaccggtgctcacttcaacaaatttttaattatgcacaaagaggtacaaggtgcttgcctgttttaatatagtgtacaagagatagacgtattgcctttattgctaaagaatttcctatttttcttgtagctcatatgacaaattgatttttttagacaacacatatgttttctctggtccgtaattatccttttatatgtgtacattttaatagtatcattttgtttttgtttctttcctcccttgccaggctgctgcatactattttaacacatcgattcttgataaaattagagaatagaatattgttactagatgtttctaataaaaactgcagaagatatgatgcacgctaaatgtttttttaaacatgacagagtcacacatacttgttgcattacatcgtctatgataaatcctaggtgggtgtagagttttgtcgagtatagttgggtgatgtgtttgcaacgacgacgaggcggaggccatccgctactgcaaccaccaactacatgaaacgaaacaactcatcagtaggtaacttgttattttttcttcatatatacaagtctatgtgatggaccagtgaaaaaaaaaccatttttcattatttaatgaattgtgttgcgtgcccttctgtttaaggcatttcatcctgcttttttagacctaaaatttctaggattacttgcagaatgttttttagtcgagcgatcaagcagtaactcagcgaaattgggttttgtttgcttctaagtgtatattaagctaacctttatagttttcaaagtccaaacccagctaccttttctaaatacatgaaaataaaagtaatgttttagttgttgcatcttaagtgtaat

SEQ ID NO: 12899 - DNA, 1075 bp, Zea Mays
gaacgtgcattgttaatttctacttgatcttatctaaagataactaataagggtttgattatagtatgtgtagcagggctttgcactagcttgccaagctgatcacaaccctcttttacatgtgcttcacccaatgtgttaaaacaacacaagaaagttattttcttaaagcaaaaaaatgtaactcaatattgcagaatatactttattctctcatatatgttagggtgcactttttttttgaaaaaggagtagtagatttttttgaaaaaggagcagtagagaaggtccctactgaattagtattaaaagaaaaatagtagttcagaagctgtacagaggaagacaaaaaaaggaaggagacaacaggattacagacctttaagccttgaagtgaaagccaaagaggaataacaagatcaaatttacagttttccctaggcataactataggagcagctcatgctttagatgctgtcgacaaccttcgatagttgggtttgttttcaaatatccaagaatttctgtatttccagatgcttcacatctttagaataagaatttccatagtgtaggcaatctagagctgccctctagatatagctctgaggtgacgattggtgcggggaggtgagagacgaatggagttccaacaatatgttagggcgcgtttacattggcaaacgttttattcaagtcttaaacatgtgtttgtttgcttatttctatattgcttccaaatatgctttcttcaagatggatttagataattggcaaaacgagaagtgtacatgggtcatttatgcctattctgaaatgcataaattaaatattaagatgccaatacagaaaacaaatgcaatgttggttgttgggaaaggaatagagtgtgcatatgcagttgcaatataaatatttttaccaactataaaaacaatccaaatagcacgcaaacaaagtagtatatgcagaaacttcttactttttatatttgtcattaaaatgcactaggttcataaataaaatgatgtaactgcacatatcctttatatctgtactaatgggtatactggag

SEQ ID NO: 12900 - DNA, 353 bp, Zea Mays
cttatatttggtaatatcgaattaaatgttatagttgatattgatttagcgtaaacacgatatcttcccgaccgtagcttcgagttcgataattcttttttcctcgcgtgaccgtagtaacgcactctatttcgttttgcatattttattatgttcttattttaatggtgtaatgttcttatgcatatatatgtttgtttgtacctgtttgtattcgttgtgcgtcgcgaatagattgcgatccgtttccgagctttgagggatcaaagatcaagagttggcgaccaagtgatccggttcttcgagttctacgagattgaagacccaaagcatctgtttggtgaaggcaagtg

SEQ ID NO: 12901 - DNA, 169 bp, Zea Mays
aataagtccttaaaacggtcaatgttactctaggtcagcggtcctatagtcagcctggctttgataccacttatgtcacacccggttttggaaggtaaaccgaatgcgaaccatgtacgtgccaggatcagaaattcacgtacacagcgattacataaatgactcatca

SEQ ID NO: 12902 - DNA, 1121 bp, Zea Mays
gatggagctaaagcaaggatcatagttacaagggagaaaatgcaaccaagggcagggtaggtaaacaccattctcaaatcgagatgggaaaggtgatgtttcaaaaggtaggcataggagaagcatcatggaaagatctagatattaggaaggtaagggcgacatcaaacaaaagctaagacttgcaacgcgacataggaatagggaacgaacaagagcggggaggggtatgacaacactcttgaaatgaaatgggggaggcggctttaaaatgcaggtacatgacaagcatcaaagtaatgatcgaaggatgacatgggttaaggtgataacggacaaacacacaacaaatgatgtatatagaaaaaaaacctgtgaggcatcaaagaagggaaagcaatcaatggtgaagtgggtgaggtattatcctccgacagcgatgaaaaagaggtggctttaaagggtaggttcaagataagcatgtgggcaagggcataggtaccacgagggtttaaaggtgataacgggcaaggatgtaggagaggaggtaaatgtgcataagaaccaagaatataaataccacaaaggatggagttaagacaagacatgcgaatggaaaaggagagggtacgtccaggggccagataggtaaattgccactctccaattgaggtggaagagaggagattttaaagagccagcataaagatgagtatcaaggcaagatcgatggatgacaaggagatggtgatagcaaataaaacacatagcaaaggatggaattaaggcaaaactcgtaaggcgacaagaagtgaaaagaaatcaagggagagataggtaacccacaactctcaaactgggctgaaggaaaggggaggcttttaaaagataagctcgaggtaagcatttaggtagaagacatagatatcgcaagggtcaaaggcgataacagacaagggtatatgagaaaagatgaaggcataaaagagccagtggtatgagtacaacaaagaatggagttaagataagactcacacctagcgaagacgaggttccgaccaagggcaggataagtaaaacacttccctcgaattgagatgagagagggaactttaaataac

SEQ ID NO: 12903 - DNA, 164 bp, Zea Mays
cccctcccggggggcaagatttattcatcgaattgatctcttaatttctataggactcgccgactctacgacgtctgaggatgccccaggtctagattccagcgaggaggaagacgaccctgcgccatcgtgaaacgttcgaccttgtgtgtggaccgtccggt

SEQ ID NO: 12904 - DNA, 347 bp, Zea Mays
gcgacacctgccgcgcccgccccctgccctaattaacaaccccccgtggtcgctatttcgtcgtcaccgaacgcgaggagaaagattagcgggaagacctgtaaaaaaataaaaaaaactggagggttttttttggggccaaggaacaatcagtgaacatgccctgctgcctgctgggctgctaatagcacctcacctaccgcctttatttccttttggcctgcttcccaaattcttatttatttatttatttatttattttgtatatctgctttgtgtttcctgcttgttagttagcgggtacctttcgtctcttttggcactccctttcgtgtttccagacccgc

SEQ ID NO: 12905 - DNA, 45 bp, Zea Mays
gcgactagcaaagaaacagaggggagggagagggacagcggcggg

SEQ ID NO: 12906 - DNA, 512 bp, Zea Mays
ccgcgtctgaatttaatgtgctgccacgtacgataagacaggggttgttcttcgccaagtgcatctgaggaaggaactaatcaatatatatatagtctcgaaagccctcttgatgacagtataaattgagtgattagccaagactaggcaaacggttcacgtaaaggcctgatggagctttattacactgtgcctatatgtgtgtgtgtatgtttttttttttttttgccataagctgcacgttaggtatttgggaaattggtaaggttgctcaattatggcgtacaagctttagccctaattacgttattgtccacacgctgacgcacacgtatatgcatatatatggcactcgacgactatagtttttttttaatctttccttccagccttcaccacatgtcttgaacagaacaataccacgattcaattgcttcgtgttcctctaaccaaggcagtcccttcgaacagattgcaagcctctccacaagacctcttaccaaggaccaaat

SEQ ID NO: 12907 - DNA, 758 bp, Zea Mays
ggtgaatgactggatctagagtataacggtacaagaagagatacaattatacaataaccaaccaagcaagatgtcctaaataactaaataagcattacgacaagcaaaaacaccatattgaacacaaaacatactgtaatacatggggatctagagtataaaaatacgggaaacacgcaataaagcttacaatcagcgtaatgagagaataggggaggggtatgcctaactatggaggtagtcggatcctccgagagtaggcattcaagagaagagagggaacgaaggatctacacaagaacagaagtgaatcgaagtcagcatattccaaaaggcatgaaattgataaaattagaggagagggatgtgccaaatcaccgacacagagtctagtagcaatagctacttaagtcgatgcaccagtaaggagcacaagtgagggggacatgatggataggagaggagataacaatgagaagagggtgtggagtggtgaggagaggcgcgagccacatcgtcgagtgcgggaggggaaccctagtgagatgcatggttatatgccctggtcgcgcgggagctgagttaggccaggcttgggagcgctctcattttcgaccattgttcccaagcctggctagagggaggggttgcacatgttcagctgaaagggaaatgtgcccttgggccatttctaagtattttggtgattgagtgccaacacaagtgcttaaatgtgaagttatgctcatggatggaca

SEQ ID NO: 12908 - DNA, 485 bp, Zea Mays
ttcaagtttcacaggatcacctattcacccccctctaggtgctctcatcagcataatccaaagattgacctaaacaaccaaacggggtggggtggccagtcggtcaaggagtgtgcatcactagtctagaagctcgcgctgccagccaacgagggcacacactattgacctcacggtcatggtccgaccagcgatggtgcgggcacgagtagacaacgagggaggggctcgccatgggaggagatgtcatggtgaagaaagcgacgctagaagagagaagatgtgtgacgggagaagaagagaggtggaaaaattagaaagaattggactgtaatcgatggtagtggtcgataacttttctcaactctatcaaacttatgttgttggagcttccattgagaagcttcaccaagagagtggatctagcctttagatcccccattttggtaaatataaatttagtggatctagatcgtttgacaaag

SEQ ID NO: 12909 - DNA, 459 bp, Zea Mays
gttagatttcagcttttgaccagtcaaacgaaaagttaacttcctacaacctgctctaggaagttaattaacttcctaaagtacaagtacaacctctagaaagttaagtaacttcctacagctttactctaggaaattatatttttttatcttaaacccctactcaatcttatcctcttctcattcttctttctccctcccgtgtcttccaccacgaccgaagccacgcgccgccgcacgcctccgccggcacgtccccccgcccgcccccgccgctcccgccgtctgtccgcttcttccgtccgtccgcttctctctccctccctcccccaccccgcgagaccgccggcgaatttgttgcagtgcactgaagccaaccgctgcgggacaggaggaggaggaggagctgtttcaacaattatcccccgtgcgcccaggccagccccgcccccgcccact

SEQ ID NO: 12910 - DNA, 1316 bp, Zea Mays
atcacaccacttgaaaattctccaatgtgaaagatacttggtttgtgatgttttatcattttgatatttgcactttggtccaaaagtgcctaaaatttgcatttaaccccctagggttctaattagggttttctagggtttgtttttagggtttggcacattagggtttttgtgccactaaagttcatcatatttgatatcttgtgaacatttctcatggcttaggaaattcttactcatgttgggcttactactaccctcatgccctaatcccagggttaagtaccctaccctagggttgatcacacacatcaagtcacctgatcacaacttcttttgaaatttttacctagtgaatgcattgtaggtgtgacaaacaacatgaaatgtcaatgcacatgatgttatgctcaaattttagtgcaagtaacaccaggggtgttacagtcttgctcccagatttgcatttggatttgatgttggggatattctgggacgagctggcttcagcctacgcataggacgttgaattacaccatcatatgcattagaactgttgaacgcctctgaggctaacacccttcaactattttgcagaactcagtttcaagctttttgattactccggggttgatcggggggctccacacatggagcaacatctggacgacgtagcagaatgctttcgtgaatccttgagcttcttatcacctcagtgtctactaaagcaactcctttcttcttgttttgaggtacagaacattccacataaggagcaacatagacagaagggcaactttttaggattgtgagaggtactaaatctatgttggagtccatgagggctagtgggcatccgaacaaaggaactttttggcccactcaaaggtaccaggagccatcagcctctgaataaagaactctgcccatacttttggaattaacaccttgctgtcattgtcagctcctaaaaaagaattggtccatgcatataacattttgctggtcatgtgctcattataaatacgaccatgcatatcccaagaggaaggtccttgtccttgcatgcatgctgcattcaactgtccctccatattgaactctccattaacatgaccattaaattcttgttcttggccatcttcattttgcacttggttgtttactgcttgctcttgaaaattgtcatcctacacctgggcaccaaccacttgatcttgcaagagacccaactggtctaccacaggcaaagacaagacatctagcagttgaatatcctgctctaacaacatgttgacatcctcctcataagcaat

SEQ ID NO: 12911 - DNA, 578 bp, Zea Mays
aagctaatgggtacagacacaagacaatcttatactgggacttgatcaacttggtgtttgggaaagatcatgcaaatggtgaagcggcaaagaccccaactaatggtgcgagagatatgagtaaggaagagggaaccagtaaagatcttacttcatcaacaacctcaggaagcttgaagaagcagcggtctagtgattccttcacctcaatgatggcagagaaattagacaagttcactgaagctattagggatgaagcaccaaaagggccaacatcaaaagaaatttttagcacattggaggagatagatgggttagatgaagacacatttttagacttgtttgatatcttaacaggtgatgcacgcaagtatgagtccttattggcacttccagtgatcctgaggaagagatggctgttgaagcaacttaaaaagtgaaccgagttgtggttgggtgaattgaactgttgttgggtgtgttgatgttgctgtcttagtttatgttgggtgaattgaacatcacattgagtggcaagtaatgtgttccaatgatatgtagacatttgagacaaatct

SEQ ID NO: 12912 - DNA, 1017 bp, Zea Mays
cgttgccatgccaatgcctgtactgttcgatctacgggcaaatcatccctgctaccggagtgtctcttactcttctctctagctagcatgcatggccatcaaacacccaaattactgctgctagtggctatgatctagcattatattaattgttggttcagtactgctgcacagacagactgtgtctgtgttcataaaaatcaaggatttctttttttttttttgaaaggaagcggcaaaagacttgcctcttcattgtattagattaagaagaataagataatccacaggaccgaagacacaccgaaaaaagagaaaaatacaaaaaaacacaaaaaaaaaccaccatccactgatctatctaagatacactaaaaaaactagtctcaacttgatctttcaccaattgtgtaacttggatcgtagatctctgttgtccctggaaaattctattatttctttccaaccatatattccaccagaagcagataagaagcccatcgaaattcttctttgactctttgcagcaacgactccttaatctcttccaccaatcgtacaacgatccggagctagaaatgccacgtaggaaggatttctgtttctagtgaagaggcatgcacgcatagtggagcatcagaaggataggtcttggccccccggcccatgcgttgtggccaatcgagtgaagcgtgcaggggtgttccctaatgctcccctaattctatagagactgttagtttttttagctaattcttatgtaaacgatgtaaaaaatacttctaacagcaccccttaatctcaaatcctggcttcgccctcggaagcgtgtggtctgacgaccagcccctatatatgctgggtggtatatggctgccaaggtctctccagtgatatacatgacatacacccgcgagttattaccgaggaggggtttttttttggcgtgtttggattgaagctaacaagcaccagagttccccgctgatacactagataaactatactctggggacc

SEQ ID NO: 12913 - DNA, 384 bp, Zea Mays
ccaagtttttaacccaatgtaccctttccaaacagaaagaataccacttaccattaccataatcataatcaaaaccatcatcctcatcaccacctgcaaaccaaccatctctgatcaaagtatctctaatcaatggagctcccttggccgctcataaccgcaagtacgactgatattatagtttcataacactctgcagaggttgcgcactttacgcataagccgtgattccctcttgcctcgggcctatcaaacccttatacactaccaaggtgaataggcaaggtctcactacgtagctgtcggtaccctaaaataggggtaccccttactattgtatgaagacgtagtacccacgcggctatctttggtcgcgtggtaaag

SEQ ID NO: 12914 - DNA, 206 bp, Zea Mays
gtgggtgtttgccttggctgagggtgttgagtgtgtgtggagagggagagggtagctgggtgtatttatagctgggtgtatgtggtgtagcatagtgaagttcactgttggtgagaatagtgacgaatgaatcgtctgacttagtctgaacagagagattataggcagaatatgggataagagtattttatgatttttctagatta

SEQ ID NO: 12915 - DNA, 1035 bp, Zea Mays
gtcaagtttttttgtattgtattattctcctccaatatggtatagatctagggttttctctctcccctctcccctcccctgcgccgccgcccccagtgggctgccgtggccggcgccgcctgccatggccgacgagatcccctcctccttcccacctctctcgcgctcctcctttccccttccagccaccacgcctgccaggacgcacggcgactagggccccgcccttgcccatcggccccctcccatcacagccgtaggtgcgggccccgctgccatcgcggctgcaggcgcgcggctccaggcgcgcggctccaggcgcgggggggtctcctgcggggctgccgggcgtgtggggaggcctctggccaggtgtcaggggtgcccctggccgtgggccctgtttccttggctttgactaagggtgctctaggggcacctgcgtcgtccctgccgtcgccgtccgtcacgttgactgacactcttgaagcaactcctgatggggtgccgatctccctcgggttccctccaccactcgggcctcacgagactggatccacagcttcagaccctccccctccggcgactatgtccgtggcgcattccaccctcgtcgttgttgtcgctgctgcccattcgtccatggccatcgctcaggcacgtgagcgggttgcggctctcgcttgggagtaggagcgtgtttctacgaaggctctcgctcgccagctagccgaggtcgagctccttcttggtggtcctccgctcgagcccgccaccgatgagggtccctgactatgtggcttcggtggtcgccaagctccacgcccaggccgccggtgtccagaacatccggtccctggtgcctgtcgtccccgacaccacctcatctgcctacgctcgctggtgggatttggtccccctcaccctgtagcgctacgcactcgacaaccatgttctcactaaccgccccacgcctcgcctctcctggttccggatggacagtgtcgtcctctcctggatcctcgagactctcac

SEQ ID NO: 12916 - DNA, 2615 bp, Zea Mays
gcattagatacaagaactttgggtacccaaacacaagtcttggaatccttgtgtttgcccccaacaaatttggcaactactttgccggatttgctagtaagcacataagatgcatcaaaagttttaaatgaaatggcatgatcatttgatgcattaggaattttcttcttaggcaacttagcatgggttggttgcctagaactagatgtctcacccttatacataaaagcatgattagggccagagtgagacttcctagaatgaatcttactaattttgttctcaggatagcctgcagggtataaaatgtaaccctcgttatcctgaggcatgggagctttgcccttaacaaagttagacaagttcttaggaggggcattaagtttgtcattgtctcccctttggaagccaatgccatccttgatgccagggcgtctcccattataaagcatgctacgagcaaatttaaatttctcattttctaagttgtgctcggcaattttagcatctagtttagctatatgatcattttgttttttaattaaggctaggtgatcatggatagcatcaacattaatatctctacatctagtgcaaatagaaacatgctcaacattagatgtagagggtttgcaagatctaagttctacaaccttagcatgcaacatttcattcttagttctaaggtcggaaatagtagcattgcaaacatcaaaatttttagccttagcaattaaattttcattctctaatctaaggctagcaagagatgcattcaattcatcaatcttagcaagcaagtcaacgttatcatctctaagattgggaattgaaacattacaaacatgtgaatcaaccttagcatttaaaatagcattttcatttctaaggttgtcaatcatctcacggcaagtgcttagctcactagacaatttttcacatttttcaacttgtagagcgtaagcatttttaaccttaacatgtttcttattctccttgattaggaagtcctcttgggagtccaagagatcatccttttcatggatggcactaattagttcatttaatttttccttttgttccatgttaaggttagcaaagagaatgcgcaagttatcctcctcatttttatcatcatcctcatcactagatgtttcatatttagtggaggaccttgattttaccttctttttgccgtccttggccatgagacacttgtggccgacgttggggaagagaaggcctttggtgacggcgatgttggcggcgtcctcgtcgtcggaggagtcgcttgagctttcgtcggagtcccactcccgacaaacatgggcatcgccgcccttcttcttgtaatacttcttcttctcctttcttcttcccttcttgtcgtcgcccctgtcactgtcactagacataggacattttgcaataaagtgaccgggcttaccacacttgtagcaaaccttcttggaacgaggtttgtagtccttccccttccgttgcttgaggatttgcctaaagcttttgatgattagggccatctcctcgttgtcgagcttggaggcgtcaattggttgtctacttgtagactcctccttcttctcctccgttgccttgaaggccaccggttgcgcctcggaggtggaaggctcgtcaagctcgttgatcttcttggagcccttaatcatgcattcaaaactcacaaaattcccgataacttcctcgggggtcattagtggatatctaggattcccacgaattaattgtacttgagtggggttaaggaaaataagagctcttagaataaccttaaccacttcgtggtcatcccattttgtgctcccgaggttgcgcacttggttcaacaaggtcttgagccggttgtacatgtcttgtggctcctccccttggcgaagacggaagcgaccgagctccccctcgatcgtttcccgcttggtgatcttggtgagttcatcaccttcgtgcgccgtcttgagaagatcccaaatctctttggcgttcttcaacccttgtactttgttgtattcctccttgcttagggaggcaaggaggatggttgcggcttgggagttgaagtgctcgatttgggccacttcgtctgtgtcatagtcctcatcccctatagatggtacctgtacaccatactcaacaacatcccatatactcttgtggagagaggttagatgaaatcgcattaaattactccacatagcataatcttcaccattaaaagttggtggtttacctaatgggacggaaagtagaggtgtatgtttaggaacacgaggatagcgtaggggaatcttactatacttcttacgctcttggcgtttagaagtgacggacgccgcgtcggagccggaggtagatgtcgatgaagtgtcggtttcgtagtagaccaccttcctcatcctcttgtgcttgtccccactccgatgcagcttgtgagaagaagatttttccttcttctccttgtggtgagaagaggaagatcttttctccttccgtttggaggagttcttcttcttctcccttttcttggtgcgggactcttccgatgaggtgctcccttggcttgtagtgggcttgtcgcc

SEQ ID NO: 12917 - DNA, 284 bp, Zea Mays
gtgaacactggacctgttagagttcaacagtaggcttctggttccaatggctatatgacatggcaacacacgtggcaaggtctggtggtgcaccggaccggtccggtgccaccgacaagatagctttccgtcagatcagtcactgggaacaatagtctaacagaggtcccatggcacaccggatcacttttgttcaaggtccgatgcacatgtgatattgctattcatgtctaatggctatttgggtgttgggggctataaatacacctccaaccagcccattc

SEQ ID NO: 12918 - DNA, 134 bp, Zea Mays
cttgtttctgatcccctgaagaacgcaaagaaataaggcaacacagatagattagtttttcacttctctctttaattaactcttcttcgaagagattaattaaaggaagaagatgaaatggagaaataaaaaac

SEQ ID NO: 12919 - DNA, 398 bp, Zea Mays
cgcaagtggtgcttcgctttcggcctcctctcggatgctctctgtcgtcttcgctatcgagcttttagccgaaacatcgtgggcctcgttccctccagtacacggtggcggccacaccacaatgcggttggtgtggtcttgcaagaagtcgccccactcggtacaagttacaacggctcgcgtaagagccaaggggtttgtgggttgtctaacctcactcaatcaactaggactaaacctagagcaagtgcaatagcagtctaactaacctaagcacttcacaaagcactaggctaatcaccgagtgattctattaagcaattgggtgtatggagcaatggatatgtgtatcactttaatagcaatgttgctcaactctccacaccctcaaatagctg

SEQ ID NO: 12920 - DNA, 588 bp, Zea Mays
taatttcacacttggttcgctagggacttgagcctgttgtacatttcctgtggtccttctcccctcttcatagcgaacctcccaagttcactttcgatgagctccatcttggtgaccttggtcatgatgttgccttcatgtgcaatcttcaatgtgtcccaaatctcttttgcattttccaagccatttgccttgttgtattcttccctgcatagagaagctagcaaaatagtggtagcttgggaatttctatgaattaattcttctacctctacatcattataattttcatcatcaacacccattatttgcattccattttctagggtggagagaaaattcgccatcaaagtgagtaggtttgccaagaggaatagaaagcaattgggcatttgaattgcgagaaatatgagagtggttaaatggagtgcgattgaatttagatttaatcgatttttgttgatgatgttttgaagtggtttcctctttgcccgaaggagatgacgatgtagaagggttcgtctcgtagtagatgatcttcttgatgcgcttttccttggcatccttctttgggtgtgaagaattgac

SEQ ID NO: 12921 - DNA, 337 bp, Zea Mays
gtcttaggtctgtccagttggcgttttctgttagttttccaatggatccttccaaaatacttttctggaatatgagaggacttaactcttcgatcaggcaagatgctgtgagaatgctggttgattctgctaaaattgatgttgtatgctgtcaagagactaaaatgcaatctatttctagaagagatatactatccatgcttggtgtcgaattcacagaatttgtgttcctgccttcgataggaaacagtgggggcatactagtggcttggaagaggaatattggtcatactggactccagagaattgataatcattgtgtttcagtacagttctg

SEQ ID NO: 12922 - DNA, 262 bp, Zea Mays
cagaggtatcataagacgggtcaataatgtgaagagaggtagagggcggccaaacttgacatgggaggaggcaatcaaaagggacttgaaggaatggaatatcccaaaggaattgtgtttggatagaagtgcttggaaagaagctatccacgtgcccgaatcgtgattaggccttttcccttttagtgctctcaaaagcttttcccctccccgttctctctctttctctttttggtgacttcttgttgggtttcaactctag

SEQ ID NO: 12923 - DNA, 533 bp, Zea Mays
gatagatttcagaatgctggaactctggagaggtaaatcagcccaagacttcgagggatccgttttttccaaccacggccatctaacccgaagggcccaattcagcttttgtaaatctgagatgccaagcccaccaagctcctttgggcgtgtcactttgccccaagcgactaagcagtggccaccgagcacatccttacgtcctttccaaagaaagccacgtctaatcttgtcaatggctttgatagcccacttaggtaaatccaatgccatggcgtggtatataactgttgccgtgagcacatgttgcacctggatggctctgccagctcgagtcatcaggtcggccttccaattaggtaagaggtctgcaagcctatcgattagcggttgcagctgctccttgcttagcttcctgagggaaagaggcagcccgagatatttaagaggaagtgtttcaactttgcaaggaaaaatctgggttaccatttccatgtctaccggagagcagtgaatgggagccacactgcttt

SEQ ID NO: 12924 - DNA, 190 bp, Zea Mays
gaacagaggagggcgcgggtgggtccaggggtggcggcggctagcaggagaggagggcgcgaccagctcctagggttagggggtgcggctgggaggatgggcccctagtgggccgaatgtggttaggttaggttttggtttcttttgtttttttcttttttttcatatacaagttcctttctaaaaaaat

SEQ ID NO: 12925 - DNA, 126 bp, Zea Mays
ccccctgcccatcttctcctctctcaattcttgcagccaccaaaccctagcccccccaatcccctcctcccaaggtgccaatccttgccgctcggatcatcgtcacgtggtgcgagtcttcaatcg

SEQ ID NO: 12926 - DNA, 1380 bp, Zea Mays
ccttgttatgctagttttcaaaggaggtgctgccggatttttgctatatattctttctttattacttctcttgtgtgagtaattttgttgggtggggtttgtggtattatccattgtgtgtgaccagtggggtgttacagatcaggctcaagataatgaagatgaagatcaagaggatgagccacctcaagaggaggacatagatcaagggggagatgaagatgatcaagacaaggaagatgatcaagaaataagggatcaaagaccgccacacccaagagtccaccaagcgattcaaagagatcaccccgtcaactccattcttggtgacattcataagggggtaaccactagatctcgagttgcatatttttgtgaacattactcgtttgtgtcctccattgagccatacagggtggaggatgcactaagagatccggattgcgtggtgtctatgcatgaggagctcaacaacttcacgagaaatgaggtatggcatttagttccacgtcctaatcaatatgttgtaggaaccaagtgggtattccgcaacaagcaagatgagcatggtgtggtgacaaggaacaaagcccgacttgtggccaaaggttattcacaagtcgaaggtttggactttgatgaaacttatgcacccgtagctaggcttgagtcaattcgcatattacttgcctatgctagttaccatggcttcaagctttatcaaatggacgtgaaaagtgccttcctcaatggacctatcaaggaagaggtctatgttgagcaacctcctggctttgaagatagtgagtaccctaaccatgtgtataagctctcaaaggcgctttatgggctcaagcaagccccaagagcatggtatgaatgcctgcgagatttccttatcattaatggcttcaaagttggtaaagctgatcctactcttttcactaaaactattgcaaaagacttgtttatatgccaaatttatgttgatgatattatatttgggtctactaacaagtcaacttgtgaagagtttagtaggataatgatccagaaattcgagatgtctattattgggggtctgcttcgtcgctgaaggtcctgtgagaagaaacaccttcgaaagatcaaaacagaagcggtgcctcttggggacttgttctcaaatgctatgaattaagaacaaggcaacataaaatgttaaatgttaaagcccttcgtccatcaaagcattatctccccaaaggtataatgatcttcggacgaaggtcttggacgaaggtcatgaagggtgtactttcatgactagggttatgaaatagtaaaagataaaacatataagacatgaaagaatgatatatcaaagcacttaaatttatt

SEQ ID NO: 12927 - DNA, 1740 bp, Zea Mays
gatatagtagtcgtcgaacgcgcgcgacatgacgagtaccaataactcttggttgggctgccaaacgaagtgcaccccgggctcatcagcgaggtagtaccgatggtcgttgcaccaccagatgcgctactccactacatacatcatgttcgaggacactcacacaacgtcagcaacgtccatcgtcccagcgcacaagaattcatgtccggtccgtagcgacttacgtgataggttgggcttcaggtggacgatgagttgtacggcgtgacggcgtcgtcgtcggatgcggtgtccagaacaacccgagagtcgtcgaagttggcgacaaccatgagacccccctgcttaatgatggacaacgcggtgcagctgctctggaccgcgtccaagcggcggcttcgcgggagcttgtcgtacacagcgacgcatgcgaccacgtaggactgcttctagaggtcgaactgacagtcgccaagcttcttctcgtcatcgatgagcgacgccaacgcgagtgcctcctgctcatggtgtttgttcggggtttcaagtaagaaacatggattcatgcttggccttggtttatgaaaatgactcacaagtctgatctatggcgaacatattacgaagaataaatgtcatgcatgcaaaaaagggaatttaagtataaaacattattcaaacaaaagaaattgcatgcaaagctcttcgttaaataatattacctccatccaaaaatataattcaagaatctcggtgatacttatctactactacgtattgtgcaagagtagcaagtgagcttgatgagagatgtagtagatgtgtttcctgtcatagatgtagacataaacacacatgcggtgtagcggtagctactcttggcctttgcttgagagatcacgagttcaaatccccttgatgtgtgtttttttaattttagctagacgtgggtcgtacgggggcatgagaatgagaatggactttgcggggaggaggaatgagaaagacagaacaaagaatggaaatgacagaacatagaatgatggcagaacatgggaatgagaaacgcagaataacgcagaataaagaatgagaatggtggtagaacgggaatgacagaacaggaatgttggcagaacacggaatgacagattactcttacagacttaacaagtagtagagataagtagtagagattatgtctgttctagcttcctttgtgctatagcgtaatcggtaaccttaagcctttggtgttattatttgtctgttctagattcccattgtgctatggtgttatcagttctgtgttcttacctcgtggtgggtgttcgtctaagactggaccgctctgtatcatgtgtttaatgcaaaattatttccaagtagagcgcactgttgactgcaggtcattataggttatatatactggaggtcattgtgggtagctggctagcagccaactaaattaatcccatcagtgaaaagaaattgcatttccatagcgcagaaagttggctgtactgactactgaagcagtagtgcaaatgggcacatgaaaggttatcatgttaaatatcaaaattatcgaggactttgtgtgccaccttgctgcatgtaggttaagggcatttattttgtgcttgttgctattatggttgggagtttgtatgtgaaaactgaaagcacaagttggagttggattacaaaataaatgatgaaaacattgaaccttac

SEQ ID NO: 12928 - DNA, 764 bp, Zea Mays
atgttgagcgaattgaactaccaaattttcgttagtttccaatgttccctactgttcaactgttagttgcctcttgcatcacttaacatgacatatctgatcaattttctagaaaaaatattacattgaagttttttttgcaatgcattgtgattttgtttctgttttgagtacatctatttgattatgttatacttgatacagtgagatccatgcaattaaattatttgtatgattctaaacagaaaaggatgaaaaacagaattctttggaactattgttaagacggattgaagggctacaatatggtaatcccaaattccacttcagattactgattttaatcaaccttctctgaaatagttcaagaagattatgtcttgttcaagcggcaaaaggtaatttcttgactgcaggaaatatgaagttgtttaaagcgctggtttgcttgtataatgtatatctgacagacttttgtctatatgatgatttgaactgatataccttgcaatggtttttttttcttgaatatatcttatgatggctcaatttagtacttcctgcgttccaaatatggttcactttttttgaatgaaattatagttcactttggctttgtcctaagtcaaacttcttcagctttgaccaagtttatagaaaactcaccgacagttagaagttagaacatcaaattagtttcattattttttctatgaaatctgttttgatggagcatttatttgaacttgtagatgctaataatc

SEQ ID NO: 12929 - DNA, 3835 bp, Zea Mays
cagcttttcttttgcgcagccaccctctggcttgccgttaatttctttcccgtttcactcctcgcgtttttacacttggcccccaatccaatccccgccaggccgccatgccgacgccggtgcccgccgcgcgccagtgcctctccccgcccgccgtcacggccctcgacgccgccgtcgcctccgcgcgccgacgggcccacgcgcagaccacctcccttcacctcatcgcctcgctcctcgcccccaccgccgcgccgctgctccgcgacgcgctcgcccgcgcccgcagcgccgcctactccccgcgcctccagctcaaggcgctcgacctctgcttcgccgtctccctcgaccgcctcccgtccacccccacctccgcctccacccccacctcacacgagccccccgtcgccaactccctcatggccgccatcaagcgctcgcaggccaaccagcgccggaacccggacacgttccacttctatcaccatcaggcggcgcccacctcccccaacgccatcaaggtcgacctctcccaccttgtcctcgccatcctcgacgacccgctcgtcagccgcgtcttcgccgacgcgggattccgcagcaacgagatcaaggtcgccatcctccgccccgcgccgcccgtcccgctgctcggccgcctccccacgcgcgcgcgcccgccgccgctcttcctctgcagctttgccgccgcggacgacgccgacgtcccctcgcccgcgcccgccctcgcgggggccgcaccgggggaggacaactgccgccgcatcaccgacatcctcgcccgcggacgcaaccccatgctcgtcggcgtcggggccgcctccgcagccgcagatttcgccaaggcgtccccgtaccgcatcgtccccatcggccccgcctctgccaataatcaggcggcaccgacgacgcccacctctggccttatcttcagcatcggtgatctcaaggacctggtgcccgacgaggccgacctgcaggacgcggctcgccgggtggtggcggaggtcacgcgcctgctcgagacgcacagacctgctgcccgccaaacccaaacggtctgggtcatgggctggtccgccacctacgagacctacctcgccttcctttccaagttcccactcgtcgacaaggactgggaactccagctgctgccgatcaccgccgtgcgcgacgccggccctgcagcgggactcgtgcctcctcctccagctccagccaccacggtcgctgccttgtccatgcctgccactacaagcttcgcggagtcatttgttccttttggaggtcttttgtgcgatacctatgaagcaaatagtctcacaacaaatttctgccctcaggctctacgatgtcaacattgcaacgatagatatgagcaagaagttgcctctatcattagaggaagtggcgttacagctgatgctcaccaagaaggtctaccttctctgttgcagaatggcggcatgatgggttctaacaatgagtttgatgcagtcaagtttttcttcagtgcaggttagagatgatcaaatggtattgagtacaaaaatattgaatctagagaagaagtggaatgagtactgtgtacgtctccatcaaggttgcaatagaatcaacagagatccttgccagttatttccacatcacattggtgttcgagttgacagggaaagatgtgcaaatccaaaccaaagcgcacagacaattgcacttcagagggatattattaaaccttgtgcattgtcttctccatacaccaatataactgcaaagagtatttcagcaccagaccaaataaatgcagaccttgtactaaaccttcaagtgaggcagtcgaggagtaatgaaccccttcaaagtggggttgtgccattccaacatatcaactcatcaaattataacaaacccgaagaatcatctgctgcacctgtgacaactgatttagtgttggccacccctcgtggatcttccttcaaggattcaagtagtgccctgtgtaaacgtgtagaggacattgaagagacaatccagctgatgcctaacaaggttgacgatctgaatcttaaacctcctcacttgtctatacaaccttacacttgctccaagagttcctcatcaaattgggagcaaacatcacctagtgctctgcattcaacatctttaggaggcacttctgcctttggccaatggcagaggccttcaccgctcgcaacacaaagttttgatttgagcaattacaagctacttatggaacacctgtttaaggttgttgggaggcaggaggaagcattgagtgctatttgtgcatccattgtgcggtgcaggtcgatggagaggcgtcgtggtgcaaacaaaaagaacgacatatggtttagtttttatggccctgacagcattgccaagcggagagttggtgtggcacttgctgagctaatgcatggtagctcagggaacttgatatatctggacctaagcctcaatgattggggtaaccctagtttcagaggaaagcgtgccaccgactgtatctttgaagagctgagaaagaagcggcgatcggttatcttccttgacaatattgacaaagccgattgccttgttcaggagagcctgattcatgcaatggagactggtaggtacaaggacttgcatgggggacgagtgactgatcttaatgactcgattgtggtgttgtctacaagaatgatccaaggatgccaggatgcttctcttggggtggaagagggcaatgctttttcagaagaaaaggctgtggcagctcgtgggcatcaactgaagatcatagttgagccgggcacaaccaacatcggtggaggcaacgttgtagtttcgtcaaggcattccttgggaagcagtgaagcctcaagttattccagtaagcggaagctccacatctctgatgggcaagaaaagacagaagaatcggcaagcacttcaaagcgactgcatagaacatcaagcatcccattcgacttgaacctcccaggcgacgatgaggaagcccatgatgatggtgatgatgacaagagcagtggcagccacgaaaactatctagagggatctgtcggaaacctcttgcgttgggtggatggttcaatcaatttcaagccatttgactttggcaagctttgtgaggacatcctgcaggagttcagcaatactaccagcaaaattctgggcaccagggggtgcaggctggagatcgacgctggggctatggagcaggtagtggcagcggcatgggcatccgattcgcatgagaatgagaagaggcctgtgcggacgtgggtggagcaggtgtttggcaggagccttgagcaggtcaagatgaggtgtgagaatctgagcagctgtaccctgagactggtttcctgtgaggtgaaagaagatggttttggagctttgcttccctcgagaataattctggattggtgatggtgatatgtgtcgtttgcattattgctgctagctatctagctgtaagtattggttagttagctgacaccacccaccgtactgtagcatatataggttcatatcattatttggtggcttcaaaataatgtaattaagctggagtatgtacgtacggtagtctagcaattaaactactcgttcaagtccatgacctggggatggatggctgtatttattgttgctcctgcgtgtatatatatatttgtaagaccgacgtgatggccttttcatgtggaattccatatactgatgtcatttaactgtctgtgcaagacaattgcataattcacaagtatggaaagcaaaa

SEQ ID NO: 12930 - DNA, 3824 bp, Zea Mays
cagcttttcttttgcgcagccaccctctggcttgccgttaatttctttcccgtttcactcctcgcgtttttacacttggcccccaatccaatccccgccaggccgccatgccgacgccggtgcccgccgcgcgccagtgcctctccccgcccgccgtcacggccctcgacgccgccgtcgcctccgcgcgccgacgggcccacgcgcagaccacctcccttcacctcatcgcctcgctcctcgcccccaccgccgcgccgctgctccgcgacgcgctcgcccgcgcccgcagcgccgcctactccccgcgcctccagctcaaggcgctcgacctctgcttcgccgtctccctcgaccgcctcccgtccacccccacctccgcctccacccccacctcacacgagccccccgtcgccaactccctcatggccgccatcaagcgctcgcaggccaaccagcgccggaacccggacacgttccacttctatcaccatcaggcggcgcccacctcccccaacgccatcaaggtcgacctctcccaccttgtcctcgccatcctcgacgacccgctcgtcagccgcgtcttcgccgacgcgggattccgcagcaacgagatcaaggtcgccatcctccgccccgcgccgcccgtcccgctgctcggccgcctccccacgcgcgcgcgcccgccgccgctcttcctctgcagctttgccgccgcggacgacgccgacgtcccctcgcccgcgcccgccctcgcgggggccgcaccgggggaggacaactgccgccgcatcaccgacatcctcgcccgcggacgcaaccccatgctcgtcggcgtcggggccgcctccgcagccgcagatttcgccaaggcgtccccgtaccgcatcgtccccatcggccccgcctctgccaataatcaggcggcaccgacgacgcccacctctggccttatcttcagcatcggtgatctcaaggacctggtgcccgacgaggccgacctgcaggacgcggctcgccgggtggtggcggaggtcacgcgcctgctcgagacgcacagacctgctgcccgccaaacccaaacggtctgggtcatgggctggtccgccacctacgagacctacctcgccttcctttccaagttcccactcgtcgacaaggactgggaactccagctgctgccgatcaccgccgtgcgcgacgccggccctgcagcgggactcgtgcctcctcctccagctccagccaccacggtcgctgccttgtccatgcctgccactacaagcttcgcggagtcatttgttccttttggaggtcttttgtgcgatacctatgaagcaaatagtctcacaacaaatttctgccctcaggctctacgatgtcaacattgcaacgatagatatgagcaagaagttgcctctatcattagaggaagtggcgttacagctgatgctcaccaagaaggtctaccttctctgttgcagaatggcggcatgatgggttctaacaatgagtttgatgcagtcaagtgcaggttagagatgatcaaatggtattgagtacaaaaatattgaatctagagaagaagtggaatgagtactgtgtacgtctccatcaaggttgcaatagaatcaacagagatccttgccagttatttccacatcacattggtgttcgagttgacagggaaagatgtgcaaatccaaaccaaagcgcacagacaattgcacttcagagggatattattaaaccttgtgcattgtcttctccatacaccaatataactgcaaagagtatttcagcaccagaccaaataaatgcagaccttgtactaaaccttcaagtgaggcagtcgaggagtaatgaaccccttcaaagtggggttgtgccattccaacatatcaactcatcaaattataacaaacccgaagaatcatctgctgcacctgtgacaactgatttagtgttggccacccctcgtggatcttccttcaaggattcaagtagtgccctgtgtaaacgtgtagaggacattgaagagacaatccagctgatgcctaacaaggttgacgatctgaatcttaaacctcctcacttgtctatacaaccttacacttgctccaagagttcctcatcaaattgggagcaaacatcacctagtgctctgcattcaacatctttaggaggcacttctgcctttggccaatggcagaggccttcaccgctcgcaacacaaagttttgatttgagcaattacaagctacttatggaacacctgtttaaggttgttgggaggcaggaggaagcattgagtgctatttgtgcatccattgtgcggtgcaggtcgatggagaggcgtcgtggtgcaaacaaaaagaacgacatatggtttagtttttatggccctgacagcattgccaagcggagagttggtgtggcacttgctgagctaatgcatggtagctcagggaacttgatatatctggacctaagcctcaatgattggggtaaccctagtttcagaggaaagcgtgccaccgactgtatctttgaagagctgagaaagaagcggcgatcggttatcttccttgacaatattgacaaagccgattgccttgttcaggagagcctgattcatgcaatggagactggtaggtacaaggacttgcatgggggacgagtgactgatcttaatgactcgattgtggtgttgtctacaagaatgatccaaggatgccaggatgcttctcttggggtggaagagggcaatgctttttcagaagaaaaggctgtggcagctcgtgggcatcaactgaagatcatagttgagccgggcacaaccaacatcggtggaggcaacgttgtagtttcgtcaaggcattccttgggaagcagtgaagcctcaagttattccagtaagcggaagctccacatctctgatgggcaagaaaagacagaagaatcggcaagcacttcaaagcgactgcatagaacatcaagcatcccattcgacttgaacctcccaggcgacgatgaggaagcccatgatgatggtgatgatgacaagagcagtggcagccacgaaaactatctagagggatctgtcggaaacctcttgcgttgggtggatggttcaatcaatttcaagccatttgactttggcaagctttgtgaggacatcctgcaggagttcagcaatactaccagcaaaattctgggcaccagggggtgcaggctggagatcgacgctggggctatggagcaggtagtggcagcggcatgggcatccgattcgcatgagaatgagaagaggcctgtgcggacgtgggtggagcaggtgtttggcaggagccttgagcaggtcaagatgaggtgtgagaatctgagcagctgtaccctgagactggtttcctgtgaggtgaaagaagatggttttggagctttgcttccctcgagaataattctggattggtgatggtgatatgtgtcgtttgcattattgctgctagctatctagctgtaagtattggttagttagctgacaccacccaccgtactgtagcatatataggttcatatcattatttggtggcttcaaaataatgtaattaagctggagtatgtacgtacggtagtctagcaattaaactactcgttcaagtccatgacctggggatggatggctgtatttattgttgctcctgcgtgtatatatatatttgtaagaccgacgtgatggccttttcatgtggaattccatatactgatgtcatttaactgtctgtgcaagacaattgcataattcacaagtatggaaagcaaaa

SEQ ID NO: 12931 - DNA, 3682 bp, Zea Mays
caccctctggcttgccgttaatttctttcccgtttcactcctcgcgtttttacacttggcccccaatccaatccccgccaggccgccatgccgacgccggtgcccgccgcgcgccagtgcctctccccgcccgccgtcacggccctcgacgccgccgtcgcctccgcgcgccgacgggcccacgcgcagaccacctcccttcacctcatcgcctcgctcctcgcccccaccgccgcgccgctgctccgcgacgcgctcgcccgcgcccgcagcgccgcctactccccgcgcctccagctcaaggcgctcgacctctgcttcgccgtctccctcgaccgcctcccgtccacccccacctccgcctccacccccacctcacacgagccccccgtcgccaactccctcatggccgccatcaagcgctcgcaggccaaccagcgccggaacccggacacgttccacttctatcaccatcaggcggcgcccacctcccccaacgccatcaaggtcgacctctcccaccttgtcctcgccatcctcgacgacccgctcgtcagccgcgtcttcgccgacgcgggattccgcagcaacgagatcaaggtcgccatcctccgccccgcgccgcccgtcccgctgctcggccgcctccccacgcgcgcgcgcccgccgccgctcttcctctgcagctttgccgccgcggacgacgccgacgtcccctcgcccgcgcccgccctcgcgggggccgcaccgggggaggacaactgccgccgcatcaccgacatcctcgcccgcggacgcaaccccatgctcgtcggcgtcggggccgcctccgcagccgcagatttcgccaaggcgtccccgtaccgcatcgtccccatcggccccgcctctgccaataatcaggcggcaccgacgacgcccacctctggccttatcttcagcatcggtgatctcaaggacctggtgcccgacgaggccgacctgcaggacgcggctcgccgggtggtggcggaggtcacgcgcctgctcgagacgcacagacctgctgcccgccaaacccaaacggtctgggtcatgggctggtccgccacctacgagacctacctcgccttcctttccaagttcccactcgtcgacaaggactgggaactccagctgctgccgatcaccgccgtgcgcgacgccggccctgcagcgggactcgtgcctcctcctccagctccagccaccacggctctacgatgtcaacattgcaacgatagatatgagcaagaagttgcctctatcattagaggaagtggcgttacagctgatgctcaccaagaaggtctaccttctctgttgcagaatggcggcatgatgggttctaacaatgagtttgatgcagtcaaggttagagatgatcaaatggtattgagtacaaaaatattgaatctagagaagaagtggaatgagtactgtgtacgtctccatcaaggttgcaatagaatcaacagagatccttgccagttatttccacatcacattggtgttcgagttgacagggaaagatgtgcaaatccaaaccaaagcgcacagacaattgcacttcagagggatattattaaaccttgtgcattgtcttctccatacaccaatataactgcaaagagtatttcagcaccagaccaaataaatgcagaccttgtactaaaccttcaagtgaggcagtcgaggagtaatgaaccccttcaaagtggggttgtgccattccaacatatcaactcatcaaattataacaaacccgaagaatcatctgctgcacctgtgacaactgatttagtgttggccacccctcgtggatcttccttcaaggattcaagtagtgccctgtgtaaacgtgtagaggacattgaagagacaatccagctgatgcctaacaaggttgacgatctgaatcttaaacctcctcacttgtctatacaaccttacacttgctccaagagttcctcatcaaattgggagcaaacatcacctagtgctctgcattcaacatctttaggaggcacttctgcctttggccaatggcagaggccttcaccgctcgcaacacaaagttttgatttgagcaattacaagctacttatggaacacctgtttaaggttgttgggaggcaggaggaagcattgagtgctatttgtgcatccattgtgcggtgcaggtcgatggagaggcgtcgtggtgcaaacaaaaagaacgacatatggtttagtttttatggccctgacagcattgccaagcggagagttggtgtggcacttgctgagctaatgcatggtagctcagggaacttgatatatctggacctaagcctcaatgattggggtaaccctagtttcagaggaaagcgtgccaccgactgtatctttgaagagctgagaaagaagcggcgatcggttatcttccttgacaatattgacaaagccgattgccttgttcaggagagcctgattcatgcaatggagactggtaggtacaaggacttgcatgggggacgagtgactgatcttaatgactcgattgtggtgttgtctacaagaatgatccaaggatgccaggatgcttctcttggggtggaagagggcaatgctttttcagaagaaaaggctgtggcagctcgtgggcatcaactgaagatcatagttgagccgggcacaaccaacatcggtggaggcaacgttgtagtttcgtcaaggcattccttgggaagcagtgaagcctcaagttattccagtaagcggaagctccacatctctgatgggcaagaaaagacagaagaatcggcaagcacttcaaagcgactgcatagaacatcaagcatcccattcgacttgaacctcccaggcgacgatgaggaagcccatgatgatggtgatgatgacaagagcagtggcagccacgaaaactatctagagggatctgtcggaaacctcttgcgttgggtggatggttcaatcaatttcaagccatttgactttggcaagctttgtgaggacatcctgcaggagttcagcaatactaccagcaaaattctgggcaccagggggtgcaggctggagatcgacgctggggctatggagcaggtagtggcagcggcatgggcatccgattcgcatgagaatgagaagaggcctgtgcggacgtgggtggagcaggtgtttggcaggagccttgagcaggtcaagatgaggtgtgagaatctgagcagctgtaccctgagactggtttcctgtgaggtgaaagaagatggttttggagctttgcttccctcgagaataattctggattggtgatggtgatatgtgtcgtttgcattattgctgctagctatctagctgtaagtattggttagttagctgacaccacccaccgtactgtagcatatataggttcatatcattatttggtggcttcaaaataatgtaattaagctggagtatgtacgtacggtagtctagcaattaaactactcgttcaagtccatgacctggggatggatggctgtatttattgttgctcctgcgtgtatatatatatttgtaagaccgacgtgatggccttttcatgtggaattccatatactgatgtcatttaactgtctgtgcaagacaattgcataattcacaagtatggaaagcaaaa

SEQ ID NO: 12932 - DNA, 3714 bp, Zea Mays
caccctctggcttgccgttaatttctttcccgtttcactcctcgcgtttttacacttggcccccaatccaatccccgccaggccgccatgccgacgccggtgcccgccgcgcgccagtgcctctccccgcccgccgtcacggccctcgacgccgccgtcgcctccgcgcgccgacgggcccacgcgcagaccacctcccttcacctcatcgcctcgctcctcgcccccaccgccgcgccgctgctccgcgacgcgctcgcccgcgcccgcagcgccgcctactccccgcgcctccagctcaaggcgctcgacctctgcttcgccgtctccctcgaccgcctcccgtccacccccacctccgcctccacccccacctcacacgagccccccgtcgccaactccctcatggccgccatcaagcgctcgcaggccaaccagcgccggaacccggacacgttccacttctatcaccatcaggcggcgcccacctcccccaacgccatcaaggtcgacctctcccaccttgtcctcgccatcctcgacgacccgctcgtcagccgcgtcttcgccgacgcgggattccgcagcaacgagatcaaggtcgccatcctccgccccgcgccgcccgtcccgctgctcggccgcctccccacgcgcgcgcgcccgccgccgctcttcctctgcagctttgccgccgcggacgacgccgacgtcccctcgcccgcgcccgccctcgcgggggccgcaccgggggaggacaactgccgccgcatcaccgacatcctcgcccgcggacgcaaccccatgctcgtcggcgtcggggccgcctccgcagccgcagatttcgccaaggcgtccccgtaccgcatcgtccccatcggccccgcctctgccaataatcaggcggcaccgacgacgcccacctctggccttatcttcagcatcggtgatctcaaggacctggtgcccgacgaggccgacctgcaggacgcggctcgccgggtggtggcggaggtcacgcgcctgctcgagacgcacagacctgctgcccgccaaacccaaacggtctgggtcatgggctggtccgccacctacgagacctacctcgccttcctttccaagttcccactcgtcgacaaggactgggaactccagctgctgccgatcaccgccgtgcgcgacgccggccctgcagcgggactcgtgcctcctcctccagctccagccaccacggtcgctgccttgtccatgcctgccactacaaggctctacgatgtcaacattgcaacgatagatatgagcaagaagttgcctctatcattagaggaagtggcgttacagctgatgctcaccaagaaggtctaccttctctgttgcagaatggcggcatgatgggttctaacaatgagtttgatgcagtcaaggttagagatgatcaaatggtattgagtacaaaaatattgaatctagagaagaagtggaatgagtactgtgtacgtctccatcaaggttgcaatagaatcaacagagatccttgccagttatttccacatcacattggtgttcgagttgacagggaaagatgtgcaaatccaaaccaaagcgcacagacaattgcacttcagagggatattattaaaccttgtgcattgtcttctccatacaccaatataactgcaaagagtatttcagcaccagaccaaataaatgcagaccttgtactaaaccttcaagtgaggcagtcgaggagtaatgaaccccttcaaagtggggttgtgccattccaacatatcaactcatcaaattataacaaacccgaagaatcatctgctgcacctgtgacaactgatttagtgttggccacccctcgtggatcttccttcaaggattcaagtagtgccctgtgtaaacgtgtagaggacattgaagagacaatccagctgatgcctaacaaggttgacgatctgaatcttaaacctcctcacttgtctatacaaccttacacttgctccaagagttcctcatcaaattgggagcaaacatcacctagtgctctgcattcaacatctttaggaggcacttctgcctttggccaatggcagaggccttcaccgctcgcaacacaaagttttgatttgagcaattacaagctacttatggaacacctgtttaaggttgttgggaggcaggaggaagcattgagtgctatttgtgcatccattgtgcggtgcaggtcgatggagaggcgtcgtggtgcaaacaaaaagaacgacatatggtttagtttttatggccctgacagcattgccaagcggagagttggtgtggcacttgctgagctaatgcatggtagctcagggaacttgatatatctggacctaagcctcaatgattggggtaaccctagtttcagaggaaagcgtgccaccgactgtatctttgaagagctgagaaagaagcggcgatcggttatcttccttgacaatattgacaaagccgattgccttgttcaggagagcctgattcatgcaatggagactggtaggtacaaggacttgcatgggggacgagtgactgatcttaatgactcgattgtggtgttgtctacaagaatgatccaaggatgccaggatgcttctcttggggtggaagagggcaatgctttttcagaagaaaaggctgtggcagctcgtgggcatcaactgaagatcatagttgagccgggcacaaccaacatcggtggaggcaacgttgtagtttcgtcaaggcattccttgggaagcagtgaagcctcaagttattccagtaagcggaagctccacatctctgatgggcaagaaaagacagaagaatcggcaagcacttcaaagcgactgcatagaacatcaagcatcccattcgacttgaacctcccaggcgacgatgaggaagcccatgatgatggtgatgatgacaagagcagtggcagccacgaaaactatctagagggatctgtcggaaacctcttgcgttgggtggatggttcaatcaatttcaagccatttgactttggcaagctttgtgaggacatcctgcaggagttcagcaatactaccagcaaaattctgggcaccagggggtgcaggctggagatcgacgctggggctatggagcaggtagtggcagcggcatgggcatccgattcgcatgagaatgagaagaggcctgtgcggacgtgggtggagcaggtgtttggcaggagccttgagcaggtcaagatgaggtgtgagaatctgagcagctgtaccctgagactggtttcctgtgaggtgaaagaagatggttttggagctttgcttccctcgagaataattctggattggtgatggtgatatgtgtcgtttgcattattgctgctagctatctagctgtaagtattggttagttagctgacaccacccaccgtactgtagcatatataggttcatatcattatttggtggcttcaaaataatgtaattaagctggagtatgtacgtacggtagtctagcaattaaactactcgttcaagtccatgacctggggatggatggctgtatttattgttgctcctgcgtgtatatatatatttgtaagaccgacgtgatggccttttcatgtggaattccatatactgatgtcatttaactgtctgtgcaagacaattgcataattcacaagtatggaaagcaaaa

SEQ ID NO: 12933 - DNA, 1583 bp, Zea Mays
agagtgcagatggccaacgcaattcaccagtagtagtagttgtagcggcataactagctatggctaccaccatggcggctaacgacccgacgagcatccgcgtggttagccgccggctggtgaaggcctccgacgcttccatccagcctcatgtcatgtccctctccaacctcgacctctacgtctgcgactcacagctcggcacgctgtgcgtctaccccaacgccggcggcggcttcagcgcgcgcatccccagcctgttcgagtccctcttgccgtccttgctcaattacctctacccattcgccggccgcctcgtcaccaacccaagctccggcctccccgagctccactgccacaaccaaggcgcagagctcgtggtcggcgaggtcggcgtcgccctggggagcctcaactacggcgcgaccaaggattccgtcaagaagatggtgctcccgttccccagggacgtccttctgtcggtgcagctgctctccttcgcgtgcgggggcttctccgtcatgtggtggatcaaccacctcgtcggcgacggccacgtgggcgccacgatcgtcaggacgtggtcccagctcgcgcggaccggggacatcggcggtgcgcccccgctcaactacgaccgctccgtgttccgcccgcgcagcccgccgtcgtacagcgactccgtcgcggccaccttcacaacgttcgacgagcagcgcctgcccaacgccctcacggcggaggccagcttcgtggaccgcgtctactacgtggaggcgagcgacatcgccgcgctgcgcgacacggcggcggcggccaccacggcccagcgcccgacccgcgtcgaggcgctgtccgcctacctgtggaaggcgctcgccgacgtcgtggccgcgtgcccccggagcaacaaggagcgctgccgcatgggttggtgggtcagcgcgcggcgccgtgtcacggcgcctaagctcgtcgctttgatgcccggctacctggggaacgtgacgacctacgccctgggcgacgcgccggcggaggagatcgtgcggaagcctctggcggaggtggcggccatggtgcgggacgccatcacgtcggtggactacgacgagtacctccaggagatggtggactgggtggaggtgcacaagacggaaggcctgatggaggcggccgtcatcggagtcggcgcgcccacgctgaaccagtcggtgatgaccacgttcccgctcgacaccgacttcggcttcggccaggctactctggcaaccacggtctctgactatggcaggctttgctcggctttcctttcggtcggagcgcggccgggaggcgacggctcctggctcgtcaccgcctacatatggccgcagctggcggcggcgctggagtccgacggcatcttcaagcttctcacggcggagtacctcggtctagctatcttttgtacctgtacgccagcagatgagactctggtctttgggatattatatatctgctaaataaagatgggctcgacatatatatgagaccatatcctgtaggcaaaggacgccggtgctcccatgcgcaaaatgcat

SEQ ID NO: 12934 - DNA, 2631 bp, Zea Mays
cgggatcgggagtggcgccctgacggttaccgcggcgcaagaagcaaaactcgtcgcggtggaacggggtgatggtcctccgggcaaagacttcctccttgatacaatcagcttcaagagcaggagcatggatgcccccgcaccaactcgccatttcctccgccgcgacaaggccctcctccactctctccgccgcagtcgccaggtgcagcagagctgcggccatcacggaccccttcgccatcgcggacgccctctccgccgccagttccgccccggcgtcgcagtccctgtccaccggatcgcagctccacgcgtccggcataaagctgggcgtcgttttcgccgacacctacacctcgaaccagctcctcatccactactccaagcgcgggcaactcgccagcgcgctggacgtgttcgacgaaacgccgagccgcaaccacgtcacctggacggctattgtgtccgccgcggcgcgcggcggggcgcctggcctgggcctgcggctcttcgcctccatgctcaggagcgggttctgccccaacgagttcgctctggctagcgcgctcggcgcttgctgccagtgggtggcggctgacgtgaagctgggcctctcccttcacggcctcgccgtcagggccgtcctgcatggaaacccttacgtggggagctcgctgatgctggtgtatgccaagcacgggcgtgtcgctgctgcggagcgagtgttcgcaggcatagcttccggttccagagacgtggcgtgctggaacgcgatgctggagggctacgtcgccaacggccatgggtatgacgcgacgaggacggtggccctgatgcatggatctggaatagcgcctgacatgttcacctacatttcggctgcgaaggcttcttggatcgcccgcgacttgtatttcgggcggcaggtccatggtctcgtcgtccgcagcgtgttggagtccaacaacacctcagtgatgaacgcactcatggatatgtatttcaaagcgggacagaaggaaaccgctgctgatatctttggcaagattcggtggaaggatactgtttcttggaacacgatgatatcaggcctggaggacgagagggcagctgcggactgctttgtcgacatggcacggtgcggctgcaggtctaaccaaccatcaacatgctctcgcggtgtgggctgctcagctgtgcctatggctacttctgtgatctcggtgtccggaacgtcgtgacgtggaacgagatgatcgcgggctatggtctgcacggctgttctggagacgcgatgaggctcttccgcagcttggtttgcttcggagcaagaccggacgagttcacctatccagccgttctgtctgccttccaacaggaccatgatgcaaggaaccatgagcaagtccacgcaagtgttctgaaacaggggttcgcttcatgccagttcgtgtccacctcgctcatcaaagcaaaagcggcccttggctcctcagttctaggtccactgaagatcatccaggatgctggcgagatggatttggtgtcatggggagtcgccatctctgcgttcgtgaagcatggcttgggtcaagaggcactgtctctcttcaactcgtgcagagttgactgcccagagaagcctgatgagttcatcctgggcaccatcctgaatgcatgtgcaaacgccgcgttgataaggcagtgcagatgcatccattcgctcgttgtcaggacaggacacagcaagcacttgtgcgtgtccagtgctttggttgatgcctatgcgaaatgcggtgacatcactgctgccaaaggcgctttcgctacggtttcgaccaaggacgccatagtgtacaacaccatgctgacagcttatgccaaccatggtctgatccgtgaagtcctcagcctctaccaagagatgactcagcttcagttggcggctccaacaccagctacgttcgttgctgccatatcagcttgcagccacctcgggctagtggagcaggggaagcttctgttcagctccatgctgtctgcgcacggcatgaatcccacaagggccaattacgcatgcctgattgacctcctggcgcgaagagggctcctggaagaagcaacaggcgttatccaggcaatgccgttccaaccgtggcctgcagtatggaggtcactgatgaacggttgccggatccatgggaacaaagaactcggtctgcttgcttcggaacagatcctgaggatggcaccaaacagtgacggcgcatatgtgtcgctgtcgcatgtctacgctgaagatggagattggcggtctgcagaggacgccaggaggaagatggctgagaatcaagtgcacaaggcgcaaggttacagcagtcttcagatctagccattcagttttgtgttcgcagtgaatgtaaagtgtgaaatgctctctctcttttttttgccgggcatttccccaaaaaaaaaaatccacacacaattactcctaaaaataggtttgggcatttgatgcacatctgtaggatcctcatgctgctgaatacacgctcactgactcgtgctctatagtttatagcttcattgttaggcatcagcgctggggagagggtcctgttcaac

SEQ ID NO: 12935 - DNA, 3742 bp, Zea Mays
cctaaccctagtctcacacgcttgagtcttgacgctcacggacacggagtcacggaccgtggctctccgccggccaccaccagccgccgccccatgtagcaaattagcaacccgccgagcaagagcaaccgccggcggcccggcgccgaccctgccgtccaggactccaggcccgtcctcctgccgcggtgctgcctgcgtccctgcccccgccaccgcccaccgccagcagtaggcatcaagccgagcgaggagcgagtagtggcgctgcgtggctgcgtccctggctcggtggctccctgcccagtgcccagtgcccctgcgtcagcgtcgccgtcactgcactccgagttgcagctccagcaagtgaccattgctctagagatccacatgtgggtttcagtgcattttcgtatcttttagaactgaactgtgaaaaacacaatggcaacaatcatatctggagcaaggagccttcactcactcgctctgcgatcgcggatgttgggcgaaatgactcagctcggtccttttaaccgcaacgtgcagcggaggtggagaaagcctgtagattcggcaagaacacgtctcgagggaagaactatggatcataggctggacaagctaatggttcagctgaggaacttgaggctggccttggctttgcatgaggtgatatctcagcagaggaacggatatgcgtctctccagctcctctcaaggtggaggcatgaggtcgggctgaacattgaggtcggtgctttcctcaagaaatacccccacgtgtttcagacctacgtgcaccctgtcaagaggaaccactgctgcaagatcacgcagaagatgtccgacttgatcgcagaggaagacgctgtggtcagggagaatgaggtcggcgtagttcagcggctgaagaaacttctcatgctctctgtggatggaactctgaacatgcacgcgttatggctcataagaagggaacttgggcttccggatgattacaggtcctctatactgccgaaccatcgacatgatttaattctcgaatccccagctactctatcacttttctctatggatgaaacattggctgtagctaaggtcgacgagtggaggaaaagggagtacacagaaaaatggctagctgaatcagagacaaaatatgctttcccgatcaacttcccaactggatttaaggttcagaaaggtttcagggagaaactcaagaactggcagaggcttccctacaccaaaccttatgagaagaatgattcgcattcgatccgcaacgtggagcggcttgagaaacgcattgttggtgttcttcatgagcttttgagcctgacgatcgaaagaatgatgccacttgagagactgtcacacttcagaagattgtacaccatggaggtaaacctgctagaattttttctcaagtatccaggcattttctacatctcgacgaaaggaagcacacagacagttatcctaagggagagttacagtaaaggatatctgattgagcctaaccctgtgtacattgtgcggaggaagatgctggacttggtattatctggatctcgtaacgttggtgaatgccaacaggatagtgcaacttggtcagctgaggagcatggtctgggaagcagtcatgggtgccaggataacatatgccaggtggattctgcaattccatactggaacatggagttagaagtgacgcatggaaagaaccaattaactcaaccgtgatcttgctgtaatctctacatataaaaatacctactgatatcgtctgcctagggtgaagcgatgcctagctgcggcattgcttgctgccttgctcacctgctttcctgagtatctgtgttcatcaattgcgaattatccttccttcgattccgacctcctcgggtggctcctgccgtcctgcgtgcattcccattttcaaaccagcatgttcagcactgcttggcgtgggggtttgccgctagtgggggtccaagaggcgccattcctgttccaaattcttaggcggcggtgacgacgctgactgttggttgaggctgttggagcagtccttgaagagaaagtgcctctgatatattctctgctcaaaggattagccttgcagttgccagacgatgtacctgataaaaatgagataattagattgagaaaggttgcaagcagtgttggtgttggcgacaaacatgatgctgagtgggtacactctattctggcagacgctggtgcagctaatgataattcttggatcctacttccatacctttgtgctgcattcatggtgtccaacatttggaacggtgctgtttatgatgtcaatataggtggactcagtaacaatttgcactgcctagcaaggtgtgtaagtgctgtgattgggggaagcgaatacactcgggtcgaaagggagcagcgaataaattctctttcaaatgtgcatacagatgaactgcaagaggccgagttaccgagccgtgtctcagcagaagcaaatatcaaatcttgtatgcagatctacgtcaaactgtctgcagggatcgtcctggattcatggaacgacacaagcaggcagcacatcgtcccgaagctgacattccaggaccagctctgcgagctgtccccgtacgtgccaaggagcaccttagaagctcacatcccatacaccatcctgcgctcgatataccaccagctgtacggaggctctctgctggcctcggaaccggcggagcagtccccaaggcagtcgcctctcatctctctggcacacgcgtccccgtccgcaaggcagatgcagaaccgaccagagacaacacccaggtcccacaccttcgacccaggctactacagctcgtcggggtcccagcacgacgatggctacgacgcggataggagggccggacggctgctgcgcggagcatgaggcgctctggaccgctcgacttcggtgcgagcagaaaggcgaagaagttcgtcgagggctccagctccgggagcagcgatggagctggctcgttgcagaggttcgcagtgtcgagatctggccctctatcgtacaaatagggccgcatgtaatgtaaactctagagcagtagatcttcctatgcgtgctggtttacgtagctagcagcagcagctagttgtgctgtaagtaaaacccattaattgttttgttttgtttgctgctctatcgtacaaatagggcatcatgtaatgtaaactctagagctagtttttattttggttagttggtatatttagtttgagagagggatattcacacttttaggttttgtttggatactctagtattcaccataattcacatgtgtgtgaggtggattgggggtgcacactatagtatccaaataagaccttagggtgcgtttggttggagagtcaattggaatggagtgactccattccagtttttgagaatggagtcatttcattctgtgtttggcaattacaacggaaacattctattttttgtttggttgaagactagaatagaatggagccgctccgttcattgtttggttagatagccatacaagtgtggagaagagaagaggaaggtgagcgctcacatccggtcgttttggtagagcgagaacattccaaatatttgtcatatatagactccaaatccgttccagaaaccaaacatctagaaaacagaaatagagctgctccattcttcctcgctcctcaaccaaac

SEQ ID NO: 12936 - DNA, 3737 bp, Zea Mays
cctagtctcacacgcttgagtcttgacgctcacggacacggagtcacggaccgtggctctccgccggccaccaccagccgccgccccatgtagcaaattagcaacccgccgagcaagagcaaccgccggcggcccggcgccgaccctgccgtccaggactccaggcccgtcctcctgccgcggtgctgcctgcgtccctgcccccgccaccgcccaccgccagcagtaggcatcaagccgagcgaggagcgagtagtggcgctgcgtggctgcgtccctggctcggtggctccctgcccagtgcccagtgcccctgcgtcagcgtcgccgtcactgcactccgagttgcagctccagcaagtgaccattgctctagagatccacatgtgggtttcagtgcattttcgtatcttttagaactgaactgtgaaaaacacaatggcaacaatcatatctggagcaaggagccttcactcactcgctctgcgatcgcggatgttgggcgaaatgactcagctcggtccttttaaccgcaacgtgcagcggaggtggagaaagcctgtagattcggcaagaacacgtctcgagggaagaactatggatcataggctggacaagctaatggttcagctgaggaacttgaggctggccttggctttgcatgaggtgatatctcagcagaggaacggatatgcgtctctccagctcctctcaaggtggaggcatgaggtcgggctgaacattgaggtcggtgctttcctcaagaaatacccccacgtgtttcagacctacgtgcaccctgtcaagaggaaccactgctgcaagatcacgcagaagatgtccgacttgatcgcagaggaagacgctgtggtcagggagaatgaggtcggcgtagttcagcggctgaagaaacttctcatgctctctgtggatggaactctgaacatgcacgcgttatggctcataagaagggaacttgggcttccggatgattacaggtcctctatactgccgaaccatcgacatgatttaattctcgaatccccagctactctatcacttttctctatggatgaaacattggctgtagctaaggtcgacgagtggaggaaaagggagtacacagaaaaatggctagctgaatcagagacaaaatatgctttcccgatcaacttcccaactggatttaaggttcagaaaggtttcagggagaaactcaagaactggcagaggcttccctacaccaaaccttatgagaagaatgattcgcattcgatccgcaacgtggagcggcttgagaaacgcattgttggtgttcttcatgagcttttgagcctgacgatcgaaagaatgatgccacttgagagactgtcacacttcagaagattgtacaccatggaggtaaacctgctagaattttttctcaagtatccaggcattttctacatctcgacgaaaggaagcacacagacagttatcctaagggagagttacagtaaaggatatctgattgagcctaaccctgtgtacattgtgcggaggaagatgctggacttggtattatctggatctcgtaacgttggtgaatgccaacaggatagtgcaacttggtcagctgaggagcatggtctgggaagcagtcatgggtgccaggataacatatgccaggtggattctgcaattccatactggaacatggagttagaagtgacgcatggaaagaaccaattaactcaaccgtgatcttgctgtaatctctacatataaaaatacctactgatatcgtctgcctagggtgaagcgatgcctagctgcggcattggtaatctgtcaagcagtgaccaaaacaagcagcaatccccgccgtcgtgaaacgccgccgggtgccatgtcgatttaggctatccagcttgctgccttgctcacctgctttcctgagtatctgtgttcatcaattgcgaattatccttccttcgattccgacctcctcgggtggctcctgccgtcctgcgtgcattcccattttcaaaccagcatgttcagcactgcttggcgtgggggtttgccgctagtgggggtccaagaggcgccattcctgttccaaattcttaggcggcggtgacgacgctgactgttggttgaggctgttggagcagtccttgaagagaaagtgcctctgatatattctctgctcaaaggattagccttgcagttgccagacgatgtacctgataaaaatgagataattagattgagaaaggttgcaagcagtgttggtgttggcgacaaacatgatgctgagtgggtacactctattctggcagacgctggtgcagctaatgataattcttggatcctacttccatacctttgtgctgcattcatggtgtccaacatttggaacggtgctgtttatgatgtcaatataggtggactcagtaacaatttgcactgcctagcaagatgaactgcaagaggccgagttaccgagccgtgtctcagcagaagcaaatatcaaatcttgtatgcagatctacgtcaaactgtctgcagggatcgtcctggattcatggaacgacacaagcaggcagcacatcgtcccgaagctgacattccaggaccagctctgcgagctgtccccgtacgtgccaaggagcaccttagaagctcacatcccatacaccatcctgcgctcgatataccaccagctgtacggaggctctctgctggcctcggaaccggcggagcagtccccaaggcagtcgcctctcatctctctggcacacgcgtccccgtccgcaaggcagatgcagaaccgaccagagacaacacccaggtcccacaccttcgacccaggctactacagctcgtcggggtcccagcacgacgatggctacgacgcggataggagggccggacggctgctgcgcggagcatgaggcgctctggaccgctcgacttcggtgcgagcagaaaggcgaagaagttcgtcgagggctccagctccgggagcagcgatggagctggctcgttgcagaggttcgcagtgtcgagatctggccctctatcgtacaaatagggccgcatgtaatgtaaactctagagcagtagatcttcctatgcgtgctggtttacgtagctagcagcagcagctagttgtgctgtaagtaaaacccattaattgttttgttttgtttgctgctctatcgtacaaatagggcatcatgtaatgtaaactctagagctagtttttattttggttagttggtatatttagtttgagagagggatattcacacttttaggttttgtttggatactctagtattcaccataattcacatgtgtgtgaggtggattgggggtgcacactatagtatccaaataagaccttagggtgcgtttggttggagagtcaattggaatggagtgactccattccagtttttgagaatggagtcatttcattctgtgtttggcaattacaacggaaacattctattttttgtttggttgaagactagaatagaatggagccgctccgttcattgtttggttagatagccatacaagtgtggagaagagaagaggaaggtgagcgctcacatccggtcgttttggtagagcgagaacattccaaatatttgtcatatatagactccaaatccgttccagaaaccaaacatctagaaaacagaaatagagctgctccattcttcctcgctcctcaaccaaac

SEQ ID NO: 12937 - DNA, 496 bp, Zea Mays
cagactacagagaggcggcttgcggcagcttgcgttcccttcgttgccgcctaccccacgcaacgcaacgcaacggatcgccaaatcaacttgagcttgagcatcccaccaatccactccccaacagcaatggacgccgcccagcgccgcgtcggtacccacctccagcgcccgccgccgcccgccgggggctacggcctcaccgtcaaccccaccgcggccgagtacgtccacgggctacagtgtcctcctccctgagaaattgcaaaccggcaggtggaacgtgtaccgatccgcgcgttcaccgttaaggctgataagtagattccctgacaccccagacattggaacgctgcatgacaatttcacgtaagacaccggggccaccaccccacttccatctggcctttttatcttgctttctttcctatctagcttctgtgaaaggttctgttattaccaacaacaatgtgatcggtttactgtttccctttat

SEQ ID NO: 12938 - DNA, 1823 bp, Zea Mays
caattcttcactcagggaaagggaagtcctcaacctttttgtcttccaaaacctgaagatgttgccactatctgttacactagtggcactactggcacaccgaagggagctgttctttctcatgggaacttaattgcaaatgtagcaggatcaagcctaaacattaagttttacccctccgatgtgtatatctcatatctgcctttggctcacatttacgagagggttaaccagattgcagcactgcactgtggtgttgccattggattctaccaaggggataatttgaagctcatggatgatctggctgctttgagaccgacaatattcgcaagtgttccccggttatataacagaatttatactgcgtaataaaactgattacaaatgctgtgaaggagtctggtgggctgaaagaaaaattgtttcatactgcatacaatgccaagagacaagcaatccttaaagggaaaaatccatccccagtgtgggataagttggtatttaacaaaataaaagctaggcttggtggacgagtgagacttatgagttcaggtgcttctccactgtcagcagatgtcatggaattcctgaggatatgctttggtggtgaagttcttgaaggctatggaatgacggagacatcctgtatcatatctgcaatggatattggtgacagatcaattggtcatgttggatccccaactgcatcttgtgaggtgaaacttgtggatgtcccagaaatgaattatacatctgatgatcaaccttatcctcgtggagaaatttgtgttagaggacctataatattccagggttactataaggatgaagttcaaacaaaagaagtcattgatgaagatggttggttgcacactggagacataggtctgtggctacctggaggacgtttaaagatcatcgataggaaaaagaacattttcaagttagctcaaggagaatacatagctccagagaagattgaaaatgtctatgccaaatgcaagttcattgcccaatgttttatatatggcgacagtttcaactcttccttagttggtattgttgcagttgaaccagaggttatgaaggcttgggctgcatctgaagggatccagtgcgaagacttgaggcagctttgtgctgaccctagagcaagagctgcagtcctggccgacatggattctgttgggaaggaagcacagctaagaggttttgaatttgctaaagctgttcggcttgtcgctgagccattcacagtggacaatggtctcctcaccccaacattcaaggtcaaaaggcagcaagcaaagacatactttgcaaaggaaatttcagatatgtacgcggagctgcgggaggcagaggcacccaggtcgaagttgtaatgatcaattcaaggagaagcgacatatacaggcttacagatcatatgtctagaagaaacgtaatcatctttttactggcgcagcaaataatggttcctgcaatggtcaggaagagtcgagacggaggcagtgcttggtgcaaatcatatagatgaatcctcgttatgaacctctcaactgaatgccgttttcccttgtccaacgtgccaagccacgttagcctgatactaggtagagaggaaaaagatattctgcaaatgtaacagtgaacagttaacaatcgtggtgtgttgttgcatatctagttgatcggaacgacctagagaaatgtgaagaacacgaagcgcctttctgtttgaatttaaataaggattattcgcgatggcaatctctcaatataatctactgctaagcaatcaaattgcttggacggtc

SEQ ID NO: 12939 - DNA, 1788 bp, Zea Mays
caattcttcactcagggaaagggaagtcctcaacctttttgtcttccaaaacctgaagatgttgccactatctgttacactagtggcactactggcacaccgaagggagctgttctttctcatgggaacttaattgcaaatgtagcaggatcaagcctaaacattaagttttacccctccgatgtgtatatctcatatctgcctttggctcacatttacgagagggttaaccagattgcagcactgcactgtggtgttgccattggattctaccaaggggataatttgaagctcatggatgatctggctgctttgagaccgacaatattcgcaagtgttccccggattacaaatgctgtgaaggagtctggtgggctgaaagaaaaattgtttcatactgcatacaatgccaagagacaagcaatccttaaagggaaaaatccatccccagtgtgggataagttggtatttaacaaaataaaagctaggcttggtggacgagtgagacttatgagttcaggtgcttctccactgtcagcagatgtcatggaattcctgaggatatgctttggtggtgaagttcttgaaggctatggaatgacggagacatcctgtatcatatctgcaatggatattggtgacagatcaattggtcatgttggatccccaactgcatcttgtgaggtgaaacttgtggatgtcccagaaatgaattatacatctgatgatcaaccttatcctcgtggagaaatttgtgttagaggacctataatattccagggttactataaggatgaagttcaaacaaaagaagtcattgatgaagatggttggttgcacactggagacataggtctgtggctacctggaggacgtttaaagatcatcgataggaaaaagaacattttcaagttagctcaaggagaatacatagctccagagaagattgaaaatgtctatgccaaatgcaagttcattgcccaatgttttatatatggcgacagtttcaactcttccttagttggtattgttgcagttgaaccagaggttatgaaggcttgggctgcatctgaagggatccagtgcgaagacttgaggcagctttgtgctgaccctagagcaagagctgcagtcctggccgacatggattctgttgggaaggaagcacagctaagaggttttgaatttgctaaagctgttcggcttgtcgctgagccattcacagtggacaatggtctcctcaccccaacattcaaggtcaaaaggcagcaagcaaagacatactttgcaaaggaaatttcagatatgtacgcggagctgcgggaggcagaggcacccaggtcgaagttgtaatgatcaattcaaggagaagcgacatatacaggcttacagatcatatgtctagaagaaacgtaatcatctttttactggcgcagcaaataatggttcctgcaatggtcaggaagagtcgagacggaggcagtgcttggtgcaaatcatatagatgaatcctcgttatgaacctctcaactgaatgccgttttcccttgtccaacgtgccaagccacgttagcctgatactaggtagagaggaaaaagatattctgcaaatgtaacagtgaacagttaacaatcgtggtgtgttgttgcatatctagttgatcggaacgacctagagaaatgtgaagaacacgaagcgcctttctgtttgaatttaaataaggattattcgcgatggcaatctctcaatataatctactgctaagcaatcaaattgcttggacggtc

SEQ ID NO: 12940 - DNA, 1787 bp, Zea Mays
caattcttcactcagggaaagggaagtcctcaacctttttgtcttccaaaacctgaagatgttgccactatctgttacactagtggcactactggcacaccgaagggagctgttctttctcatgggaacttaattgcaaatgtagcaggatcaagcctaaacattaagttttacccctccgatgtgtatatctcatatctgcctttggctcacatttacgagagggttaaccagattgcagcactgcactgtggtgttgccattggattctaccaaggggataatttgaagctcatggatgatctggctgctttgagaccgacaatattcgcaagtgttccccggttatataacagaatttatactgcgattacaaatgctgtgaaggagtctggtgggctgaaagaaaaattgtttcatactgcatacaatgccaagagacaagcaatccttaaagggaaaaatccatccccagtgtgggataagttggtatttaacaaaataaaagctaggcttggtggacgagtgagacttatgagttcaggtgcttctccactgtcagcagatgtcatggaattcctgaggatatgctttggtggtgaagttcttgaaggctatggaatgacggagacatcctgtatcatatctgcaatggatattggtgacagatcaattggtcatgttggatccccaactgcatcttgtgaggtgaaacttgtggatgtcccagaaatgaattatacatctgatgatcaaccttatcctcgtggagaaatttgtgttagaggacctataatattccagggttactataaggatgaagttcaaacaaaagaagtcattgatgaagatggttggttgcacactggagacataggtctgtggctacctggaggacgtttaaagatcatcgataggaaaaagaacattttcaagttagctcaaggagaatacatagctccagagaagattgaaaatgtctatgccaaatgcaagttcattgcccaatgttttatatatggcgacagtttcaactcttccttagttggtattgttgcagttgaaccagaggttatgaaggcttgggctgcatctgaagggatccagtgcgaagacttgaggcagctttgtgctgaccctagagcaagagctgcagtcctggccgacatggattctgttgggaaggaagcacagctgttcggcttgtcgctgagccattcacagtggacaatggtctcctcaccccaacattcaaggtcaaaaggcagcaagcaaagacatactttgcaaaggaaatttcagatatgtacgcggagctgcgggaggcagaggcacccaggtcgaagttgtaatgatcaattcaaggagaagcgacatatacaggcttacagatcatatgtctagaagaaacgtaatcatctttttactggcgcagcaaataatggttcctgcaatggtcaggaagagtcgagacggaggcagtgcttggtgcaaatcatatagatgaatcctcgttatgaacctctcaactgaatgccgttttcccttgtccaacgtgccaagccacgttagcctgatactaggtagagaggaaaaagatattctgcaaatgtaacagtgaacagttaacaatcgtggtgtgttgttgcatatctagttgatcggaacgacctagagaaatgtgaagaacacgaagcgcctttctgtttgaatttaaataaggattattcgcgatggcaatctctcaatataatctactgctaagcaatcaaattgcttggacggtc

SEQ ID NO: 12941 - DNA, 477 bp, Zea Mays
cgtacagtgcccttgagaggccagattaacagagctattacctttcatcgttaaaccttgcgttcactctcatcactctcccgttggatctacttgcccaggagagcaagctccaacacccaccttcatttgcacatgtgtaaagtctaaaatataaactaattaatgataacagcatgcatataagggaagttcttatgtcttttccatatctcaacaagttctcaattttatatatactttgatggagcaatgctagcttcttcatatgtcttcgcttggagatggagaggcccgacaccttcatatgttttcatcaactgctctcagctcagctgatgacgacgtcttagatgagttcatcttcttgtcatcgtcgctaatgataactctctcttgcagcatcttctccaaccgggcgttccaagccatctcctcctcgacctccttcctcaggctctgcaggacggtcatcag

SEQ ID NO: 12942 - DNA, 749 bp, Zea Mays
accgatttcctcccattcaattcgtaaatttcgtccatgcatgggcatggaatggatggatgtgaatgccacgaacgattccgccccgccggccaggctgcggcaacataatggtgagttaaaaggtggtgcaaaagcttcctctgccggcaggccttggaatctcgcatgccttgttgaaggatttgccaacagaagtgaagcaacttgactgcctgtcatgtgtcctggcgtataaccaactagttcatctatctttttcgagcctgtgagtttgaatcgaaatggaagatcgtctcccgaaaaattgcacggaaaagaactgagcttagcatgaagtcagtgttgcaacatcgagaagcagctttgagcagagtggaaacattcatggattgtagccacctaaaaatcaaatggcagtcaagttgagaccatttaatcacttgcactatgcaggtggcaggcatctaacttggagaaacataaccacttaagaatcctcctgtcttctagcagctcgtagcaaagataacttataatcttctgctgaacaatcaagatggctgctgctatgctttcttaacatgaaaaaccaagagtagccccagtgaaattctatgtttgatttttttttctatgaacaattgtttccgaacaataatatggatcatgcgacacccgtttgtaaatgtaaattatacttatgtattgtaatcacctatatttcttctcattcatcttggcctttc

SEQ ID NO: 12943 - DNA, 1242 bp, Zea Mays
accgatttcctcccattcaattcgtaaatttcgtccatgcatgggcatggaatggatggatgtgaatgccacgaacgattccgccccgccggccaggtgagagatgagcctcacggcggccttccgtgccaccaaaatcccgcgcgctcttcctccaaagtgcggtgagcctgccgcctcctcctcggcctcggcgtccggggatccgccgccgggggccgcgaagagtactaaggcgccgccgccgtggtgcgtgtaccttatagcctcatcccggatccgccgcacgtacgtcggcgtcaccaccgatttccctcgccggtgattcctcgccctgctctacctgcctcccccgttcctttccccacttgcttgtctcggatagtcgtcatatggttgcagcaagctaagttcgtgtggtgttagcatttggagaagactacggttggagttgcagaaccacaagaaattgaccccatccggttgtgcttgttgcaggacagtgtggctctatctcgttagggctgaaatttgattgctttgcttcaatttagtacttcttgttttgtattcatactctgagtcgccttgctctggtttgcaggatacacatgcttgaaaatgcaaatttaattcacagtttttcaataggctgcggcaacataatggtgagttaaaaggtggtgcaaaagcttcctctgccggcaggccttggaatctcgcatgccttgttgaaggatttgccaacagaagtgaagcctgtgagtttgaatcgaaatggaagatcgtctcccgaaaaattgcacggaaaagaactgagcttagcatgaagtcagtgttgcaacatcgagaagcagctttgagcagagtggaaacattcatggattgtagccacctaaaaatcaaatggcagtcaagttgagaccatttaatcacttgcactatgcaggtggcaggcatctaacttggagaaacataaccacttaagaatcctcctgtcttctagcagctcgtagcaaagataacttataatcttctgctgaacaatcaagatggctgctgctatgctttcttaacatgaaaaaccaagagtagccccagtgaaattctatgtttgatttttttttctatgaacaattgtttccgaacaataatatggatcatgcgacacccgtttgtaaatgtaaattatacttatgtattgtaatcacctatatttcttctcattcatcttggcctttc

SEQ ID NO: 12944 - DNA, 974 bp, Zea Mays
accgatttcctcccattcaattcgtaaatttcgtccatgcatgggcatggaatggatggatgtgaatgccacgaacgattccgccccgccggccaggtgagagatgagcctcacggcggccttccgtgccaccaaaatcccgcgcgctcttcctccaaagtgcggtgagcctgccgcctcctcctcggcctcggcgtccggggatccgccgccgggggccgcgaagagtactaaggcgccgccgccgtggtgcgtgtaccttatagcctcatcccggatccgccgcacgtacgtcggcgtcaccaccgatttccctcgccggctgcggcaacataatggtgagttaaaaggtggtgcaaaagcttcctctgccggcaggccttggaatctcgcatgccttgttgaaggatttgccaacagaagtgaagcaacttgactgcctgtcatgtgtcctggcgtataaccaactagttcatctatctttttcgagcctgtgagtttgaatcgaaatggaagatcgtctcccgaaaaattgcacggaaaagaactgagcttagcatgaagtcagtgttgcaacatcgagaagcagctttgagcagagtggaaacattcatggattgtagccacctaaaaatcaaatggcagtcaagttgagaccatttaatcacttgcactatgcaggtggcaggcatctaacttggagaaacataaccacttaagaatcctcctgtcttctagcagctcgtagcaaagataacttataatcttctgctgaacaatcaagatggctgctgctatgctttcttaacatgaaaaaccaagagtagccccagtgaaattctatgtttgatttttttttctatgaacaattgtttccgaacaataatatggatcatgcgacacccgtttgtaaatgtaaattatacttatgtattgtaatcacctatatttcttctcattcatcttggcctttc

SEQ ID NO: 12945 - DNA, 701 bp, Zea Mays
gccttatccccaaatcgcttcttctctgttgattccgtggtgcatcagccgagctcctcaccctggccgatacatggtgctcgtctctagctcatgtcttgcaaccggccgagcccctccccagcgcccttggagccgacgtcctctgccctcatctccttccccgacgtcgccctctccccatcggtgctctgcaagtcggtgtcttctccctgcccgacgtttctggcgccatggctgccgcgcctcgggttgcctgctccactgcgccgatccgcccatctccctactgccgctctcccatggcgcgtccctgcatcttgcttcagctcgctctgccatctcccttggcgccctatccccaacgccgagctccctacctgactgtgcccctagtggttgagctcgtcgagcttccttttctatcgctcgtcctcgcccattcggcgccctcatctcaagccagtccagcctctctactcgccactctcccctatccccttgctgttagcacatggcgagctaaccccaagtgctagtagagttcgtcattccctgagcaacacctccctccatggatgcctcgttgtcgacttgtgcagttcatatttatcggatttggtggagaagaagcacaattcaatttgacgcccgccaggtgttcgacgaaatgttcgaattgggtttcgtcgttgatattg

SEQ ID NO: 12946 - DNA, 701 bp, Zea Mays
gccttatccccaaatcgcttcttctctgctgattccatggtgcatcagccgagctcctctccctggccgatccatggtgctcgtctctagctcatgtcttgccgccagccgagcccctccccagcgcccttggaacctgcgtcctctgccctcatctccttccccgacgccgccctctccccctcggtgctctgctggtcggcgtcttcttcctgcccgacatttttagcgccatggccgccgcgcctcgggtcgcctgctccactgcgtcgatccgcccatctccctgttgccgctctcccatggcgcgtccctgcatcttgcttcagctcgctctgccatctcccttggcgccctagctccaacaccgagctccctacccggccgcgccccttgtggttgagctcgtcgagcttccttttctatcgctcgtcctcgcccattcgttgccctcatctcaagccagtccagcctctctactcgccactgtcccctatccccttgttgttagcacatggtgagctaaccccatgtgctagtagagttcgtcattccctaagcagcacctccctccatggatgcctcgttgtcgacttgtgcagttcatatttatcggatttggtggagaagaagcacaattcaatttgacgcccaccaggtgttcgatgaaatgttcgaattgggttccgtcgttgatattg

SEQ ID NO: 12947 - DNA, 1917 bp, Zea Mays
tgggaagccgccattggggaagtacaagttggacgggctccctcggccgccgccgccgccgccgccgttccctttcctcgcctcaccggcggccaccgcggcagccgccatctcctggccctggtacatgagcgtggagttcatcgtcaggctcaccaagctgtcgtcggcgtcgctcctggggaagttgccgccgccgccgccgtcgcttcccccggcgtcgtcgccggcggcgtcgacgtcgcgcgtggtcaccatcaccgcggactgcacgagctcaaggcagagcctgagcttgttgggctcgatgtgcgtgagccccggcacggcgcccttgaacaggaactctgatgtgaggcctcggagcacgtcgagcggggtgacgccgtcgagcgtcctggcgctggggtcggcgtggtggtcaagcagcacggacaccatatcgggggagaccatctcggcggccaggtgcagcgcggtcttccccgtggggccggcgcgggagttgacgtcggcggcgccgagctccagcagcgccttgacgacgtcgcggccgcagtgctggacagcgtagtgcacggcgagcgcgtcgtcgaggtccagcccctcgcccatgaccatgagcttgacgagctcgatgtcggcggcgtcgagcgcgcgccgcatgcgccggatcttgtggtcgcggtcggcggccgacgacgccgcgttgatggggaggtagtggtgggtgaggaacggcgagcgcggcgcgccggcggggacgggggacttggcgcggatctcctcgatcttggccaccacgtcgatggggaggtgcttggcgagcaggtcggcggagaggcccgagcgcgccaccaggtgggagcaggtggcccacagctcctgcatctcgaacttgcgcgacgccatcagcaccttcatcacgtcgtccaccgacgcctccttcaccatgctctccagctgcttctgcgcagcgcgggatagaggacaaaaggcaggcaggtgttaattagagtacgagcgagcaagcagcataaaatgcagcggcttggtggctggctgctctgctaattcagaatccaagaaaccctagcaaggaacgaatgcaaattgcaatggcgcgcggatgtgatgtgaggaagggaagggcagtgagcagacacatagcacaagggcgtgacagtgtgacaagatccttcctagtagtaaagaaagaagatgagtcgggcagccggcaggctcttcgattccatccatccatgaagtgatggcacacggagacgtggtacagacaggccaagaagcggcagaaaagcaaaggagactgtgagggagcagagacgacgactagccagtccactccagtccctgggctgcacgcagctagcctgcctgccctgccactgccccgtctcctcccctctcctctcctctccttcctccggctggccatgcatatgcatcctcttccctctcagattccacacacagacacacacgacacgacccacacatactgaagcaataaaaagaagaaaaaaatcaacagaaatgtaacgatggaggccaagaactggcgcaggctctagagaacacagtacgtggtcgtcgtcctcctcctgatgcctgtcacctgtcccatggaatcagaaaggcgcggaaagtggcagagatgacgacgacgacctagggatctagttcgagatcctggagcatgcatgcaggagggaatcgatcaggaggtgcaggccgtggatggtgctcatccgacttgtatatcgacctcgaattgatgtcatgccatgccatacacgcgcgcgcacacacacgtacgggaaattaagatcgatccagtctgcccccaggccccagctagcccatcccactcccacccacctggaccaggagcgcgag

SEQ ID NO: 12948 - DNA, 1002 bp, Zea Mays
gttgtgactccttgcgggctgcgagcctgcgagaccgaatcgatctgcatcgccccgccccgccccgccccgtgcgccaatgttcctgcggcggctgagaacgtccgccgccgtccgccggggcgcgaccgacggcgcagtcctggccgccgtccgcgccgagctggccctcgagctctcctcctcggctccccctccattccgttccgagctggcgcccgacttcgacaccgtgtctgacgccccgcgcgcgcaggacgtgctcctgcgccgccgggacgggtccgaggaggtcctcgtgtcggcgctgctcgccccgctgcggttcgtgggccgagacccgctgcccagggccgcgctcgtcaaggtcttcgtcagtaagcctggcgcggcgcccgtcctgcacttcgactgccgtgcgtcttgggtgggggaggaggagcgcggcggcggcgctgctgactacgctatcaacgctgtccggtaccactcctctcctggcgccggtggagcagacgagtacgaagggccggcgttcagatcatggtatgccggttcaccaaggaatcataaacgatagatctggatcctcggctacaggctgctttacgagagtatctggtagcgagaggcttcaactccaagctggcaagttcgattcttcaacacctccttcagaaggagcgcaaccagtatgtgaattggctgaagactttggaagaggcgttcgccaaacatcactgacccaatgaaacgattagtggatccttctacatagcctggatttggcactctactatccttcagtgcctcccattggaaaaatccggccagagtgtaaaccttctacgtctattttccatgaccaaagctgtcgtgttctttcccatttaacactagaggtattcgatgactgcgatacagttttgcagagagctcggccaagactcctaaagtttaccgacagaaggaaatacggacaattatcttcataactagcgg

SEQ ID NO: 12949 - DNA, 3348 bp, Zea Mays
gggtgaccgtgatgctctggtgtgtgatgcggcaatgggggaggtgtgagatatttatgatccccatggcggagacgctctggtgtgccgacaatatcactattgaccttgaggagcaagaatgaccgccatcaacattcagaacccacgtcttctcatcaaggagatggaggtgggaggagaggtcctggatacgccaaggggagcctacgggacgtccccatggccgatatgctgcgataggatgaaggatggtggggttcttgtaggtggactgaaggaatatctcaaaacaattaggcgctgcagaaaagggtgggttttattttattggttgtggaacaagttacaatgctgccttagctgcaagaccctttttgtggaagaactgactggtattcctgtgactatggaggttgcaagcgacttgctggacagacaaggtcccatctacagagaagacgccgcagtttttgttagtcagtctggagagacagcagataccctccttgcattgctcttgattatgctctagaaaatggacctctccgtgttggcatcacgaaatactgttggaatcacactgtctagaagaacgcactgcggagtccatatcaatgctgattgccggtacaaaggcatatacaagtcaaatagtagcaatggtgatgatggcgttggctatcggatccgaccaataatatatctactcgagctagaaggaaaattatcatcagtggacttaacaacctttcaagtacgtcgaacttactagatccttgtgctatggctgcagtcaagcaaaaaggctgtttctgacgcatgcttcagcaagcagcagtcggtgatccagcagctcctctcgcgcaaggggacgccgccgatagtgatgtgctcgaggggggacgccaccgcgctgctgtatgccccagtggatcctgcagagtcattgaagttccggaggttgcatgttgtctccagccagtgattaacataatcccattacagttgctcgcgtacaatctgactgttctccagggattcgatgtggaccaaccacggaatctggagaagagcgtgaccacgcagtaggtagagaggtggaagtggatgatgagatgcgcgaacgatttgtacccctatgtcgtgttgtgtagggttctaggagagagcaagccggctatagctgttggttagtcattttcttttgtgtaatgtaattattactgttcttgaggtagctagtactatcattactctacgttaaacaagtcgttgtgaaatgcatggtacaaaaggtatcatttgagaaacaagtgtgtttttcataccgattgggcgatataaatctcgtaaacttgtaattctgatctctcaaatttgaggcgtctggcaaaggtacaaaatcaaaaccctcaaaaatctgacggcagaaattttccgacgaacattgtatcagagttttctctccttatttcctgtaagaacatgacggtcatttctttttacagggcattgagccccctgatattccagtacaacagtctaatactccaaattctaaaacaggagctgagatattcatgtatgacatctcgtcggcgtcttcttctgcctcctgtcctccggcctcatctggcctttgctgcggccatacgtattcatgtatgccatatgatcgacggcctccccctgtataaccctccagggctaatcttgctctgggctttcatgtggatttggtgatattgagtcagtttaaatccataataaattaaaatccacctcaatacatctcaatcctataaccgaacaaggcctcatcgttggttgaagctccagctattctctaaaaatcaaatatggtggtaaggatgaagatgaacagttggaacacttttctgaataggtaaaattttcagcccactcatgtgtgagccaccgtcagcattggatcggctgttctttttatatctgtagtagggcctcttatcatttcaaactgatgggtgatctcaaggacctcagggggtagctgagaacacactgacctgaatcttcgacggaagaaacttgaagatatcatagatcttataaggaggaaagaagagttgaaagctggttagatgtatatgattcccaataataaatttgacctgtgcatatcacaatactactaatcaccgaataccatgcataaatgtcgattagttgagatctgcagtttctttcctgattcagcctaggagtacttaacagtttattggaactagtctgattcagccctagagtagcaagggagcctaagccgcaagaaaatgtgtattgtagcaacctgtgcatgtgtcctggtgttagtttcttctgaacggacattgaacttacagtacaaattttcagaattttgcagcaggttcaagcacaagcacgcttcatcatcaacaaattaagtgcaaaccaaccttatttgctgaaaatggataatatggtttacgtatcacaaaccagcaggttgatttgaatttaatttattgtcgatgaagcgtgcttgtgcttaaaactgctgcaaagttctaaaaaattgcactgttaagttcaatgtccgctctgaagaaactaacaccagaacacatgcacaggttggaacaatccacatttttgcagcttaggctcccttgttgctccagtgctgaattagaccagttccaataagccgttaaagtactcctaggctgaatcaggaaataaactgcatacctcaactaatcgatatttatgtatggtacgcgagcaattgaaccaaaaaaacagcagaatttgttcagtgaacagtgaactgtaccaaaaaaaaatatgacaaaacaagcttagacaaacaaacctgtaatgggattatgttaatcactggctggagacaatctacaaactctagaacttgaatgactctgcaggatccactggggcatacagcagaggcgtccccctcgaacacatcactatcaggcgccccttgcgccagaggagctgctggatcaccgactgctgcttgctgcaagacacgaggtggggaaccaaccagcttcagccttcaggggtttcttggtattaagcacaaccaaaactgacgaggcccttttcgaaacatttatttggccaaaacaaaagcatttaagaaagtgggagaattcttcaaaacctagaaatacttgtgcaaattcaattcttgtactttcgaccaaaaacaaaagactttgaaaagtttttatcaaaaaataaaaaacaaatgctaagtgatgcaaataaggtccaaaattttattgttcagactatacacaatttgagttgaat

SEQ ID NO: 12950 - DNA, 3371 bp, Zea Mays
gggtgaccgtgatgctctggtgtgtgatgcggcaatgggggaggtgtgagatatttatgatccccatggcggagacgctctggtgtgccgacaatatcactattgaccttgaggagcaagaatgaccgccatcaacattcagaacccacgtcttctcatcaaggagatggaggtgggaggagaggtcctggatacgccaaggggagcctacgggacgtccccatggccgatatgctgcgataggatgaaggatggtggggttcttgtaggtggactgaaggaatatctcaaaacaattaggcgctgcagaaaagggtgggttttattttattggttgtggaacaagttacaatgctgccttagctgcaagaccctttttgtggaagaactgactggtattcctgtgactatggaggttgcaagcgacttgctggacagacaaggtcccatctacagagaagacgccgcagtttttgttagtcagtctggagagacagcagataccctccttgcattgctcttgattatgctctagaaaatggacctctccgtgttggcatcacgaaatactgttggaatcacactgtctagaagaacgcactgcggagtccatatcaatgctgattgccggtacaaaggcatatacaagtcaaatagtagcaatggtgatgatggcgttggctatcggatccgaccaataatatatctactcgagctagaaggaaaattatcatcagtggacttaacaacctttcaagtacgtcgaacttactagatccttgtgctatggctgcagtcaagcaaaaaggctgtttctgacgcatgcttcagcaagcagcagtcggtgatccagcagctcctctcgcgcaaggggacgccgccgatagtgatgtgctcgaggggggacgccaccgcgctgctgtatgccccagtggatcctgcagagtcattgaagttccggaggttgcatgttgtctccagccagtgattaacataatcccattacagttgctcgcgtacaatctgactgttctccagggattcgatgtggaccaaccacggaatctggagaagagcgtgaccacgcagtaggtagagaggtggaagtggatgatgagatgcgcgaacgatttgtacccctatgtcgtgttgtgtagggttctaggagagagcaagccggctatagctgttggttagtcattttcttttgtgtaatgtaattattactgttcttgaggtagctagtactatcattactctacgttaaacaagtcgttgtgaaatgcatggtacaaaaggtatcatttgagaaacaagtgtgtttttcataccgattgggcgatataaatctcgtaaacttgtaattctgatctctcaaatttgaggcgtctggcaaaggtacaaaatcaaaaccctcaaaaatctgacggcagaaattttccgacgaacattgtatcagagttttctctccttatttcctgtaagaacatgacggtcatttctttttacagggcattgagccccctgatattccagtacaacagtctaatactccaaattctaaaacaggagctgagatattcatgtatgacatctcgtcggcgtcttcttctgcctcctgtcctccggcctcatctggcctttgctgcggccatacgtattcatgtatgccatatgatcgacggcctccccctgtataaccctccagggctaatcttgctctgggctttcatgtggatttggtgatattgagtcagtttaaatccataataaattaaaatccacctcaatacatctcaatcctataaccgaacaaggcctcatcgttggttgaagctccagctattctctaaaaatcaaatatggtggtaaggatgaagatgaacagttggaacacttttctgaataggtaaaattttcagcccactcatgtgtgagccaccgtcagcattggatcggctgttctttttatatctgtagtagggcctcttatcatttcaaactgatgggtgatctcaaggacctcagggggtagctgagaacacactgacctgaatcttcgacggaagaaacttgaagatatcatagatatatattagttgaaggcaagtaccttataaggaggaaagaagagttgaaagctggttagatgtatatgattcccaataataaatttgacctgtgcatatcacaatactactaatcaccgaataccatgcataaatgtcgattagttgagatctgcagtttctttcctgattcagcctaggagtacttaacagtttattggaactagtctgattcagccctagagtagcaagggagcctaagccgcaagaaaatgtgtattgtagcaacctgtgcatgtgtcctggtgttagtttcttctgaacggacattgaacttacagtacaaattttcagaattttgcagcaggttcaagcacaagcacgcttcatcatcaacaaattaagtgcaaaccaaccttatttgctgaaaatggataatatggtttacgtatcacaaaccagcaggttgatttgaatttaatttattgtcgatgaagcgtgcttgtgcttaaaactgctgcaaagttctaaaaaattgcactgttaagttcaatgtccgctctgaagaaactaacaccagaacacatgcacaggttggaacaatccacatttttgcagcttaggctcccttgttgctccagtgctgaattagaccagttccaataagccgttaaagtactcctaggctgaatcaggaaataaactgcatacctcaactaatcgatatttatgtatggtacgcgagcaattgaaccaaaaaaacagcagaatttgttcagtgaacagtgaactgtaccaaaaaaaaatatgacaaaacaagcttagacaaacaaacctgtaatgggattatgttaatcactggctggagacaatctacaaactctagaacttgaatgactctgcaggatccactggggcatacagcagaggcgtccccctcgaacacatcactatcaggcgccccttgcgccagaggagctgctggatcaccgactgctgcttgctgcaagacacgaggtggggaaccaaccagcttcagccttcaggggtttcttggtattaagcacaaccaaaactgacgaggcccttttcgaaacatttatttggccaaaacaaaagcatttaagaaagtgggagaattcttcaaaacctagaaatacttgtgcaaattcaattcttgtactttcgaccaaaaacaaaagactttgaaaagtttttatcaaaaaataaaaaacaaatgctaagtgatgcaaataaggtccaaaattttattgttcagactatacacaatttgagttgaat

SEQ ID NO: 12951 - DNA, 3295 bp, Zea Mays
tatcactattgaccttgaggagcaagaatgaccgccatcaacattcagaacccacgtcttctcatcaaggagatggaggtgggaggagaggtcctggatacgccaaggggagcctacgggacgtccccatggccgatatgctgcgataggatgaaggatggtggggttcttgtaggtggactgaaggaatatctcaaaacaattaggcgctgcagaaaagggtattcctgtgactatggaggttgcaagcgacttgctggacagacaaggtcccatctacagagaagacgccgcagtttttgttagtcagtctggagagacagcagataccctccttgcattgctcttgattatgctctagaaaatggacctctccgtgttggcatcacgaaatactgttggaatcacactgtctagaagaacgcactgcggagtccatatcaatgctgattgccggtacaaaggcatatacaagtcaaatagtagcaatggtgatgatggcgttggctatcggatccgaccaataatatatctactcgagctagaaggaaaattatcatcagtggacttaacaacctttcaagtacgtcgaacttactagatccttgtgctatggctgcagtcaagcaaaaaggctgtttctgacgcatgcttcagcaagcagcagtcggtgatccagcagctcctctcgcgcaaggggacgccgccgatagtgatgtgctcgaggggggacgccaccgcgctgctgtatgccccagtggatcctgcagagtcattgaagttccggaggttgcatgttgtctccagccagtgattaacataatcccattacagttgctcgcgtacaatctgactgttctccagggattcgatgtggaccaaccacggaatctggagaagagcgtgaccacgcagtaggtagagaggtggaagtggatgatgagatgcgcgaacgatttgtacccctatgtcgtgttgtgtagggttctaggagagagcaagccggctatagctgttggttagtcattttcttttgtgtaatgtaattattactgttcttgaggtagctagtactatcattactctacgttaaacaagtcgttgtgaaatgcatggtacaaaaggtatcatttgagaaacaagtgtgtttttcataccgattgggcgatataaatctcgtaaacttgtaattctgatctctcaaatttgaggcgtctggcaaaggtacaaaatcaaaaccctcaaaaatctgacggcagaaattttccgacgaacattgtatcagagttttctctccttatttcctgtaagaacatgacggtcatttctttttacagggcattgagccccctgatattccagtacaacagtctaatactccaaattctaaaacaggagctgagatattcatgtatgacatctcgtcggcgtcttcttctgcctcctgtcctccggcctcatctggcctttgctgcggccatacgtattcatgtatgccatatgatcgacggcctccccctgtataaccctccagggctaatcttgctctgggctttcatgtggatttggtgatattgagtcagtttaaatccataataaattaaaatccacctcaatacatctcaatcctataaccgaacaaggcctcatcgttggttgaagctccagctattctctaaaaatcaaatatggtggtaaggatgaagatgaacagttggaacacttttctgaataggtaaaattttcagcccactcatgtgtgagccaccgtcagcattggatcggctgttctttttatatctgtagtagggcctcttatcatttcaaactgatgggtgatctcaaggacctcagggggtagctgagaacacactgacctgaatcttcgacggaagaaacttgaagatatcatagatctgcaaagggcacatgtcagttgaagtcaagcagcttataagctatgaaaagacatctgcatagggcacattgtgccagttaaaggcaaacaacttacatatattagttgaaggcaagtaccttataaggaggaaagaagagttgaaagctggttagatgtatatgattcccaataataaatttgacctgtgcatatcacaatactactaatcaccgaataccatgcataaatgtcgattagttgagatctgcagtttctttcctgattcagcctaggagtacttaacagtttattggaactagtctgattcagccctagagtagcaagggagcctaagccgcaagaaaatgtgtattgtagcaacctgtgcatgtgtcctggtgttagtttcttctgaacggacattgaacttacagtacaaattttcagaattttgcagcaggttcaagcacaagcacgcttcatcatcaacaaattaagtgcaaaccaaccttatttgctgaaaatggataatatggtttacgtatcacaaaccagcaggttgatttgaatttaatttattgtcgatgaagcgtgcttgtgcttaaaactgctgcaaagttctaaaaaattgcactgttaagttcaatgtccgctctgaagaaactaacaccagaacacatgcacaggttggaacaatccacatttttgcagcttaggctcccttgttgctccagtgctgaattagaccagttccaataagccgttaaagtactcctaggctgaatcaggaaataaactgcatacctcaactaatcgatatttatgtatggtacgcgagcaattgaaccaaaaaaacagcagaatttgttcagtgaacagtgaactgtaccaaaaaaaaatatgacaaaacaagcttagacaaacaaacctgtaatgggattatgttaatcactggctggagacaatctacaaactctagaacttgaatgactctgcaggatccactggggcatacagcagaggcgtccccctcgaacacatcactatcaggcgccccttgcgccagaggagctgctggatcaccgactgctgcttgctgcaagacacgaggtggggaaccaaccagcttcagccttcaggggtttcttggtattaagcacaaccaaaactgacgaggcccttttcgaaacatttatttggccaaaacaaaagcatttaagaaagtgggagaattcttcaaaacctagaaatacttgtgcaaattcaattcttgtactttcgaccaaaaacaaaagactttgaaaagtttttatcaaaaaataaaaaacaaatgctaagtgatgcaaataaggtccaaaattttattgttcagactatacacaatttgagttgaat

SEQ ID NO: 12952 - DNA, 1747 bp, Zea Mays
cgaaaaacacatccgcccctggtctgcccgtcgcgctcgcgcctccgttctctccccgttcgccgctcggttgcttccgccgccgcttcccctggctgcctcgtgtactggtcgagctcaagcgccccatttcgggctgggtccgggaacctcgaatctatctcctaaccctatcaagctagctagctgcgatgccgagcttccctccgccgggcgccgtcaccatctgcgagatcaaccgcgacctcgttgcggtggatgccctctccgacgaccgcgccaaggacgcatatggggatgtcctcgggatggtgttcgccccgattccgttccagccggaggctcttcttctcgccagccgcgagcctgctgctcctgccgcggaccaagtcgagcctgctgacactgtgcccaccgctggtttggcagccaccatatccgacttcttcaggcggatggtcttccctccactagacccaaatctgctagaagaatttgacacgcagaaagtaagttggaatccatacaagcattgcttagcattcgtgtctgggaagaaccaggttactgtccaagactttgaggactcagatgctaaagaaccatgcattttaacaaatgatcatcaaacggatgttaaggctgttgagtggagaccaaatagtgggaagatgattgcagttgcctgcaaaggagggatatgcctctggtcggcatcatatcctggcaatgtcccattcatgaaatctggggtcacttcttcttcctttagtgccttccctagaggttctggtggtcagtggatacttgtggatgttcttcgtggctcttctgctgagctcgttagtgcactttgttggaaacctgatggaagatacttggcatctgcctcatgtaatagttcatctttcacaatttgggatgtgtctcaagggttgggaactcctatacggcgtggattaagcaatatatcattagtgcggtggtcacccagtggagattaccttctagttgctaaatttgatggtacttttcacttctgggagacaaacacatggacttcagaaccctggtcttcgtctaatggatatgtgtctggagcaaattgggacccagaaggtcgagttgcattattatccttttctaactcgacgacgcttggttcaattcacttctcatcgaagccaccatctttagatgctcacctcctaccagttgaacttccagaaatttcctccctgattgttagccgaggcatagagaaattagcatgggacgcatcgggggaacgtctggcactgtcgttcagagatggaaacgaaatgtaccgtggcctgatcgcgatatatgacgtgcggagatctccactcgtctcactatcactagttgggttcatccggggacctggagaaggagcaaagccgctcgcctttgcttttcatagcaagtttaagcaggggccattgctttccgtgtgttggagcagtggctggtgctgtacgtatccgctgatacttcgtcctcgttgactccagtcacctcgccggttcaggactgaatgttgctgacgacttggaagaccgaacgcttcgatgtgcctgctaggagaaatgcaaagctcgagttgctgcattgtgacgttgtggctcgagaaatggcgcccttttggacagtcatctccagatgtgtttgattggatatattgatgacacgagggtcgatgccggtgctcgcggcgagatcagcg

SEQ ID NO: 12953 - DNA, 1774 bp, Zea Mays
acacatccgcccctggtctgcccgtcgcgctcgcgcctccgttctctccccgttcgccgctcggttgcttccgccgccgcttcccctggctgcctcgtgtactggtcgagctcaagcgccccatttcgggctgggtccgggaacctcgaatctatctcctaaccctatcaagctagctagctgcgatgccgagcttccctccgccgggcgccgtcaccatctgcgagatcaaccgcgacctcgttgcggtggatgccctctccgacgaccgcgccaaggacgcatatggggatgtcctcgggatggtgttcgccccgattccgttccagccggaggctcttcttctcgccagccgcgagcctgctgctcctgccgcggaccaagtcgagcctgctgacactgtgcccaccgctggtttggcagccaccatatccgacttcttcaggcggatggtcttccctccactagacccaaatctgctagaagaatttgacacgcagaaagtaagttggaatccatacaagcattgcttagcattcgtgtctgggaagaaccaggttactgtccaagactttgaggactcagatgctaaagaaccatgcattttaacaaatgatcatcaaacggatgttaaggctgttgagtggagaccaaatagtgggaagatgattgcagttgcctgcaaaggagggatatgcctctggtcggcatcatatcctggcaatgtcccattcatgaaatctggggtcacttcttcttcctttagtgccttccctagaggttctggtggtcagtggatacttgtggatgttcttcgtggctcttctgctgagctcgttagtgcactttgttggaaacctgatggaagatacttggcatctgcctcatgtaatagttcatctttcacaatttgggatgtgtctcaagggttgggaactcctatacggcgtggattaagcaatatatcattagtgcggtggtcacccagtggagattaccttctagttgctaaatttgatggtacttttcacttctgggagacaaacacatggacttcagaaccctggtcttcgtctaatggatatgtgtctggagcaaattgggacccagaaggtcgagttgcattattatccttttctaactcgacgacgcttggttcaattcacttctcatcgaagccaccatctttagatgctcacctcctaccagttgaacttccagaaatttcctccctgattgttagccgaggcatagagaaattagcatgggacgcatcgggggaacgtctggcactgtcgttcagagatggaaacgaaatgtaccgtggcctgatcgcgatatatgacgtgcggagatctccactcgtctcactatcactagttgggttcatccggggacctggagaaggagcaaagccgctcgcctttgcttttcatagcaagtttaagcaggggccattgctttccgtgtgttggagcagtggctggtgctgtacgtatccgctgatacttcgtcctcgttgactccagtcacctcgccggttcaggactgaatgttgctgacgacttggaagaccgaacgcttcgatgtgcctgctaggagaaatgcaaagctcgagttgctgcattgtgacgttgtggctcgagaaatggcgcccttttggacagtcatctccagatgtgtttgattggatatgtatgtatgcttatgctgattttagcggggttttttttccctctggccatggatcgcccttttggacagtcatctccag

SEQ ID NO: 12954 - DNA, 1499 bp, Zea Mays
cacagctcaacataacttgaagccaaatctgctagaagaatttgacacgcagaaagtaagttggaatccatacaagcattgcttagcattcgtgtctgggaagaaccaggttactgtccaagactttgaggactcagatgctaaagaaccatgcattttaacaaatgatcatcaaacggatgttaaggctgttgagtggagaccaaatagtgggaagatgattgcagttgcctgcaaaggagggatatgcctctggtcggcatcatatcctggcaatgtcccattcatgaaatctggggtcacttcttcttcctttagtgccttccctagaggttctggtggtcagtggatacttgtggatgttcttcgtggctcttctgctgagctcgttagtgcactttgttggaaacctgatggaagatacttggcatctgcctcatgtaatagttcatctttcacaatttgggatgtgtctcaagggttgggaactcctatacggcgtggattaagcaatatatcattagtgcggtggtcacccagtggagattaccttctagttgctaaatttgatggtacttttcacttctgggagacaaacacatggacttcagaaccctggtcttcgtctaatggatatgtgtctggagcaaattgggacccagaaggtcgagttgcattattatccttttctaactcgacgacgcttggttcaattcacttctcatcgaagccaccatctttagatgctcacctcctaccagttgaacttccagaaatttcctccctgattgttagccgaggcatagagaaattagcatgggacgcatcgggggaacgtctggcactgtcgttcagagatggaaacgaaatgtaccgtggcctgatcgcgatatatgacgtgcggagatctccactcgtctcactatcactagttgggttcatccggggacctggagaaggagcaaagccgctcgcctttgcttttcatagcaagtttaagcaggggccattgctttcctgttggagcagtggctggtgctgtacgtatccgctgatacttcgtcctcgttgactccagtcacctcgccggttcaggactgaatgttgctgacgacttggaagaccgaacgcttcgatgtgcctgctaggagaaatgcaaagctcgagttgctgcattgtgacgttgtggctcgagaaatggcgcccttttggacagtcatctccagatgtgtttgattggatatgtatgtatgcttatgctgattttagcggggttttttttccctctggccatacatggatcgcccttttggacagtcatctccagatcgcccacgctagtttttttttattattttagaactccagcaggcagaagcatgccatattgccccacgggttgaaccgaggaggccttctctctaccaccatcaccagatgcaaaatctgggatcgtcagtgctgtcaaaaaaaaattatagcaatctgaaaacttcatt

SEQ ID NO: 12955 - DNA, 541 bp, Zea Mays
ccacctctggatcgaacctgtgcatcgggtttttttttgtgcctggctctatcaaatgtgttccactcgacggttttcttcgcaccggccgagcacccccatgttctagaagcttctcccttgcgtgaatgtagcaatagactccggcagttgggatctcctggcagcgaatcataacaaattttgtcccaaaatctaatctccgtagcgaagctgtcattgtttgttgcgattatcccggtagatttcgactcagactcgattccatcctgcgattataaaagtccagccaccatagccatgcgagcagcgcacgtcggagagggagctcgggtgtcgtcgagtgcggaaccagggagccccgtcgtccggggggcttcaccgcgccgcgctggtcaggtccgtggctttggccgggcaggttttcgcccagaattgcggattgggcggaccttctgtcacggagcttcttctcgtcgcgagccgcaccgattgtgcccggattcgtgtgaggttacgaatctcgaagagcaagttggta

SEQ ID NO: 12956 - DNA, 733 bp, Zea Mays
gtcattgtttgttgcgattatcccggtagatttcgactcagactcgattccatcctgcgattataaaagtccagccaccatagccatgcgagcagcgcacgtcggagagggagctcgggtgtcgtcgagtgcggaaccagggagccccgtcgtccggggggcttcaccgcgccgcgctggtcaggtccgtggctttggccgggcaggttttcgcccagaattgcggattgggcggaccttctgtcacggagcttcttctcgtcgcgagccgcaccgattgtgcccggattcgtgtcttggagcagtggctggtgctgtacgtatccgctgatacttcgtcctcgttgactccagtcacctcactggttcaggactgaatgttgctggcgacttggaagaccgaacgcttcgatgtgcctgctaggagaaatgcaaagctcgagttgctgcattgtgacgttgtggctcgagaaatggcgcccttttggacagtcatctccagttgtgtttgattttaccgggtcttcttttttttccctggccatacatggatcttagttgcgcaacgttggtctgggattgtgcacaagtcatcatggacgtttgtggcaaaattctactagcatggatatctggactcgggtactactacgcagacggcagaccttgttgtattgtatctttgcttcacatctctgccacacgttcgaactccagagccagcaaagcctgc

SEQ ID NO: 12957 - DNA, 1325 bp, Zea Mays
cagcccaccaacgacgttgattccctcgaggccaagccaggcacaaaaaaaccaaaccaaaccaaaccgaaagctgtcgccaccgctcgccggagaaggagcaaacgttccccaacccaccggagctccctccaaaacccaccacaaggcttgcccaaggcttcccctcgcccatgccacgctcgcgcctccccccgactccacacccgcgggcatgatccgcggcgatggaggactcggcgccatcgtccgccgcacctgaccctcccctttcccctccaccttccacgcccccgcacccgcacccgcacccgcccgaggaggaggggggctgctgggtgctcgttccggccagcgaggtcgagggggcccacgcgcccaaggtcatccactgggacgacctgcagcaggagctcgcgcgcctctggagcctctccgccgcgctccagcccgccgaggaccgcaaggcgcacctcaccgcgcgcctcgagtccgctctacaggttaggcaggcgtttctcgagcaggacaatgagttggctgaaatgaggcagagactgcaagagcgtactgaccgtctgggggatctgaagacgcgcgccaagaagctgtcagaggatgttgtggttcggagggaacagctttgtgtcaagatcagaacgttgtcaggggcaagcaaggctctcgaggctgcacgcagcaatctgaaggaagctaatgaattgctgtcaggggaaaatggttgtgggcgccttaaagatctggaacagcagttacggatgagacagcaatatatggtagcgcaagttgctcagatatatcctgtgaggcctttggatgaacaatcttcagatcacaaacctggatttacttccaacataacgaaaacaagtaatgttgaatcagtgttgccaaatagcccccaaaacagacctttggtcatattgggtctacagttatcaaagctttctgtgaaaaagactggctacttcagtgacaagacagaggttcagaaatcttcgactgttcttggatatgctgctcattctccctcattgcatcctatctcaatgttcctcttcggtatcctttgcgctttggaggttcacggtcatatgttctcgaccctgcgccttcagttgagccatcatctataacctcagtaggaacgtctgtccctcccagcacaagcatgaggacaacggagttccctctgtttcttgacagccaggagacaacaaggtcatcatatgcgatattcttgttgaacaagatctgctccaatagggctaacccaactggccccatcaactgcccataacagc

SEQ ID NO: 12958 - DNA, 1918 bp, Zea Mays
cagcccaccaacgacgttgattccctcgaggccaagccaggcacaaaaaaaccaaaccaaaccaaaccgaaagctgtcgccaccgctcgccggagaaggagcaaacgttccccaacccaccggagctccctccaaaacccaccacaaggcttgcccaaggcttcccctcgcccatgccacgctcgcgcctccccccgactccacacccgcgggcatgatccgcggcgatggaggactcggcgccatcgtccgccgcacctgaccctcccctttcccctccaccttccacgcccccgcacccgcacccgcacccgcccgaggaggaggggggctgctgggtgctcgttccggccagcgaggtcgagggggcccacgcgcccaaggtcatccactgggacgacctgcagcaggagctcgcgcgcctctggagcctctccgccgcgctccagcccgccgaggaccgcaaggcgcacctcaccgcgcgcctcgagtccgctctacaggcaggcgtttctcgagcaggacaatgagttggctgaaatgaggcagagactgcaagagcgtactgaccgtctgggggatctgaagacgcgcgccaagaagctgtcagaggatgttgtggttcggagggaacagctttgtgtcaagatcagaacgttgtcaggggcaagcaaggctctcgaggctgcacgcagcaatctgaaggaagctaatgaattgctgtcaggggaaaatggttgtgggcgccttaaagatctggaacagcagttacggatgagacagcaatatatggtagcgcaagttgctcagatatatcctgtgaggcctttggatgaacaatcttcagatcacaaacctggatttacttccaacataacgaaaacaagtaatgttgaatcagtgttgccaaatagcccccaaaacagacctttggtcatattgggtctacagttatcaaagctttctgtgaaaaagactggctacttcagtgacaagacagaggttcagaaatcttcgactgttcttggatatgctgctcatgcagtctccctcattgcatcctatctcaatgttcctcttcggtatcctttgcgctttggaggttcacggtcatatgttctcgaccctgcgccttcagttgagccatcatctataacctcagtaggaacgtctgtccctcccagcacaagcatgaggacaacggagttccctctgtttcttgacagccaggagacaacaaggtcatcatatgcgatattcttgttgaacaaggatatcgagcaacttctgaattacattggcgctgaaagcctcgggccaagacatgtcctagcaaacctgaagcagctgacaacgatcatccagtcacaaggatacatttctgatggttagtttaacccagatacagttttggtgctgtgagtttagtccagaagacacaggcacccttttttttaacccccctttgagtcttgagtcttgacacacaagagttggtcgctgtctctgtgctgacacgctcattgtaaatgagcaaaatggagtcactaccaggttgtacaggaaagatgtggatcatactactgtactgtgctatatacgcagcaaccggaggcgcttgttcatgggaaaattatccatgttgtagcgtgtttcttgatgtggatagcgctggtgagaaacacggccctggttcaactgcgcatggctgcggatggtcgtgctgtgatccattggccgacgtgtggtcgacagcactggtactgaaacctgctgacccaagttctagcttaggttgctagtggggattagggacacatgggcggatgcgcgatgcgtgccaagatgaactaggtcctgtctcgacacgcgattgcgtgcatctctaccctggcgcggcacgcttttgtggcggtga

SEQ ID NO: 12959 - DNA, 2125 bp, Zea Mays
cagcccaccaacgacgttgattccctcgaggccaagccaggcacaaaaaaaccaaaccaaaccaaaccgaaagctgtcgccaccgctcgccggagaaggagcaaacgttccccaacccaccggagctccctccaaaacccaccacaaggcttgcccaaggcttcccctcgcccatgccacgctcgcgcctccccccgactccacacccgcgggcatgatccgcggcgatggaggactcggcgccatcgtccgccgcacctgaccctcccctttcccctccaccttccacgcccccgcacccgcacccgcacccgcccgaggaggaggggggctgctgggtgctcgttccggccagcgaggtcgagggggcccacgcgcccaaggtcatccactgggacgacctgcagcaggagctcgcgcgcctctggagcctctccgccgcgctccagcccgccgaggaccgcaaggcgcacctcaccgcgcgcctcgagtccgctctacaggttaggcaggcgtttctcgagcaggacaatgagttggctgaaatgaggcagagactgcaagagcgtactgaccgtctgggggatctgaagacgcgcgccaagaagctgtcagaggatgttgtggttcggagggaacagctttgtgtcaagatcagaacgttgtcaggggcaagcaaggctctcgaggctgcacgcagcaatctgaaggggaaaatggttgtgggcgccttaaagatctggaacagcagttacggatgagacagcaatatatggtagcgcaagttgctcagatatatcctgtgaggcctttggatgaacaatcttcagatcacaaacctggatttacttccaacataacgaaaacaagtaatgttgaatcagtgttgccaaatagcccccaaaacagacctttggtcatattgggtctacagttatcaaagctttctgtgaaaaagactggctacttcagtgacaagacagaggttcagaaatcttcgactgttcttggatatgctgctcatgtatgtattatatagtctgattaattatattatcaaatgatgattgaattcaacattcatctactacttctaatttctttgttagacaatattttttattactttttgttcattttagaaaaaaaatatgttcagattaggttacacctgtaactgaacagtggtcttcatcttgtactctacttcatggtgatagacctaactgtgtttgttatgaatcataggcagtctccctcattgcatcctatctcaatgttcctcttcggtatcctttgcgctttggaggttcacggtcatatgttctcgaccctgcgccttcagttgagccatcatctataacctcagtaggaacgtctgtccctcccagcacaagcatgaggacaacggagttccctctgtttcttgacagccaggagacaacaaggtcatcatatgcgatattcttgttgaacaaggatatcgagcaacttctgaattacattggcgctgaaagcctcgggccaagacatgtcctagcaaacctgaagcagctgacaacgatcatccagtcacaaggatacatttctgatggttagtttaacccagatacagttttggtgctgtgagtttagtccagaagacacaggcacccttttttttaacccccctttgagtcttgagtcttgacacacaagagttggtcgctgtctctgtgctgacacgctcattgtaaatgagcaaaatggagtcactaccaggttgtacaggaaagatgtggatcatactactgtactgtgctatatacgcagcaaccggaggcgcttgttcatgggaaaattatccatgttgtagcgtgtttcttgatgtggatagcgctggtgagaaacacggccctggttcaactgcgcatggctgcggatggtcgtgctgtgatccattggccgacgtgtggtcgacagcactggtactgaaacctgctgacccaagttctagcttaggttgctagtggggattagggacacatgggcggatgcgcgatgcgtgccaagatgaactaggtcctgtctcgacacgcgattgcgtgcatctctaccctggcgcggcacgcttttgtggcggtga

SEQ ID NO: 12960 - DNA, 2003 bp, Zea Mays
cagcccaccaacgacgttgattccctcgaggccaagccaggcacaaaaaaaccaaaccaaaccaaaccgaaagctgtcgccaccgctcgccggagaaggagcaaacgttccccaacccaccggagctccctccaaaacccaccacaaggcttgcccaaggcttcccctcgcccatgccacgctcgcgcctccccccgactccacacccgcgggcatgatccgcggcgatggaggactcggcgccatcgtccgccgcacctgaccctcccctttcccctccaccttccacgcccccgcacccgcacccgcacccgcccgaggaggaggggggctgctgggtgctcgttccggccagcgaggtcgagggggcccacgcgcccaaggtcatccactgggacgacctgcagcaggagctcgcgcgcctctggagcctctccgccgcgctccagcccgccgaggaccgcaaggcgcacctcaccgcgcgcctcgagtccgctctacaggttaggcaggcgtttctcgagcaggacaatgagttggctgaaatgaggcagagactgcaagagcgtactgaccgtctgggggatctgaagacgcgcgccaagaagctgtcagaggatgttgtggttcggagggaacagctttgtgtcaagatcagaacgttgtcaggggcaagcaaggctctcgaggctgcacgcagcaatctgaaggtacttaccctttggagctctaaggataccgtcagccagcggccaaaccagagcgctacacaaatacacggggtgttatgcgaagaagctaatgaattgctgtcaggggaaaatggttgtgggcgccttaaagatctggaacagcagttacggatgagacagcaatatatggtagcgcaagttgctcagatatatcctgtgaggcctttggatgaacaatcttcagatcacaaacctggatttacttccaacataacgaaaacaagtaatgttgaatcagtgttgccaaatagcccccaaaacagacctttggtcatattgggtctacagttatcaaagctttctgtgaaaaagactggctacttcagtgacaagacagaggttcagaaatcttcgactgttcttggatatgctgctcattctccctcattgcatcctatctcaatgttcctcttcggtatcctttgcgctttggaggttcacggtcatatgttctcgaccctgcgccttcagttgagccatcatctataacctcagtaggaacgtctgtccctcccagcacaagcatgaggacaacggagttccctctgtttcttgacagccaggagacaacaaggtcatcatatgcgatattcttgttgaacaaggatatcgagcaacttctgaattacattggcgctgaaagcctcgggccaagacatgtcctagcaaacctgaagcagctgacaacgatcatccagtcacaaggatacatttctgatggttagtttaacccagatacagttttggtgctgtgagtttagtccagaagacacaggcacccttttttttaacccccctttgagtcttgagtcttgacacacaagagttggtcgctgtctctgtgctgacacgctcattgtaaatgagcaaaatggagtcactaccaggttgtacaggaaagatgtggatcatactactgtactgtgctatatacgcagcaaccggaggcgcttgttcatgggaaaattatccatgttgtagcgtgtttcttgatgtggatagcgctggtgagaaacacggccctggttcaactgcgcatggctgcggatggtcgtgctgtgatccattggccgacgtgtggtcgacagcactggtactgaaacctgctgacccaagttctagcttaggttgctagtggggattagggacacatgggcggatgcgcgatgcgtgccaagatgaactaggtcctgtctcgacacgcgattgcgtgcatctctaccctggcgcggcacgcttttgtggcggtga

SEQ ID NO: 12961 - DNA, 1392 bp, Zea Mays
aaggaaggaaagggtggaggtggaagccgcaaaccaaaccctctctgcctcgtcctccctcctcctgcttcgtgcttccccttccccttctcgtctgcggcgccaagctcgagctcatcgcccggactcagcctcgacatcggaggaaccttcgcctcgcccgacctcaggctcggaccctccacgtcacagggaaggtcatcattaccctacccctagctagctcaggctacggggaacaagaccggcgtcccatctggctcgccccagtaaacaagtaatgatggcaccccgcgtgcgtcatgacgacggcggctctcagccccttacggaagcaaggagacgtcagcaaggatccgacagccccgatagctgtacttccacaaggctcaagcgctcctccgacggccacgacatcacatgaacagggtaccaaaacctctccgactgccacgacagcatgtacttagggctctagctcctctctgctagacacgttagcacactgctacaccccccattgtacatctgggccctctccttacgcctataaaaggaaggcccagggctctcgtacgagaaggttggccgcgcgggagaacgggctggcggacagtctctctctctcccttgcggacgcttgtaacccccctactgcaagcgcacccgacctgggcgcagggcaacacgaaggccgcgggtttcccctttgcctgtttcttccccccttcgtgctccgtctcgcgtcgacccatctgagctgggacacgcggcgacaatttactcgtcgatccaaggaccccccggggtcgaaacgccgacaatatgaattgacattcacgtgatattgtattccttctaagctcataaatgcgatcctttatatccataatttttttataatatcctctctctccacgcaacgttggctttcgctcaagtccataacacataatcctaccgtgaacatccttgatctaacttttgtggcccctatacacctattgaacgcaaaaccatcatagacactatcttttctttaagcccatagatatagtcccttgtaccatacaagccctccttttcgcgtgacaatggcaaccctttcaggtcgcaatatacgatttgaccagttagcactcctcacctaggtgttttcgcgtgaaggtggtcccctttatacccattgaacataaatctatcgttgtgtctcctactttaacatccatgcagttatgtattccttttaagcccatagatacaatctctcccgtccacagaagctaatggcaggccctcttctttacacgatactggcttcgtcttttctccgcaacagacaataatatcatgtgcattcttggcctaaatttggcgttcacttgaaaaaag

SEQ ID NO: 12962 - DNA, 2514 bp, Zea Mays
aggcattactctcgtgatgttggttcccttcttaagctcacgaccacctccaaaagcactatagcgatccttttaaaacccttattattcggactttcacacccaaaataaaagaaaaaaagacatccaaggaaggaaagggtggaggtggaagccgcaaaccaaaccctctctgcctcgtcctccctcctcctgcttcgtgcttccccttccccttctcgtctgcggcgccaagctcgagctcatcgccaccgaggtcgtttcgatctgggttttagcctatccgcgaggaaggtaaattagttggagacttcgtgatggctgctgcgaagtcgggcgtagacgtggaaacgagggacggcggcggcggcggctccttcagcgaggagaggtttgttgataagctcaacaagctcaacaacacaacagcgagcattcagacactttcacattggtgcatttttcaccgcaagagggccagaaggattgtggacacatgggaaaagcatttcagtactgcaacaaatgataagaaaatatcattcctgtttctatcaaatgatatcttgcaaaacagtaagcgcaagggaggagattatgtgcatgagttctggagggttctacccagattattgaaacatttctacgaaaatgggggagaagaagcaaagaaactagtggcaagactaataggaatttgggatgaccgcaaagtttttggaacccgtattgaaagtctgaaagacggcatttttggtgacaaccctcctatattcgatcacagtgggaataataataattcaaatcctagctctaaccccttaaattccaaagttggaaggaaagattccagtacagtactaaaaaaactggctgttggtggtatgcctgaaaagattgtgactgcataccaatctgtgtttgatcagcattttgatgaagacacagctttaaacaagtgtaagagtactgttagtgttctggaaaatctaaagaaggatatagaccttgctagtaccgaaggtgatccgcctgcctcaacaatgatttctgacctacaagaacaggaaacaatcctgaaacactgcattgcacaacttggaagtgtagatgcagcgaggatatcactgataaaccaattaaaagaagctctcaccgaacaggagtcaaagtcagaggttcttcgcagccagttgcaagttgctcgagcagaggctgaacatgccattcaacttaggcaacggtttggtggtgccgttgtcgcaaatggcacaggatctagttctagtccgctgctgatgtctcctcagttacagtcgctgaatccagcaccctcactcgcccctccaatcggtgcagccggagatgagcccaagagaacggcagcagcaatggccgacaagctggcatctctgtcagcgccggtgcaggtcctgagctccatcttctcatctttcgtcgccacacacggcgcttcgctatcttccatgaacagcggatctcctcccagagaccaactctccggggcaccgccgggcttccaggtcgaaaagaggcccaggcttgagagaaccgtgctggccagcgacatgggcgcgcctccattctccatgcaagcaccacggctgcagcagccggttggatcgatgcccacacaagcagcgacacagatgaaccaagcgccaggcctattcgcaccaccgcctccaccaccgttgccgcctcttctgccaccgctcctgcaacagttcggtcaaagcgctggaggaatgatggggatgggaccgttcgggatgatggctggctccatgccgcctcctccgccgatgtccagcatcatgccagcaggttttccagcgccaagcggtccacctccacctccgcttccaccggctcagacccaaccccagcagcagcagcagtctcctcctcagccgccagcgccgcagcagtcagcagggttcttccagacatcagcaggcatggggtacttcccagcagtgcaggtgcagcaatctccgtccgcccaacgacaatgactctatggtggcatgacatccatcggggcgggcttataaaaggcagcacctcgtgctaaattttgtacattagacataattacctggtgtcgagcttatacgtgactggccctgctgcaagagaagcagcaggaccaatggtcacgattagaaaaaaaaagattgtagaataggcatgggggcttttgtttggtccgagttgttttaactcttcctgtttgtgtcgtgtgtgcagtagttagactttgcattgatcccctgaggcgcaagaaagtggtgctggaattgttgcttaatagagctgccctctgatatagcagtgcccttttaggggctggggcgctgggctgaagcagtgttagaacttaactggtcatagtgtcatagatatgatgtgaactgcaaatacttgtcctttttgtgacttaaatttattttctattttctatttagttttgaatagagagaagatttt

SEQ ID NO: 12963 - DNA, 3200 bp, Zea Mays
atgttggttcccttcttaaggtagggtttgttttccgaagtagtatggtggaacggagccgcaccattctcaatttgttgttatttggattagtttcgtataggacagagtgagtctaaaaaggaaaattacgctcagatgatgaatcattcggctccccaaaatcttctagatggatcacttcctagcatggaacaactctatcccaactagctccgctacccagacactacctaaggctagtttggtgaccaaagaaatgaaaagaatccatacggaggaaccaacctgctattcaaatgaaaataaaaggggcccatggtggagaaatctcataaattgaatagcaagataattaatctccaatggatcctctctatttacttggtcacaaaatcaggctaaggctagtattatataatccggtttatggatcatataagcatctaataacttacttatgaattaccataatctagatatctaggttgtataacccacataataatctatgtagtttatttgttttttaatttatttaagttagattatataatttagagggtgaacaaacattgctagtctatagtgcataatccttctgtgaccatttctttcctaactttgaggtccatataatcggtggtttctctttttcacttgggcaacgtattttgttttctttccgccctaatttacacggctgtttttttatatttaagctcacgaccacctccaaaagcactatagcgatccttttaaaacccttattattcggactttcacacccaaaataaaagaaaaaaagacatccaaggaaggaaagggtggaggtggaagccgcaaaccaaaccctctctgcctcgtcctccctcctcctgcttcgtgcttccccttccccttctcgtctgcggcgccaagctcgagctcatcgccaccgaggtcgtttcgatctgggttttagcctatccgcgaggaaggtaaattagttggagacttcgtgatggctgctgcgaagtcgggcgtagacgtggaaacgagggacggcggcggcggcggctccttcagcgaggagaggtttgttgataagctcaacaagctcaacaacacaacagcgagcattcagacactttcacattggtgcatttttcaccgcaagagggccagaaggattgtggacacatgggaaaagcatttcagtactgcaacaaatgataagaaaatatcattcctgtttctatcaaatgatatcttgcaaaacagtaagcgcaagggaggagattatgtgcatgagttctggagggttctacccagattattgaaacatttctacgaaaatgggggagaagaagcaaagaaactagtggcaagactaataggaatttgggatgaccgcaaagtttttggaacccgtattgaaagtctgaaagacggcatttttggtgacaaccctcctatattcgatcacagtgggaataataataattcaaatcctagctctaaccccttaaattccaaagttggaaggaaagattccagtacagtactaaaaaaactggctgttggtggtatgcctgaaaagattgtgactgcataccaatctgtgtttgatcagcattttgatgaagacacagctttaaacaagtgtaagagtactgttagtgttctggaaaatctaaagaaggatatagaccttgctagtaccgaaggtgatccgcctgcctcaacaatgatttctgacctacaagaacaggaaacaatcctgaaacactgcattgcacaacttggaagtgtagatgcagcgaggatatcactgataaaccaattaaaagaagctctcaccgaacaggagtcaaagtcagaggttcttcgcagccagttgcaagttgctcgagcagaggctgaacatgccattcaacttaggcaacggtttggtggtgccgttgtcgcaaatggcacaggatctagttctagtccgctgctgatgtctcctcagttacagtcgctgaatccagcaccctcactcgcccctccaatcggtgcagccggagatgagcccaagagaacggcagcagcaatggccgacaagctggcatctctgtcagcgccggtgcaggtcctgagctccatcttctcatctttcgtcgccacacacggcgcttcgctatcttccatgaacagcggatctcctcccagagaccaactctccggggcaccgccgggcttccaggtcgaaaagaggcccaggcttgagagaaccgtgctggccagcgacatgggcgcgcctccattctccatgcaagcaccacggctgcagcagccggttggatcgatgcccacacaagcagcgacacagatgaaccaagcgccaggcctattcgcaccaccgcctccaccaccgttgccgcctcttctgccaccgctcctgcaacagttcggtcaaagcgctggaggaatgatggggatgggaccgttcgggatgatggctggctccatgccgcctcctccgccgatgtccagcatcatgccagcaggttttccagcgccaagcggtccacctccacctccgcttccaccggctcagacccaaccccagcagcagcagcagtctcctcctcagccgccagcgccgcagcagtcagcagggttcttccagacatcagcaggcatggggtacttcccagcagtgcaggtgcagcaatctccgtccgcccaacgacaatgactctatggtggcatgacatccatcggggcgggcttataaaaggcagcacctcgtgctaaattttgtacattagacataattacctggtgtcgagcttatacgtgactggccctgctgcaagagaagcagcaggaccaatggtcacgattagaaaaaaaaagattgtagaataggcatgggggcttttgtttggtccgagttgttttaactcttcctgtttgtgtcgtgtgtgcagtagttagactttgcattgatcccctgaggcgcaagaaagtggtgctggaattgttgcttaatagagctgccctctgatatagcagtgcccttttaggggctggggcgctgggctgaagcagtgttagaacttaactggtcatagtgtcatagatatgatgtgaactgcaaatacttgtcctttttgtgacttaaatttattttctattttctatttagttttgaatagagagaagatttt

SEQ ID NO: 12964 - DNA, 2342 bp, Zea Mays
cttgggcaacgtattttgttttctttccgccctaatttacacggctgtttttttatatttaagctcacgaccacctccaaaagcactatagcgatccttttaaaacccttattattcggactttcacacccaaaataaaagaaaaaaagacatccaaggaaggaaagggtggaggtggaagccgcaaaccaaaccctctctgcctcgtcctccctcctcctgcttcgtgcttccccttccccttctcgtctgcggcgccaagctcgagctcatcgccaccgagcctatccgcgaggaaggtaaattagttggagacttcgtgatggctgctgcgaagtcgggcgtagacgtggaaacgagggacggcggcggcggcggctccttcagcgaggagaggtttgttgataagctcaacaagctcaacaacacaacagcgagcattcagacactttcacattggtgcatttttcaccgcaagagggccagaaggattgtggacacatgggaaaagcatttcagtactgcaacaaatgataagaaaatatcattcctgtttctatcaaatgatatcttgcaaaacagtaagcgcaagggaggagattatgtgcatgagttctggagggttctacccagattattgaaacatttctacgaaaatgggggagaagaagcaaagaaactagtggcaagactaaaactggctgttggtggtatgcctgaaaagattgtgactgcataccaatctgtgtttgatcagcattttgatgaagacacagctttaaacaagtgtaagagtactgttagtgttctggaaaatctaaagaaggatatagaccttgctagtaccgaaggtgatccgcctgcctcaacaatgatttctgacctacaagaacaggaaacaatcctgaaacactgcattgcacaacttggaagtgtagatgcagcgaggatatcactgataaaccaattaaaagaagctctcaccgaacaggagtcaaagtcagaggttcttcgcagccagttgcaagttgctcgagcagaggctgaacatgccattcaacttaggcaacggtttggtggtgccgttgtcgcaaatggcacaggatctagttctagtccgctgctgatgtctcctcagttacagtcgctgaatccagcaccctcactcgcccctccaatcggtgcagccggagatgagcccaagagaacggcagcagcaatggccgacaagctggcatctctgtcagcgccggtgcaggtcctgagctccatcttctcatctttcgtcgccacacacggcgcttcgctatcttccatgaacagcggatctcctcccagagaccaactctccggggcaccgccgggcttccaggtcgaaaagaggcccaggcttgagagaaccgtgctggccagcgacatgggcgcgcctccattctccatgcaagcaccacggctgcagcagccggttggatcgatgcccacacaagcagcgacacagatgaaccaagcgccaggcctattcgcaccaccgcctccaccaccgttgccgcctcttctgccaccgctcctgcaacagttcggtcaaagcgctggaggaatgatggggatgggaccgttcgggatgatggctggctccatgccgcctcctccgccgatgtccagcatcatgccagcaggttttccagcgccaagcggtccacctccacctccgcttccaccggctcagacccaaccccagcagcagcagcagtctcctcctcagccgccagcgccgcagcagtcagcagggttcttccagacatcagcaggcatggggtacttcccagcagtgcaggtgcagcaatctccgtccgcccaacgacaatgactctatggtggcatgacatccatcggggcgggcttataaaaggcagcacctcgtgctaaattttgtacattagacataattacctggtgtcgagcttatacgtgactggccctgctgcaagagaagcagcaggaccaatggtcacgattagaaaaaaaaagattgtagaataggcatgggggcttttgtttggtccgagttgttttaactcttcctgtttgtgtcgtgtgtgcagtagttagactttgcattgatcccctgaggcgcaagaaagtggtgctggaattgttgcttaatagagctgccctctgatatagcagtgcccttttaggggctggggcgctgggctgaagcagtgttagaacttaactggtcatagtgtcatagatatgatgtgaactgcaaatacttgtcctttttgtgacttaaatttattttctattttctatttagttttgaatagagagaagatttt

SEQ ID NO: 12965 - DNA, 2039 bp, Zea Mays
cagtgtttctcctatatcataaatgtgataggttaggcagcatattctagatttctaatttgctttcgtgctgcagttcaatttattcttttttttatccttgaatataagcgcatacaaataaactttcacgtcctcaaacgcactttcacattggtgcatttttcaccgcaagagggccagaaggattgtggacacatgggaaaagcatttcagtactgcaacaaatgataagaaaatatcattcctgtttctatcaaatgatatcttgcaaaacagtaagcgcaagggaggagattatgtgcatgagttctggagggttctacccagattattgaaacatttctacgaaaatgggggagaagaagcaaagaaactagtggcaagactaaaactggctgttggtggtatgcctgaaaagattgtgactgcataccaatctgtgtttgatcagcattttgatgaagacacagctttaaacaagtgtaagagtactgttagtgttctggaaaatctaaagaaggatatagaccttgctagtaccgaaggtgatccgcctgcctcaacaatgatttctgacctacaagaacaggaaacaatcctgaaacactgcattgcacaacttggaagtgtagatgcagcgaggatatcactgataaaccaattaaaagaagctctcaccgaacaggagtcaaagtcagaggttcttcgcagccagttgcaagttgctcgagcagaggctgaacatgccattcaacttaggcaacggtttggtggtgccgttgtcgcaaatggcacaggatctagttctagtccgctgctgatgtctcctcagttacagtcgctgaatccagcaccctcactcgcccctccaatcggtgcagccggagatgagcccaagagaacggcagcagcaatggccgacaagctggcatctctgtcagcgccggtgcaggtcctgagctccatcttctcatctttcgtcgccacacacggcgcttcgctatcttccatgaacagcggatctcctcccagagaccaactctccggggcaccgccgggcttccaggtcgaaaagaggcccaggcttgagagaaccgtgctggccagcgacatgggcgcgcctccattctccatgcaagcaccacggctgcagcagccggttggatcgatgcccacacaagcagcgacacagatgaaccaagcgccaggcctattcgcaccaccgcctccaccaccgttgccgcctcttctgccaccgctcctgcaacagttcggtcaaagcgctggaggaatgatggggatgggaccgttcgggatgatggctggctccatgccgcctcctccgccgatgtccagcatcatgccagcaggttttccagcgccaagcggtccacctccacctccgcttccaccggctcagacccaaccccagcagcagcagcagtctcctcctcagccgccagcgccgcagcagtcagcagggttcttccagacatcagcaggcatggggtacttcccagcagtgcaggtgcagcaatctccgtccgcccaacgacaatgactctatggtggcatgacatccatcggggcgggcttataaaaggcagcacctcgtgctaaattttgtacattagacataattacctggtgtcgagcttatacgtgactggccctgctgcaagagaagcagcaggaccaatggtcacgattagaaaaaaaaagattgtagaataggcatgggggcttttgtttggtccgagttgttttaactcttcctgtttgtgtcgtgtgtgcagtagttagactttgcattgatcccctgaggcgcaagaaagtggtgctggaattgttgcttaatagagctgccctctgatatagcagtgcccttttaggggctggggcgctgggctgaagcagtgttagaacttaactggtcatagtgtcatagatatgatgtgaactgcaaatacttgtcctttttgtgacttaaatttattttctattttctatttagttttgaatagagagaagatttt

SEQ ID NO: 12966 - DNA, 2113 bp, Zea Mays
gctagcctacctacacacacagcgtgtgcctgacggctgacgatgccgggtgccggccgcgccatttgtctatatataagctaattataagctaagcaatcgttcacagctagcttccctcatcttgagaaagaactcctcgtcctcgctccctccccaaccatcaagagcgcgcacgcacacgcacacgcacacgccgcgcgcaagccggccgacgtacggcatggagaagagcgctacaactggcggcggttcaagcggcggcggcggagaggctgcggaggaggcgaaggtgcctctgctgcagccgagggctgcggcggcggcggcggcggccgaggaggaccatggaggaggaggaggatacgacggcaaggcggcggcggatgaggagggcagggacgcgtcgtggtcgtcgctgccgctgcggcggcgcgcgtgggaggagaacaagaagctgtgggtggtggccgggccgtccatcttcacgcgcttcgcgtcgttcggcgtcaccgtcatcagccaggccttcatcggccacatcggcgccaccgagctcgccgcctacgcgctcgtctccaccgtcctcatgaggttcagcaacggcatcctgcttggaattgtggtacaacaccatactggtgctcctcacaggatacatgaagaatgcggagatcgcacttgacgccctttcgatatgccttaacatcaatggttgggagatgatgatctccataggcttcctggctgcaacaggagtgcgagtggcgaacgagctgggagctgggagcgcgaggagggccaagttcgcgatctacaacgtggtcgtcacctccttcgccatcgggctcgtgctgttcgtgctcttcctcttcttccgcgggagcctcgcctacatattcaccgagagccaggcggtggccgcagccgtcgccgacctctcgcccctgctggccttctccatactgctcaacagcgtccagcccgtgctgtcaggtgtcgctgttggtgccggttggcaaggcgtagtcgcgtacgtcaacgtcacgtcgtactacctgatcggcattcctcttggcgcagtcctaggctacgtggtggggcttcatgtgaagggcatttggatcggaatgctgctcggaacgctggtccagactatcgtgcttctcttcataacagtaaagaccgactgggacaaacaggtggtggccgctcaagagaggctgaagaaatggtacatggaagagaacagaaggatgcaggcctcgagggggaatccttgagccggtccttcaaccaacttcaagcctggcctttgtgggttgctgattgacacaattttatgctaatatttctactattcatcacctcaacatcaaagtgagcccggcattccagatcgtgtgctcctcgagccaagcaatggaaaggcactgtcactgtcagcagcagtaggataaccaaaaaaaaacattgtgttatttgctaagtgcgagtttggctcaattttcgctaagtgagagagagcctatgttggctaagtgcgactttggctcaattttgggcgtatgctaatatgtttcacaacagggcagtgcttgagatttgggatatctgtagcgctataactgactcaattttgggcatatgctaatttgctaagtgcgaacaaattcatgcagttatggccatgcactactacacttcgacatgtgtgtgtatatactcaggttcatgaaaatagtgtggtagatcgatcgtgggactgaaccacatattgatcacatcaattagtaataagggacctagcgtcgtatcgtatcacattctgcaaccaaacatgaaaggaacacagagaacacaaccatattcacagagcactacgctaataactggaacaaattatttaggtgcaaaactgtattgtcaccttattcgaactggagtgtcgacgacgaacagggctactggatgacaggtagtgtagttaagaagctgcaatcatattttacaggaaaatattagtaagaaattaagaatgcaagatgaggaatgttcgaagtactgaatcgaacagatcacaccgatagcatttgatacatatacatcaaag

SEQ ID NO: 12967 - DNA, 2478 bp, Zea Mays
gctagcctacctacacacacagcgtgtgcctgacggctgacgatgccgggtgccggccgcgccatttgtctatatataagctaattataagctaagcaatcgttcacagctagcttccctcatcttgagaaagaactcctcgtcctcgctccctccccaaccatcaagagcgcgcacgcacacgcacacgcacacgccgcgcgcaagccggccgacgtacggcatggagaagagcgctacaactggcggcggttcaagcggcggcggcggagaggctgcggaggaggcgaaggtgcctctgctgcagccgagggctgcggcggcggcggcggcggccgaggaggaccatggaggaggaggaggatacgacggcaaggcggcgcgcgtgggaggagaacaagaagctgtgggtggtggccgggccgtccatcttcacgcgcttcgcgtcgttcggcgtcaccgtcatcagccaggccttcatcggccacatcggcgccaccgagctcgccgcctacgcgctcgtctccaccgtcctcatgaggttcagcaacggcatcctgctgggcatggcgagcgcgctggagacgctgtgcgggcagtcgtacggggcgaagcagtaccacatgctgggcatctacctgcagcggtcgtggatcatcctgtcggcgtgcgccgtggtgcagctccccgtgtacctgttcacggagccgctgctggtggcgctggggcaggacccggacatctcggcggtggcggggaccgtggcgctctgctcgccttcgtcttcttcggcggatgccctctcacctggaccggattctcgtccgccgccttcgccgacctcggcgccatcgtcaggctctcgctctcttctggtgtcatgctctgcttggaattgtggtacaacaccatactggtgctcctcacaggatacatgaagaatgcggagatcgcacttgacgccctttcgatatgccttaacatcaatggttgggagatgatgatctccataggcttcctggctgcaacagggtacgtacgcaaccacatcagtttcttatctttttttaataaccatgcatgcaacctaacaaaacacaacgaaccacctatctttttcagagtgcgagtggcgaacgagctgggagctgggagcgcgaggagggccaagttcgcgatctacaacgtggtcgtcacctccttcgccatcgggctcgtgctgttcgtgctcttcctcttcttccgcgggagcctcgcctacatattcaccgagagccaggcggtggccgcagccgtcgccgacctctcgcccctgctggccttctccatactgctcaacagcgtccagcccgtgctgtcaggtgtcgctgttggtgccggttggcaaggcgtagtcgcgtacgtcaacgtcacgtcgtactacctgatcggcattcctcttggcgcagtcctaggctacgtggtggggcttcatgtgaagggcatttggatcggaatgctgctcggaacgctggtccagactatcgtgcttctcttcataacagtaaagaccgactgggacaaacaggtggtggccgctcaagagaggctgaagaaatggtacatggaagagaacagaaggatgcaggcctcgagggggaatccttgagccggtccttcaaccaacttcaagcctggcctttgtgggttgctgattgacacaattttatgctaatatttctactattcatcacctcaacatcaaagtgagcccggcattccagatcgtgtgctcctcgagccaagcaatggaaaggcactgtcactgtcagcagcagtaggataaccaaaaaaaaacattgtgttatttgctaagtgcgagtttggctcaattttcgctaagtgagagagagcctatgttggctaagtgcgactttggctcaattttgggcgtatgctaatatgtttcacaacagggcagtgcttgagatttgggatatctgtagcgctataactgactcaattttgggcatatgctaatttgctaagtgcgaacaaattcatgcagttatggccatgcactactacacttcgacatgtgtgtgtatatactcaggttcatgaaaatagtgtggtagatcgatcgtgggactgaaccacatattgatcacatcaattagtaataagggacctagcgtcgtatcgtatcacattctgcaaccaaacatgaaaggaacacagagaacacaaccatattcacagagcactacgctaataactggaacaaattatttaggtgcaaaactgtattgtcaccttattcgaactggagtgtcgacgacgaacagggctactggatgacaggtagtgtagttaagaagctgcaatcatattttacaggaaaatattagtaagaaattaagaatgcaagatgaggaatgttcgaagtactgaatcgaacagatcacaccgatagcatttgatacatatacatcaaag

SEQ ID NO: 12968 - DNA, 1558 bp, Zea Mays
gctagcctacctacacacacagcgtgtgcctgacggctgacgatgccgggtgccggccgcgccatttgtctatatataagctaattataagctaagcaatcgttcacagctagcttccctcatcttgagaaagaactcctcgtcctcgctccctccccaaccatcaagagcgcgcacgcacacgcacacgcacacgccgcgcgcaagccggccgacgtacggcatggagaagagcgctacaactggcggcggttcaagcggcggcggcggagaggctgcggaggaggcgaaggtgcctctgctgcagccgagggctgcggcggcggcggcggcggccgaggaggaccatggaggaggaggaggatacgacggcaaggcggcgcgcgtgggaggagaacaagaagctgtgggtggtggccgggccgtccatcttcacgcgcttcgcgtcgttcggcgtcaccgtcatcagccaggccttcatcggccacatcggcgccaccgagctcgccgcctacgcgctcgtctccaccgtcctcatgaggttcagcaacggcatcctgggcatttggatcggaatgctgctcggaacgctggtccagactatcgtgcttctcttcataacagtaaagaccgactgggacaaacaggtggtggccgctcaagagaggctgaagaaatggtacatggaagagaacagaaggatgcaggcctcgagggggaatccttgagccggtccttcaaccaacttcaagcctggcctttgtgggttgctgattgacacaattttatgctaatatttctactattcatcacctcaacatcaaagtgagcccggcattccagatcgtgtgctcctcgagccaagcaatggaaaggcactgtcactgtcagcagcagtaggataaccaaaaaaaaacattgtgttatttgctaagtgcgagtttggctcaattttcgctaagtgagagagagcctatgttggctaagtgcgactttggctcaattttgggcgtatgctaatatgtttcacaacagggcagtgcttgagatttgggatatctgtagcgctataactgactcaattttgggcatatgctaatttgctaagtgcgaacaaattcatgcagttatggccatgcactactacacttcgacatgtgtgtgtatatactcaggttcatgaaaatagtgtggtagatcgatcgtgggactgaaccacatattgatcacatcaattagtaataagggacctagcgtcgtatcgtatcacattctgcaaccaaacatgaaaggaacacagagaacacaaccatattcacagagcactacgctaataactggaacaaattatttaggtgcaaaactgtattgtcaccttattcgaactggagtgtcgacgacgaacagggctactggatgacaggtagtgtagttaagaagctgcaatcatattttacaggaaaatattagtaagaaattaagaatgcaagatgaggaatgttcgaagtactgaatcgaacagatcacaccgatagcatttgatacatatacatcaaag

SEQ ID NO: 12969 - DNA, 2289 bp, Zea Mays
caacagtcatgttccaattgctctcttggctgctgcttcctcttcttccctcttggtcttggcggcggcttctttttcccttcttcggcgaagaaaatggccaggcacccaggcgtcgactggtcgacgacggctctgttccaacaagtccgcgtcgtcggcgtccggccgggcgcgctgcaaagtcatgacagaagaaaaaaaacatgcgcgagcgtgacgggcaagaagactccagcagatcgagctgggcatggcgagcgcgctggagacgctgtgcgggcagtcgtacggggcgaagcagtaccacatgctgggcatctacctgcagcggtcgtggatcatcctgtcggcgtgcgccgtggtgcagctccccgtgtacctgttcacggagccgctgctggtggcgctggggcaggacccggacatctcggcggtggcggggaccgtggcgctctggtacatccccgtgctcttctccttcgtctgggccttcccgctgcagatgtacctgcaggcgcagatcaagaacatgatcatcacgtacctcgccatgctcaacctcggcctccacctcgccctgtcctggctcgccgccgtccacctccgcctcggcctcgccggcgtcatgggctccatggtcgtcgccatgtggatccccgtgttcggccagctcgccttcgtcttcttcggcggatgccctctcacctggaccggattctcgtccgccgccttcgccgacctcggcgccatcgtcaggctctcgctctcttctggtgtcatgctctgcttggaattgtggtacaacaccatactggtgctcctcacaggatacatgaagaatgcggagatcgcacttgacgccctttcgatatgccttaacatcaatggttgggagatgatgatctccataggcttcctggctgcaacaggagtgcgagtggcgaacgagctgggagctgggagcgcgaggagggccaagttcgcgatctacaacgtggtcgtcacctccttcgccatcgggctcgtgctgttcgtgctcttcctcttcttccgcgggagcctcgcctacatattcaccgagagccaggcggtggccgcagccgtcgccgacctctcgcccctgctggccttctccatactgctcaacagcgtccagcccgtgctgtcaggtgtcgctgttggtgccggttggcaaggcgtagtcgcgtacgtcaacgtcacgtcgtactacctgatcggcattcctcttggcgcagtcctaggctacgtggtggggcttcatgtgaagggcatttggatcggaatgctgctcggaacgctggtccagactatcgtgcttctcttcataacagtaaagaccgactgggacaaacaggtggtggccgctcaagagaggctgaagaaatggtacatggaagagaacagaaggatgcaggcctcgagggggaatccttgagccggtccttcaaccaacttcaagcctggcctttgtgggttgctgattgacacaattttatgctaatatttctactattcatcacctcaacatcaaagtgagcccggcattccagatcgtgtgctcctcgagccaagcaatggaaaggcactgtcactgtcagcagcagtaggataaccaaaaaaaaacattgtgttatttgctaagtgcgagtttggctcaattttcgctaagtgagagagagcctatgttggctaagtgcgactttggctcaattttgggcgtatgctaatatgtttcacaacagggcagtgcttgagatttgggatatctgtagcgctataactgactcaattttgggcatatgctaatttgctaagtgcgaacaaattcatgcagttatggccatgcactactacacttcgacatgtgtgtgtatatactcaggttcatgaaaatagtgtggtagatcgatcgtgggactgaaccacatattgatcacatcaattagtaataagggacctagcgtcgtatcgtatcacattctgcaaccaaacatgaaaggaacacagagaacacaaccatattcacagagcactacgctaataactggaacaaattatttaggtgcaaaactgtattgtcaccttattcgaactggagtgtcgacgacgaacagggctactggatgacaggtagtgtagttaagaagctgcaatcatattttacaggaaaatattagtaagaaattaagaatgcaagatgaggaatgttcgaagtactgaatcgaacagatcacaccgatagcatttgatacatatacatcaaag

SEQ ID NO: 12970 - DNA, 1014 bp, Zea Mays
gtgctctcagagcctgggcatttggatcggaatgctgctcggaacgctggtccagactatcgtgcttctcttcataacagtaaagaccgactgggacaaacaggtggtggccgctcaagagaggctgaagaaatggtacatggaagagaacagaaggatgcaggcctcgagggggaatccttgagccggtccttcaaccaacttcaagcctggcctttgtgggttgctgattgacacaattttatgctaatatttctactattcatcacctcaacatcaaagtgagcccggcattccagatcgtgtgctcctcgagccaagcaatggaaaggcactgtcactgtcagcagcagtaggataaccaaaaaaaaacattgtgttatttgctaagtgcgagtttggctcaattttcgctaagtgagagagagcctatgttggctaagtgcgactttggctcaattttgggcgtatgctaatatgtttcacaacagggcagtgcttgagatttgggatatctgtagcgctataactgactcaattttgggcatatgctaatttgctaagtgcgaacaaattcatgcagttatggccatgcactactacacttcgacatgtgtgtgtatatactcaggttcatgaaaatagtgtggtagatcgatcgtgggactgaaccacatattgatcacatcaattagtaataagggacctagcgtcgtatcgtatcacattctgcaaccaaacatgaaaggaacacagagaacacaaccatattcacagagcactacgctaataactggaacaaattatttaggtgcaaaactgtattgtcaccttattcgaactggagtgtcgacgacgaacagggctactggatgacaggtagtgtagttaagaagctgcaatcatattttacaggaaaatattagtaagaaattaagaatgcaagatgaggaatgttcgaagtactgaatcgaacagatcacaccgatagcatttgatacatatacatcaaag

SEQ ID NO: 12971 - DNA, 1950 bp, Zea Mays
cggtctgatcggcttctcgggcaagcggtactcaggccgcttttttccaatcgttgcggacgggcagccagacgacggccacggcacgagaagcaggaagagaaggctagcccatcgatccaccggctacgcaactgagtctattaaactgacaccatggtcccacgcatctaatggtggtggctgattcatcaggatccgcattttgggcccacacgccagagagaggaggtctggtagtgcgagtaccacccacacgaacaccagttcactaatcactacctctccctctccgtcgcgacacaggccacggcgggcggcggcggaggcttccgtgcggctcttggcggattgaacgcccactcgagctgcgccggctgctgtttcagccgtccttagatagaccctgctttcctcccgggcaaatccaagttgcccaaatgccgacaccagtgaagtcggtgctgcccgtagtgctcctcggctgcggcggcgtcggccgctacctcctccgccacatcgtctcctgccgtcccctccacgccaaccagggcgtggccatccgggtggtgggcgtcgccgatagctcctccctgctcgtcgccgaagatgtccactccaccggcctcgatgacgcgctcctcacccagctctgcgccgccaagtccgcaggctctcccctctcctccctgctcggccgagggcactgtcagctgttcaagaaccctgaggctaggggcaaagtcatagacgccgctaccacactcggaagaacaactggtctggtgctagttgactgttctgcaacttatgacactgttagcctgctgaaagatgctgtggatcatggatgctgtgtcgtattggcaaacaagaaacctcttaccggaggattttcagaagttggtctccaacttccgtcggataagatttgaatctactgttggagcaggtttgcctgtgatagcttctgtaacccgtattattgcatctggagaccctattactcgtattgttggcagtttgagtggtacacttgggtatgtgatgagtgagcttgaggatggaaagaaatttagtgaagttgtaaaaactgccaagtcccttggctatacagaaccagatccacgtgatgatctaggtggaatggatgtcgctagaaaggcattgatcctggctaggcttcttgggcaacagataagcatggagagtatcaatgttgagagtttatatcctagtgaattaggacctgatgcagtgtccacaaaggacttccttgaaagtggtttagtgcaacttgacaagagcatggaagaaagaatcagagcagcatcttcgagaggaaacgttcttcgctacgtctgtgagattgaaagcgcagggtgccaggtaggccttaaagagctcccaaaggattctgcgctgggtagattgaggggaagtgacaatgtggtcgagatatacagcagatgttaccagagctcccctctggtgatccagggcgcaggagctggcaacgacaccactgccgccggcgtccttgctgacataatcgatctccaagacctgttccagacgatggcttgatcgttgatcggcatccacaccagtacaccatcttgatttttgcaaggcaccagagcgtttgatactttgatcggtgccagtggaatccctccactgcccactggtgggcttcgctccttgtcatgtgtgcaatttgttcacgggcatgctctcaggctgagagcctgagacgtctgacattcgaaatgtaattttgagcaggcgtgtgggggatttctttacagtttacataaaggaactttgtttcagtgaaataatgtcgcggtctccacattaaactaataaacagtccgagctatattgccgctatctgatagtgaaataatgtcgctggcagcctgaaaccgtggccagtttgttgcc

SEQ ID NO: 12972 - DNA, 1951 bp, Zea Mays
cggtctgatcggcttctcgggcaagcggtactcaggccgcttttttccaatcgttgcggacgggcagccagacgacggccacggcacgagaagcaggaagagaaggctagcccatcgatccaccggctacgcaactgagtctattaaactgacaccatggtcccacgcatctaatggtggtggctgattcatcaggatccgcattttgggcccacacgccagagagaggaggtctggtagtgcgagtaccacccacacgaacaccagttcactaatcactacctctccctctccgtcgcgacacaggccacggcgggcggcggcggaggcttccgtgcggctcttggcggattgaacgcccactcgagctgcgccggctgctgtttcagccgtccttagatagaccctgctttcctcccgggcaaatccaagttgcccaaatgccgacaccagtgaagtcggtgctgcccgtagtgctcctcggctgcggcggcgtcggccgctacctcctccgccacatcgtctcctgccgtcccctccacgccaaccagggcgtggccatccgggtggtgggcgtcgccgatagctcctccctgctcgtcgccgaagatgtccactccaccggcctcgatgacgcgctcctcacccagctctgcgccgccaagtccgcaggctctcccctctcctccctgctcggccgagggcactgtcagctgttcaagaaccctgaggctaggggcaaagtcatagacgccgctaccacactcggaagaacaactggtctggtgctagttgactgttctgcaacttatgacactgttagcctgctgaaagatgctgtggatcatggatgctgtgtcgtattggcaaacaagaaacctcttaccgggaggattttcagaagttggtctccaacttccgtcggataagatttgaatctactgttggagcaggtttgcctgtgatagcttctgtaacccgtattattgcatctggagaccctattactcgtattgttggcagtttgagtggtacacttgggtatgtgatgagtgagcttgaggatggaaagaaatttagtgaagttgtaaaaactgccaagtcccttggctatacagaaccagatccacgtgatgatctaggtggaatggatgtcgctagaaaggcattgatcctggctaggcttcttgggcaacagataagcatggagagtatcaatgttgagagtttatatcctagtgaattaggacctgatgcagtgtccacaaaggacttccttgaaagtggtttagtgcaacttgacaagagcatggaagaaagaatcagagcagcatcttcgagaggaaacgttcttcgctacgtctgtgagattgaaagcgcagggtgccaggtaggccttaaagagctcccaaaggattctgcgctgggtagattgaggggaagtgacaatgtggtcgagatatacagcagatgttaccagagctcccctctggtgatccagggcgcaggagctggcaacgacaccactgccgccggcgtccttgctgacataatcgatctccaagacctgttccagacgatggcttgatcgttgatcggcatccacaccagtacaccatcttgatttttgcaaggcaccagagcgtttgatactttgatcggtgccagtggaatccctccactgcccactggtgggcttcgctccttgtcatgtgtgcaatttgttcacgggcatgctctcaggctgagagcctgagacgtctgacattcgaaatgtaattttgagcaggcgtgtgggggatttctttacagtttacataaaggaactttgtttcagtgaaataatgtcgcggtctccacattaaactaataaacagtccgagctatattgccgctatctgatagtgaaataatgtcgctggcagcctgaaaccgtggccagtttgttgcc

SEQ ID NO: 12973 - DNA, 2588 bp, Zea Mays
ctcgagtcttgagtaacgccccacctcctccccactgatgagagaggagaaatttgaaatcgggaggaagcccgccgacaaccccaaatccccgttgctcctgctcgtcttgtcggcaggccgccaatcactcactcctatcctatccgccgatggccgcggccgccgccgaggatgagaaggggctcctgtcgtcggtagtgggcgacatccggtgctactccggctccgaccccctccgcccgtggctccgggggatgcggaggatggagagggcgctgccgccagcgacgctgcgggagaagctgcccaggttcctccagaagtgcgcccaggagttccaggacaactcccgctaccgcgacgacccgcggtacctccgcgtctggatccagctgatggactacgtgacggacgcaaagccattgctcaagacgatggagaggaatggaataggcctcaaaagggcttcgttctatatggcatatgcactgtattatgagaagcacaggagattcaatgatgcagagaagatgtaccgtttgggaatccagaaccttgcagagcctattggggagttgcacaaagcacatgaacagtttcgtttccgcatggattcatacaagaagaaagataaactgcaggaaagaatgcctaggaaagtggggtctagtgctacatctatgaaccaagtcaaaggtgaaagcagacactataaagaactgaaatccaatataaagcaaacatcagaaagcagttctaatccttcattagggccaactaaagttggtgttctctccagaggaaactcaggagcaaacaataatttgccccgttgtaatagtgatgatactgtcgttgtacggtttataggctctgctttggttgggaagtcagagactgaagatgcctgtcaccacggcctagttgagccaactataaacactaaagaggctttggatgccattaatagcatgtttatggagccactggaacctgaaactgttctcaagagacaatcaaagcggcatttggtatctttgttgatgaagatgaacctagtgggcaataatactagcatgctccagaacaacagtatgaagcaaggccatacaaaattgagtcagcaaacaagtggatttgagatctttgttgatgaggatgttcctaatggcagctaccaaaatggaacgcaaaacaggaactcttcaaaggaacagagtgggtttgagatctttgttgatgaggattgcgctaatggcaacaatcaaaatgcggggcaaaacaggaattgtaggaaagaaaacacgaagttaaatcaggaaagaaataagtctgaactctttgttaaagaagatgaggctaatgacactgtccagaatgctctatgccacaagagtaataggtatcctccaaggccattattatctgattcatctaggcatcaaggcgaaagtgacttccagaagccatttgttggagggtttgcgatattgccagatgatgaagaaccatgtgagaaaagttatggtggtgctaatataaattgcagaactgtgcagcctactcataatactaataatttgctctgtccagttcaagatgattcaggaacaaggaatcgtgaaggtcctcattctgtgacttctggacttcaagaagacactgtcattcgtaggtttgttgcatcctctattgatgatgagcccaaggtggaaaatgcatggcaccatgggttagtcgacccaactgttaatctaaaggaagcaatggatgatataaacagcatgtttggaaaaccactaaacttcaagggcgaaaaaacaaagaggaaaactaatgcacactcagatggaaaagcagctccgatttctggtttctctatattagctgatgatgacctaaaagagggctgcaccagtaaagcgagtcagagcaattctttcaaatttggggatgagaatggtctatttgaacccacaatcaccactcgtgatgtcatggcagagatcaacgatatgtttggaatgccactggatttgtaagatgcatgtgtagagtgaactgaataattcaactgctagttggacaactggctttacctttccactctctccttgagaaatatgcagtgtcttgctgacgtgaagagcttggaatcagttctcttatttggtgtataagtgaatgttaggattctcaggtcgtcacacttcttgtggagttgcacctgccactgaataatttatcttctcaagtgaagggaagggggagtagtctgtcagaggccaccaggtgattgctgtagtgttgtcacataacgctgatctagtgatgttggctcaagactcaattttttagccagaaaaaaactgagacttgtgtgttttatggaaattgtagcaagcacaggtgcacttgttgctctgttcatcttgtatccatagttgtgctcatcaaaaacccattgtctgatgcccctatcaaattatgaaatgtaatggaataatagaaaggagtaagtgaaagaacgaaagaacttgtgttttgctttgatctgaggaccgaatatatacacaaggtgagtg

SEQ ID NO: 12974 - DNA, 2473 bp, Zea Mays
cctatccgccgatggccgcggccgccgccgaggatgagaaggggctcctgtcgtcggtagtgggcgacatccggtgctactccggctccgaccccctccgcccgtggctccgggggatgcggaggatggagagggcgctgccgccagcgacgctgcgggagaagctgcccaggttcctccagaagtgcgcccaggagttccaggacaactcccgctaccgcgacgacccgcggtacctccgcgtctggatccagctgatggactacgtgacggacgcaaagccattgctcaagacgatggagaggaatggaataggcctcaaaagggcttcgttctatatggcatatgcactgtattatgagaagcacaggagattcaatgatgcagagaagatgtaccgtttgggaatccagaaagcctattggggagttgcacaaagcacatgaacagtttcgtttccgcatggattcatacaagaagaaagataaactgcaggaaagaatgcctaggaaagtggggtctagtgctacatctatgaaccaagtcaaaggtgaaagcagacactataaagaactgaaatccaatataaagcaaacatcagaaagcagttctaatccttcattagggccaactaaagttggtgttctctccagaggaaactcaggagcaaacaataatttgccccgttgtaatagtgatgatactgtcgttgtacggtttataggctctgctttggttgggaagtcagagactgaagatgcctgtcaccacggcctagttgagccaactataaacactaaagaggctttggatgccattaatagcatgtttatggagccactggaacctgaaactgttctcaagagacaatcaaagcgtgagaacccaaatcataatcagcaaacaagggcatttggtatctttgttgatgaagatgaacctagtgggcaataatactagcatgctccagaacaacagtatgaagcaaggccatacaaaattgagtcagcaaacaagtggatttgagatctttgttgatgaggatgttcctaatggcagctaccaaaatggaacgcaaaacaggaactcttcaaaggaacagagtgggtttgagatctttgttgatgaggattgcgctaatggcaacaatcaaaatgcggggcaaaacaggaattgtaggaaagaaaacacgaagttaaatcaggaaagaaataagtctgaactctttgttaaagaagatgaggctaatgacactgtccagaatgctctatgccacaagagtaataggtatcctccaaggccattattatctgattcatctaggcatcaaggcgaaagtgacttccagaagccatttgttggagggtttgcgatattgccagatgatgaagaaccatgtgagaaaagttatggtggtgctaatataaattgcagaactgtgcagcctactcataatactaataatttgctctgtccagttcaagatgattcaggaacaaggaatcgtgaaggtcctcattctgtgacttctggacttcaagaagacactgtcattcgtaggtttgttgcatcctctattgatgatgagcccaaggtggaaaatgcatggcaccatgggttagtcgacccaactgttaatctaaaggaagcaatggatgatataaacagcatgtttggaaaaccactaaacttcaagggcgaaaaaacaaagaggaaaactaatgcacactcagatggaaaagcagctccgatttctggtttctctatattagctgatgatgacctaaaagagggctgcaccagtaaagcgagtcagagcaattctttcaaatttggggatgagaatggtctatttgaacccacaatcaccactcgtgatgtcatggcagagatcaacgatatgtttggaatgccactggatttgtaagatgcatgtgtagagtgaactgaataattcaactgctagttggacaactggctttacctttccactctctccttgagaaatatgcagtgtcttgctgacgtgaagagcttggaatcagttctcttatttggtgtataagtgcagaatgttaggattctcaggtcgtcacacttcttgtggagttgcacctgccactgaataatttatcttctcaagtgaagggaagggggagtagtctgtcagaggccaccaggtgattgctgtagtgttgtcacataacgctgatctagtgatgttggctcaagactcaattttttagccagaaaaaaactgagacttgtgtgttttatggaaattgtagcaagcacaggtgcacttgttgctctgttcatcttgtatccatagttgtgctcatcaaaaacccattgtctgatgcccctatcaaattatgaaatgtaatggaataatagaaaggagtaagtgaaagaacgaaagaacttgtgttttgctttgatctgaggaccgaatatatacacaaggtgagtg

SEQ ID NO: 12975 - DNA, 2548 bp, Zea Mays
caagaattcatgttgttctcgagctacgccggggcattgcatttgccatttggcaagccgcatgcagtcttacaaaaccatgctttggtgttcttggctgcttcttcagattgtatcagaattccattccatctctttcagtcttgagctgctctcagcttagaatgcccaacgagtcaacgacacagtcgcagtgaagtgcagtgcaaaagaaggtctttagtttcaccaagatcggcagatcgccaacatccgtctgcctctcctctccggtgccggcgactgacacaccacagggtcatctgcacaccaatagggtctgcgacaatgtctggacattcattctaacagatgcaaccttcaagagcgctgagattcaagaaacaccgagcaagatgggtctcaatgcggtggtagccgcctgctacgtctttccagtacttgtctctgtgctcgcagtccgcttcttctacgtactgtggcacagtggccaaccagagtcaaggttgtgcgccaccagattgcgttgtctcattgtccttggctccggagggcataccgcagaaatgatgaacatagtaacaacacttcagaaggataggttcacaccaaggtactatgtggctgcacttacagacaacatgagtcttcagaaggcacaggtctatgaacaatcacttattcagagcaacggaacgaaggctggcgagagcgctcatttcatgcagatatatcgtagtcgtgaagtgggccagtcttatgttacatccatcgcaacaacattgctagccacgctgcatgctatgtggctggtgataagaatcagaccacaagtgatattctgcaacggtccagggacgtgctttcctctatgcatctcggctttcgttctgaaggtgcttggcttgggatggtcatccattttctacattgaaagcatcgcaagagtgaagaaactgtcattgagtggtttactgctgtacaagctacggatcgctgaccagttcttcgtgcagtggccccagctgcagcatgagtatcctcgagcgtgctatgcaggtcgtttgatgtgaaggcttggccaaatctggctctgtcatgcagtgttttccatctcagagattcagaatacggtggcaatctatgcacactttgacaaatgcaagttacttaagaggtaagtctttctgaatgtaagagaatacgagtgtggtgttcctgcacatttgggctaacaggggcagagttcacaccaaaattacctgatgcatttactccataacacaaagggcctgaacaattatatgataaaatttcagttcattattacataaattttcagttgatttatgcatggcgcattgctcgtatcaatcgacgagttgttgctcatgtcatacgccttcttacggcgccttggatgacgcagcggtggtgcttgctgtagaactggcgatgtcagcgtcatgaacaagtgcatgagggctgtaactgtaagatggccctctatctcagcaattggtcccgggcttgggggcgctggagtagcttgtgccaggatcagagccgaagctagcatgtccccgtccaccggtggcgtgttcgcatgatgaaacatatggtataaccagtcaaagttaatagtgattgatttaggacaaaacccaaaaaatgggcaaacatgttgatagtttttaagttttaactagtccgaacgacatgcttgtgtcctgaggtagaggcagagctaggggtttgccaaggtatgccctggcatgcataccccacgcgcgtatccgacgtatacaaagtatgtatagaaaaataatttaaataaaaatatctaacataaaaaacgttggattttgtttcttttgtactgtttaggcttatggcctcaagatctacctaattaatttttgaggtagccatttagacagacaataggatcatacaatcggcaatctgacgctcatgcatgactcagagataccactggagactagactgctgggtgtaggcttgcgaaaacgacaaaatatatatgtatttgtttgtataatcatgtatgagaactgaggatttatctgtgcaagtataatttatttaattgtttggtattttttttaagtggatgaatataacataaattaagatattgattatgtctcttagaaagtctcggccaaaaagttatgtaaactatcagtatgacgtttcatctatttttattataatttataaatattttttagcttatcttccaaatttaagacttattgtttatattttttaacttaaccttcaaatttaaaatttactctgtaatttgatgtaaaagttgtttctaaattgttaaatggttgatgaaaaaaattactcatggatgtcttgtaagttccacgcgtacgtagctgcttgttttatggttagtgttgatggtccatgattctgcattgtcccatcccatcgtccttggtccatggaaccccaacgtacacaaccagcacgtgggactaaaaaatataaatgggaggaaaacgatggg

SEQ ID NO: 12976 - DNA, 2119 bp, Zea Mays
attcatgttgttctcgagctacgccggggcattgcatttgccatttggcaagccgcatgcagtcttacaaaaccatgctttggtgttcttggctgcttcttcagattgtatcagaattccattccatctctttcagtcttgagctgctctcagcttagaatgcccaacgagtcaacgacacagtcgcagtgaagtgcagtgcaaaagaaggtctttagtttcaccaagatcggcagatcgccaacatccgtctgcctctcctctccggtgccggcgactgacacaccacagggtcatctgcacaccaatagggtctgcgacaatgtctggacattcattctaacagatgcaaccttcaagagcgctgagattcaagaaacaccgagcaaggagggcataccgcagaaatgatgaacatagtaacaacacttcagaaggataggttcacaccaaggtactatgtggctgcacttacagacaacatgagtcttcagaaggcacaggtctatgaacaatcacttattcagagcaacggaacgaaggctggcgagagcgctcatttcatgcagatatatcgtagtcgtgaagtgggccagtcttatgttacatccatcgcaacaacattgctagccacgctgcatgctatgtggctggtgataagaatcagaccacaagtgatattctgcaacggtccagggacgtgctttcctctatgcatctcggctttcgttctgaaggtgcttggcttgggatggtcatccattttctacattgaaagcatcgcaagagtgaagaaactgtcattgagtggtttactgctgtacaagctacggatcgctgaccagttcttcgtgcagtggccccagctgcagcatgagtatcctcgagcgtgctatgcaggtcgtttgatgtgaaggcttggccaaatctggctctgtcatgcagtgttttccatctcagagattcagaatacggtggcaatctatgcacactttgacaaatgcaagttacttaagagaactggcgatgtcagcgtcatgaacaagtgcatgagggctgtaactgtaagatggccctctatctcagcaattggtcccgggcttgggggcgctggagtagcttgtgccaggatcagagccgaagctagcatgtccccgtccaccggtggcgtgttcgcatgatgaaacatatggtataaccagtcaaagttaatagtgattgatttaggacaaaacccaaaaaatgggcaaacatgttgatagtttttaagttttaactagtccgaacgacatgcttgtgtcctgaggtagaggcagagctaggggtttgccaaggtatgccctggcatgcataccccacgcgcgtatccgacgtatacaaagtatgtatagaaaaataatttaaataaaaatatctaacataaaaaacgttggattttgtttcttttgtactgtttaggcttatggcctcaagatctacctaattaatttttgaggtagccatttagacagacaataggatcatacaatcggcaatctgacgctcatgcatgactcagagataccactggagactagactgctgggtgtaggcttgcgaaaacgacaaaatatatatgtatttgtttgtataatcatgtatgagaactgaggatttatctgtgcaagtataatttatttaattgtttggtattttttttaagtggatgaatataacataaattaagatattgattatgtctcttagaaagtctcggccaaaaagttatgtaaactatcagtatgacgtttcatctatttttattataatttataaatattttttagcttatcttccaaatttaagacttattgtttatattttttaacttaaccttcaaatttaaaatttactctgtaatttgatgtaaaagttgtttctaaattgttaaatggttgatgaaaaaaattactcatggatgtcttgtaagttccacgcgtacgtagctgcttgttttatggttagtgttgatggtccatgattctgcattgtcccatcccatcgtccttggtccatggaaccccaacgtacacaaccagcacgtgggactaaaaaatataaatgggaggaaaacgatggg

SEQ ID NO: 12977 - DNA, 2224 bp, Zea Mays
attcatgttgttctcgagctacgccggggcattgcatttgccatttggcaagccgcatgcagtcttacaaaaccatgctttggtgttcttggctgcttcttcagattgtatcagaattccattccatctctttcagtcttgagctgctctcagcttagaatgcccaacgagtcaacgacacagtcgcagtgaagtgcagtgcaaaagaaggtctttagtttcaccaagatcggcagatcgccaacatccgtctgcctctcctctccggtgccggcgactgacacaccacagggtcatctgcacaccaatagggtctgcgacaatgtctggacattcattctaacagatgcaaccttcaagagcgctgagattcaagaaacaccgagcaaggagggcataccgcagaaatgatgaacatagtaacaacacttcagaaggataggttcacaccaaggtactatgtggctgcacttacagacaacatgagtcttcagaaggcacaggtctatgaacaatcacttattcagagcaacggaacgaaggctggcgagagcgctcatttcatgcagatatatcgtagtcgtgaagtgggccagtcttatgttacatccatcgcaacaacattgctagccacgctgcatgctatgtggctggtgataagaatcagaccacaagtgatattctgcaacggtccagggacgtgctttcctctatgcatctcggctttcgttctgaaggtgcttggcttgggatggtcatccattttctacattgaaagcatcgcaagagtgaagaaactgtcattgagtggtttactgctgtacaagctacggatcgctgaccagttcttcgtgcagtggccccagctgcagcatgagtatcctcgagcgtgctatgcaggtcgtttgatgtgaaggcttggccaaatctggctctgtcatgcagtgttttccatctcagagattcagaatacggtggcaatctatgcacactttgacaaatgcaagttacttaagagttgatttatgcatggcgcattgctcgtatcaatcgacgagttgttgctcatgtcatacgccttcttacggcgccttggatgacgcagcggtggtgcttgctgtagaactggcgatgtcagcgtcatgaacaagtgcatgagggctgtaactgtaagatggccctctatctcagcaattggtcccgggcttgggggcgctggagtagcttgtgccaggatcagagccgaagctagcatgtccccgtccaccggtggcgtgttcgcatgatgaaacatatggtataaccagtcaaagttaatagtgattgatttaggacaaaacccaaaaaatgggcaaacatgttgatagtttttaagttttaactagtccgaacgacatgcttgtgtcctgaggtagaggcagagctaggggtttgccaaggtatgccctggcatgcataccccacgcgcgtatccgacgtatacaaagtatgtatagaaaaataatttaaataaaaatatctaacataaaaaacgttggattttgtttcttttgtactgtttaggcttatggcctcaagatctacctaattaatttttgaggtagccatttagacagacaataggatcatacaatcggcaatctgacgctcatgcatgactcagagataccactggagactagactgctgggtgtaggcttgcgaaaacgacaaaatatatatgtatttgtttgtataatcatgtatgagaactgaggatttatctgtgcaagtataatttatttaattgtttggtattttttttaagtggatgaatataacataaattaagatattgattatgtctcttagaaagtctcggccaaaaagttatgtaaactatcagtatgacgtttcatctatttttattataatttataaatattttttagcttatcttccaaatttaagacttattgtttatattttttaacttaaccttcaaatttaaaatttactctgtaatttgatgtaaaagttgtttctaaattgttaaatggttgatgaaaaaaattactcatggatgtcttgtaagttccacgcgtacgtagctgcttgttttatggttagtgttgatggtccatgattctgcattgtcccatcccatcgtccttggtccatggaaccccaacgtacacaaccagcacgtgggactaaaaaatataaatgggaggaaaacgatggg

SEQ ID NO: 12978 - DNA, 885 bp, Zea Mays
gccgctggtgctggtgggcgctgctactgctgctgctacagggagggagcattcgacaggagctatattatatgctcaaagaagaaaaggatgtttacttttcctttggaagtgtccaggaccatggggccagcaaagctagccaaggaatgcactcatcaaaattttgcctaaatattgctggggacaccccttcttccaatcgtctgtttgatgcgatagttacccactgtgtccctgttatcatcagtgacgacattgagctaccttatgaggatgtgttggattattcaaaattctccatctttgtccgttcgtctgatgctgttaagaaaggttacctgatgagactgctcagtggtgtaagcaagcaacaatggacaaagatgtgggataggctcaaagaggtggataaacattttgagtatcagtatccatcacagaaggatgatgcagtccagatgatctggcaagcattgtctagaaaggtgccatcaattaagctgaaggttcacagatctaatagattttcaagatctaacagaggaaaataaacagaaaggggtgtgtctatcttgtctctattggctaatctaatgtaacacatttcactgacacaggctctcagcctttcccagttgcacaaaatagatagattgtaatactcaggttatctttaggaaaggtttgtaccttaagatttgttggttcagttgaagcatatactgtcaagtcaaaggttgttttgtaaggtatgttaaatgtaatcatgaaagaaagacttggttttgctgtttctggaacattgtgggatgaaaccatattcttctgtggcgtagcagattttattttgcctttaatttattcagtctcaattgccatctt

SEQ ID NO: 12979 - DNA, 968 bp, Zea Mays
gttaagttggacatgtccaaatcaactcaatcaatattaaataagattttctaccattagtgctacctgtagtcaatcacatacatcatcattctagactcgaccgcttcttgtatgacctcagggagggagcattcgacaggagctatattatatgctcaaagaagaaaaggatgtttacttttcctttggaagtgtccaggaccatggggccagcaaagctagccaaggaatgcactcatcaaaattttgcctaaatattgctggggacaccccttcttccaatcgtctgtttgatgcgatagttacccactgtgtccctgttatcatcagtgacgacattgagctaccttatgaggatgtgttggattattcaaaattctccatctttgtccgttcgtctgatgctgttaagaaaggttacctgatgagactgctcagtggtgtaagcaagcaacaatggacaaagatgtgggataggctcaaagaggtggataaacattttgagtatcagtatccatcacagaaggatgatgcagtccagatgatctggcaagcattgtctagaaaggtgccatcaattaagctgaaggttcacagatctaatagattttcaagatctaacagaggaaaataaacagaaaggggtgtgtctatcttgtctctattggctaatctaatgtaacacatttcactgacacaggctctcagcctttcccagttgcacaaaatagatagattgtaatactcaggttatctttaggaaaggtttgtaccttaagatttgttggttcagttgaagcatatactgtcaagtcaaaggttgttttgtaaggtatgttaaatgtaatcatgaaagaaagacttggttttgctgtttctggaacattgtgggatgaaaccatattcttctgtggcgtagcagattttattttgcctttaatttattcagtctcaattgccatctt

SEQ ID NO: 12980 - DNA, 1374 bp, Zea Mays
aacactcatctcttgaacatttcacccttttctaaatcaacattctacaacatacaacatagcaggtataatcgcagttctataaaacttgtcttttaacttttgtggtatcatcttgtcgtataaaatgctagatacttagatgccactttgtctgcactgttttggttctgtcgttaacatcttcatcaatatctctgtttatctgtagcattgattctaaatacctaaatgtgtcctttcgagacaatacttgaccttccaaactagcatctcttttctcatatgcagtaccacatatatttcgttttacctctattgagtataaaatctttaaatcgtagagtcttctaccgtaactctatttccctatttactattgtacgacttttaacaactagcactacatcgtcgacaaaaggtatacaccaagggatttcccctctacgccccctgtgaccttattcatcacaaaggcgaaaaggtatgaaaccgatttggttagaagagatcctcgctattccattgagggagggagcattcgacaggagctatattatatgctcaaagaagaaaaggatgtttacttttcctttggaagtgtccaggaccatggggccagcaaagctagccaaggaatgcactcatcaaaattttgcctaaatattgctggggacaccccttcttccaatcgtctgtttgatgcgatagttacccactgtgtccctgttatcatcagtgacgacattgagctaccttatgaggatgtgttggattattcaaaattctccatctttgtccgttcgtctgatgctgttaagaaaggttacctgatgagactgctcagtggtgtaagcaagcaacaatggacaaagatgtgggataggctcaaagaggtggataaacattttgagtatcagtatccatcacagaaggatgatgcagtccagatgatctggcaagcattgtctagaaaggtgccatcaattaagctgaaggttcacagatctaatagattttcaagatctaacagaggaaaataaacagaaaggggtgtgtctatcttgtctctattggctaatctaatgtaacacatttcactgacacaggctctcagcctttcccagttgcacaaaatagatagattgtaatactcaggttatctttaggaaaggtttgtaccttaagatttgttggttcagttgaagcatatactgtcaagtcaaaggttgttttgtaaggtatgttaaatgtaatcatgaaagaaagacttggttttgctgtttctggaacattgtgggatgaaaccatattcttctgtggcgtagcagattttattttgcctttaatttattcagtctcaattgccatctt

SEQ ID NO: 12981 - DNA, 2786 bp, Zea Mays
aacactcatctcttgaacatttcacccttttctaaatcaacattctacaacatacaacatagcaggtataatcgcagttctataaaacttgtcttttaacttttgtggtatcatcttgtcgtataaaatgctagatacttagatgccactttgtctgcactgttttggttctgtcgttaacatcttcatcaatatctctgtttatctgtagcattgattctaaatacctaaatgtgtcctttcgagacaatacttgaccttccaaactagcatctcttttctcatatgcagtaccacatatatttcgttttacctctattgagtataaaatctttaaatcgtagagtcttctaccgtaactctatttccctatttactattgtacgacttttaacaactagcactacatcgtcgacaaaaggtatacaccaagggatttcccctctacgccccctgtgaccttattcatcacaaaggcgaaaaggtatgaaaccgatttggttagaagagatcctcgctattccattgaggtgatgttcaataactttcttctatatctttataatatagatcgtcaacttaatttcccaacaatcggtacaaattagatagagatacaaactttatttaattattttatatattacaaaatagatgtagaggttctttcatttgcccatttatttttgcaaagcaggcgggtaattaaaaatactttcgatgtttgggccttccttgtccattacggacggcccaaaccattacgttgtgtgggccaatcaaccaattcagcacgatttacctaataaaaacaatccagaatgattttttttttacattttgacgagtttggtgcggaattcgaaaaggctagaagctgttcacgcgtcctctcctctccccttcctagatcgatccatccggcacggcacgcaaccccacccggctatgctcctccctccgtcgccgcctccagtccagacatgacccgcgctgccccatggcgccccgcggccgcaccctcctcccgctcgccgcggccaccgtcctcgtcgcttccaccatcttcctcttcgccgccgccggtgcgcgctggcggcccgccgacaccgacctccccgtcccgccacacgccttccccacggccgtccccgcggccgtgaccgcttcttcttactccaacgccaccgccggcaaggagctctcctttctcgacgagaacggccgccccgatgacccctcctccgcctcagcatccagctccacctccggcgccaccccggccgctggtgtcgtcagatgtgacccccgcgacgccgtcagggtattcatgtacgacatgccgcccgagttccacttcggcctcctcggctggtcgccgccgtcccctgactccgtctggccagacgtcaccgccgcctccccgccgccgcgctaccccggggggctcaaccagcagcacagcgtggagtactggctcacgctcgacctcctctcctcctcgcccccctgcggccgtcactccgcagtgcgggtctccgattcccgcgatgccgacctcgtcttcgtccccttcttcgcgtccctcagctacaatcgccactaccggcccgtgccgcccgagaaggtcagcagggacagggtcctccaggagaagctggtgcggtacctcgcggcgcggccggagtggaggaggtacggtggtgccgaccacgtcatcgtcgcgcaccaccccaacagcttgctgcacgcccgggcggtgctgcaccccgccgtgttcgtgctgtcagacttcgggaggtaccctccgagggtagctagcttggagaaggatgtcattgcgccctacaagcacatggctaagacgtacgccaatgactcggccgggttcgatgaccggccgaccctgttatacttccgtggagcaatttacaggaaggagggagggagcattcgacaggagctatattatatgctcaaagaagaaaaggatgtttacttttcctttggaagtgtccaggaccatggggccagcaaagctagccaaggaatgcactcatcaaaattttgcctaaatattgctggggacaccccttcttccaatcgtctgtttgatgcgatagttacccactgtgtccctgttatcatcagtgacgacattgagctaccttatgaggatgtgttggattattcaaaattctccatctttgtccgttcgtctgatgctgttaagaaaggttacctgatgagactgctcagtggtgtaagcaagcaacaatggacaaagatgtgggataggctcaaagaggtggataaacattttgagtatcagtatccatcacagaaggatgatgcagtccagatgatctggcaagcattgtctagaaaggtgccatcaattaagctgaaggttcacagatctaatagattttcaagatctaacagaggaaaataaacagaaaggggtgtgtctatcttgtctctattggctaatctaatgtaacacatttcactgacacaggctctcagcctttcccagttgcacaaaatagatagattgtaatactcaggttatctttaggaaaggtttgtaccttaagatttgttggttcagttgaagcatatactgtcaagtcaaaggttgttttgtaaggtatgttaaatgtaatcatgaaagaaagacttggttttgctgtttctggaacattgtgggatgaaaccatattcttctgtggcgtagcagattttattttgcctttaatttattcagtctcaattgccatctt

SEQ ID NO: 12982 - DNA, 2409 bp, Zea Mays
tcacccttttctaaatcaacattctacaacatacaacatagcaggtatacaccaagggatttcccctctacgccccctgtgaccttattcatcacaaaggcgaaaaggtatgaaaccgatttggttagaagagatcctcgctattccattgaggtgatgttcaataactttcttctatatctttataatatagatcgtcaacttaatttcccaacaatcggtacaaattagatagagatacaaactttatttaattattttatatattacaaaatagatgtagaggttctttcatttgcccatttatttttgcaaagcaggcgggtaattaaaaatactttcgatgtttgggccttccttgtccattacggacggcccaaaccattacgttgtgtgggccaatcaaccaattcagcacgatttacctaataaaaacaatccagaatgattttttttttacattttgacgagtttggtgcggaattcgaaaaggctagaagctgttcacgcgtcctctcctctccccttcctagatcgatccatccggcacggcacgcaaccccacccggctatgctcctccctccgtcgccgcctccagtccagacatgacccgcgctgccccatggcgccccgcggccgcaccctcctcccgctcgccgcggccaccgtcctcgtcgcttccaccatcttcctcttcgccgccgccggtgcgcgctggcggcccgccgacaccgacctccccgtcccgccacacgccttccccacggccgtccccgcggccgtgaccgcttcttcttactccaacgccaccgccggcaaggagctctcctttctcgacgagaacggccgccccgatgacccctcctccgcctcagcatccagctccacctccggcgccaccccggccgctggtgtcgtcagatgtgacccccgcgacgccgtcagggtattcatgtacgacatgccgcccgagttccacttcggcctcctcggctggtcgccgccgtcccctgactccgtctggccagacgtcaccgccgcctccccgccgccgcgctaccccggggggctcaaccagcagcacagcgtggagtactggctcacgctcgacctcctctcctcctcgcccccctgcggccgtcactccgcagtgcgggtctccgattcccgcgatgccgacctcgtcttcgtccccttcttcgcgtccctcagctacaatcgccactaccggcccgtgccgcccgagaaggtcagcagggacagggtcctccaggagaagctggtgcggtacctcgcggcgcggccggagtggaggaggtacggtggtgccgaccacgtcatcgtcgcgcaccaccccaacagcttgctgcacgcccgggcggtgctgcaccccgccgtgttcgtgctgtcagacttcgggaggtaccctccgagggtagctagcttggagaaggatgtcattgcgccctacaagcacatggctaagacgtacgccaatgactcggccgggttcgatgaccggccgaccctgttatacttccgtggagcaatttacaggaaggagggagggagcattcgacaggagctatattatatgctcaaagaagaaaaggatgtttacttttcctttggaagtgtccaggaccatggggccagcaaagctagccaaggaatgcactcatcaaaattttgcctaaatattgctggggacaccccttcttccaatcgtctgtttgatgcgatagttacccactgtgtccctgttatcatcagtgacgacattgagctaccttatgaggatgtgttggattattcaaaattctccatctttgtccgttcgtctgatgctgttaagaaaggttacctgatgagactgctcagtggtgtaagcaagcaacaatggacaaagatgtgggataggctcaaagaggtggataaacattttgagtatcagtatccatcacagaaggatgatgcagtccagatgatctggcaagcattgtctagaaaggtgccatcaattaagctgaaggttcacagatctaatagattttcaagatctaacagaggaaaataaacagaaaggggtgtgtctatcttgtctctattggctaatctaatgtaacacatttcactgacacaggctctcagcctttcccagttgcacaaaatagatagattgtaatactcaggttatctttaggaaaggtttgtaccttaagatttgttggttcagttgaagcatatactgtcaagtcaaaggttgttttgtaaggtatgttaaatgtaatcatgaaagaaagacttggttttgctgtttctggaacattgtgggatgaaaccatattcttctgtggcgtagcagattttattttgcctttaatttattcagtctcaattgccatctt

SEQ ID NO: 12983 - DNA, 274 bp, Zea Mays
acgccggggcggtgaggatcatcctgtgcaagggcaacccgcacttgatgtgcgacgcgcgcgtgctcgtgaagccctacaaggagaagggcaaggtccccgacaggttcaggaagctgcagcacccgcacctcggcgacttcgccggctgcacgtcgcccaccggattgctggattccagggaccccttcgatctgcagcagccacagatcgcatttcttctgctcaatctgccattgatgcagattaacaagctggtttgtttgtttggcaa

SEQ ID NO: 12984 - DNA, 342 bp, Zea Mays
ggtgaggatcatcctgtgcaagggcaacccgcacttgatgtgcgacgcgcgcgtgctcgtgaagccctacaaggagaagggcaaggtccccgacaggttcagcacccgcacctcggcgacttcgccggctgcacgtcgcccaccggattgctggattccagggaccccttcgatctgcagcagccacagatcggtgagtagtaaccgctccactctctgtgttgcgttgcattgcactgcttgcatgtatgcattcattccattcttctctttccttgcagcatttcttctgctcaatctgccattgatgcagattaacaagctggtttgtttgtttggcaa

SEQ ID NO: 12985 - DNA, 1527 bp, Zea Mays
tagaaagagcagcagcaggccatcgagctggagggccgccgcttcatggggctgcatctcctcgacctcaagatcaggggccaccacctcggctcctcccccgccacgaccgtcgtggggcaaggcgagggcggcaagggcagtggcaatggcaatgccgtccagctggaggatgtcatcgtccaagatactcctacgaagatgaacagtaacagccttgcaatgagtgcgcctgcagctgctgtatctgctgcagccgatgcaggaggcgagcacgaggagcagcaggaagcagggcacggggaggaaggcgacggcagtcccaagcaggcagtcaaccttggggaagacgagaagacggaatctggccccgtcacagctccacccattgttgctcgtggattccaagaaagtggtggcgtggccgtggagcacatcttgcctgacagccccttcgcatccaccaccaacaaggaggcctcagctccaacggctcagaacgggggcatcagcaatggcagccctcaccatgtggcttcttcgcccctcttcccacctgcacccgccattgagctgcccccgtacaactcctgcttctttcaggcgcccaggttttctcctgggcatgaagccattgggctgtgaatacagagcaaaaaggggtctccttttcctctaatctgggagggctatcgatgaccccatcaagtggaggaaaggagtagaaagctttgattaacaaatactaggtgtatcttcagagagggacaacaacagcagcaacaaaaaagagagagagagagagaaacaagtctaggttgttttagctctaggcctaagtatatgatagtagtcctataatataaataataatagtcttttagtagctcctgccggtatcaagattcaagtgattaaaaccgtagatggcgtagtactagtaaaaactagacagctagtcttggcagccagttgtagtgaagtgacatggctgcatacagacatccaaaggaaacagacttggtgctgctgcagctgcagtgctgctgcacaaggaaaagtgatgagaccgagacgagaggggtgtactctgctgggaccagagcactcacgggtgcagagagactccacttcacctcatgagcaattctgcagggaccccccctctgaatcgtaggagcatgcaccaagcactccttgtcctggtctttcaccttttgctcatcttttcacccttgtagaaaacagcaggaggtagcagacagacagaggaatgggaaaaaaagtatttattagtcgtttatcttgttggtccatgctttttatattttgcttggttcccaaattaaatgaatatatatgtagagttgtcttagctcactattttaagtttgactagcttaagtacataatgaacgtgctttgtttgctttagatgtactttaacagaactggtttttttggttctggactctaaatatgccttaagatatctatgatcacacacgtgcgtatattcttctttag

SEQ ID NO: 12986 - DNA, 1508 bp, Zea Mays
tcatggggctgcatctcctcgacctcaagatcaggggccaccacctcggctcctcccccgccacgaccgtcgtggggcaaggcgagggcggcaagggcagtggcaatggcaatgccgtccagctggaggatgtcatcgtccaaggtccgcttctcgaccctaaacaagatactcctacgaagatgaacagtaacagccttgcaatgagtgcgcctgcagctgctgtatctgctgcagccgatgcaggaggcgagcacgaggagcagcaggaagcagggcacggggaggaaggcgacggcagtcccaagcaggcagtcaaccttggggaagacgagaagacggaatctggccccgtcacagctccacccattgttgctcgtggattccaagaaagtggtggcgtggccgtggagcacatcttgcctgacagccccttcgcatccaccaccaacaaggaggcctcagctccaacggctcagaacgggggcatcagcaatggcagccctcaccatgtggcttcttcgcccctcttcccacctgcacccgccattgagctgcccccgtacaactcctgcttctttcaggcgcccaggttttctcctgggcatgaagccattgggctgtgaatacagagcaaaaaggggtctccttttcctctaatctgggagggctatcgatgaccccatcaagtggaggaaaggagtagaaagctttgattaacaaatactaggtgtatcttcagagagggacaacaacagcagcaacaaaaaagagagagagagagagaaacaagtctaggttgttttagctctaggcctaagtatatgatagtagtcctataatataaataataatagtcttttagtagctcctgccggtatcaagattcaagtgattaaaaccgtagatggcgtagtactagtaaaaactagacagctagtcttggcagccagttgtagtgaagtgacatggctgcatacagacatccaaaggaaacagacttggtgctgctgcagctgcagtgctgctgcacaaggaaaagtgatgagaccgagacgagaggggtgtactctgctgggaccagagcactcacgggtgcagagagactccacttcacctcatgagcaattctgcagggaccccccctctgaatcgtaggagcatgcaccaagcactccttgtcctggtctttcaccttttgctcatcttttcacccttgtagaaaacagcaggaggtagcagacagacagaggaatgggaaaaaaagtatttattagtcgtttatcttgttggtccatgctttttatattttgcttggttcccaaattaaatgaatatatatgtagagttgtcttagctcactattttaagtttgactagcttaagtacataatgaacgtgctttgtttgctttagatgtactttaacagaactggtttttttggttctggactctaaatatgccttaagatatctatgatcacacacgtgcgtatattcttctttag

SEQ ID NO: 12987 - DNA, 1549 bp, Zea Mays
cactctctccgtctctcgactgaaaaaaaggacccttcttcttggcactccaagcggaaggaacggtggcgtttctccgttctacgaagtggcgcgccatctgcaccggtcggctgcggcggattgagcggtggctttcctcgtcagttgctcttcccgaacgccgccagcaccgctcgtggcatctgcgtctctgccttctccaaccgccagcaccgctcccgatccaggaccaagaagcgtgtgaggagctttcagctgccacccggtgccaccatgctccggcatctccagcgatccctccgtgccattcactactcacccatcatcggccgtgatgccgcctgcaaccccattcccctccaccggttctgggattcacatatagagcatgccacccgagatttctctacttccacaagacttacaggacatccaatatatcagcagaatgagttagaaccaactacgcctgtgaaggatactgacataataattgaccgcatacgaaagagcacacggaaattggaggaaggccctgttggaaaaaatctgtcttcagcggagaaaaggaaatttcttgtcaacactctccttagccttgaagattcaagagaagctgtttatggcacccttgatgcctgggttgcctttgagcaggattttcctttggcttcactaaagcaagcactttcagttcttgagaaggaggaacagtggcatagaattgtccaggtgatcaaatggatgctgagcaaagggcaaggaaatacaatgagaacatatgagctattggcatgtgcactcgagaaggataatagagctgaggaagcacatagaatctggcagaataaagtgggccacgatctgcattcggttccttggcgtttctgccgtcttatgttggctatctactaccgaaacaataggctagacaggctcgtgaagctcttcaaagaactcgaagcttgtggccgtaaacctccaagcaaagacattgtgcggaaagtcgaagatgcgtacgaaacgcttggattactagaagataaaaaggtgttgcttgataaatacaaggatttatacaacaaaccgtctcgggacgatcggaagaaaggctccaaatccaaaaagatcgagtctgataaaccatctgatggtgacagtaaggaaagcaagatggaaacatctgagaaccttgaagaccgctgtttccctgtggatgcaaaaccagatgcctctgcttaggctcatcactgaaccaccgacgtcgccataagatttggccaaaacccggtgctgtcagcattagcgattggcgtgctctcagtacacgtttgctcccctaaccagttagtgttttttctttctctctagacatgttacaagggcatttgtatttgctgttttgcactgacatcatttttgccaagaccctaagcggtataatactgtgcgacggctatgtataatactgtgcgacgttcattactggcagcaatatacacaccccttgttcgatataatgtgcgcagggaaccgagttacaata

SEQ ID NO: 12988 - DNA, 1642 bp, Zea Mays
aaaaaaaggacccttcttcttggcactccaagcggaaggaacggtggcgtttctccgttctacgaagtggcgcgccatctgcaccggtcggctgcggcggattgagcggtggctttcctcgtcagttgctcttcccgaacgccgccagcaccgctcgtggcatctgcgtctctgccttctccaaccgccagcaccgctcccgatccaggaccaagaagcgtgtgaggagctttcagctgccacccggtgccaccatgctccggcatctccagcgatccctccgtgccattcactactcacccatcatcggccgtgatgccgcctgcaaccccattcccctccaccggttctgggattcacatatagagcatgccacccgagatttctctacttccacaagacttacaggacatccaatatatcagcagaatgagttagaaccaactacgcctgtgaaggatactgacataataattgaccgcatacgaaagagcacacggaaattggaggaaggccctgttggaaaaaatctgtcttcagcggagaaaaggaaatttcttgtcaacactgtatgtacagatagtattgatataattcttttaccctgtgcggaaaatattctactacgtctcaaatgatgatgatacacatgctaatgatgtgtttacaactattttgggaattctccttagccttgaagattcaagagaagctgtttatggcacccttgatgcctgggttgcctttgagcaggattttcctttggcttcactaaagcaagcactttcagttcttgagaaggaggaacagtggcatagaattgtccaggtgatcaaatggatgctgagcaaagggcaaggaaatacaatgagaacatatgagctattggcatgtgcactcgagaaggataatagagctgaggaagcacatagaatctggcagaataaagtgggccacgatctgcattcggttccttggcgtttctgccgtcttatgttggctatctactaccgaaacaataggctagacaggctcgtgaagctcttcaaagaactcgaagcttgtggccgtaaacctccaagcaaagacattgtgcggaaagtcgaagatgcgtacgaaacgcttggattactagaagataaaaaggtgttgcttgataaatacaaggatttatacaacaaaccgtctcgggacgatcggaagaaaggctccaaatccaaaaagatcgagtctgataaaccatctgatggtgacagtaaggaaagcaagatggaaacatctgagaaccttgaagaccgctgtttccctgtggatgcaaaaccagatgcctctgcttaggctcatcactgaaccaccgacgtcgccataagatttggccaaaacccggtgctgtcagcattagcgattggcgtgctctcagtacacgtttgctcccctaaccagttagtgttttttctttctctctagacatgttacaagggcatttgtatttgctgttttgcactgacatcatttttgccaagaccctaagcggtataatactgtgcgacggctatgtataatactgtgcgacgttcattactggcagcaatatacacaccccttgttcgatataatgtgcgcagggaaccgagttacaata

SEQ ID NO: 12989 - DNA, 3854 bp, Zea Mays
tggcactccaagcggaaggaacggtggcgtttctccgttctacgaagtggcgcgccatctgcaccggtcggctgcggcggattgagcggtggctttcctcgtcagttgctcttcccgaacgccgccagcaccgctcgtggcatctgcgtctctgccttctccaaccgccagcaccgctcccgatccaggaccaagaagcgtgtgaggagctttcagctgccacccggtgccaccatgctccggcatctccagcgatccctccgtgccattcactactcacccatcatcggccgtgatgccgcctgcaaccccattcccctccaccggttctgggattcacatatagagcatgccacccgagatttctctacttccacaagacttacaggacatccaatatatcagcagaatgagttagaaccaactacgcctgtgaaggatactgacataataattgaccgcatacgaaagagcacacggaaattggaggaaggccctgttggaaaaaatctgtcttcagcggagaaaaggaaatttcttgtcaacactgtatgtacagatagtattgatataattcttttaccctgtgcggaaaatattctactacgtctcaaatgatgatgatacacatgctaatgatgtgtttacaactattttgggaattctccttagccttgaagattcaagagaagctgtttatggcacccttgatgcctgggttgcctttgagcaggattttcctttggcttcactaaagcaagcactttcagttcttgagaaggaggaacagtggcatagaattgtccaggtgatcaaatggatgctgagcaaagggcaaggaaatacaatgagaacatatgagctattggcatgtgcactcgagaaggataatagagctgaggaagcacatagaatctggcagaataaagtgggccacgatctgcattcggttccttggcgtttctgccgtcttatgttggctatctactaccgaaacaataggctagacaggctcgtgaagctcttcaaagaactcgaagcttgtggccgtaaacctccaagcaaagacattgtgcggaaagtcgaagatgcgtacgaaacgcttggattactagaagataaaaaggtgttgcttgataaatacaaggatttatacaacaaaccgtctcgggacgatcggaagaaaggctccaaatccaaaaagatcgagtctgataaaccatctgcattattattctgttctcagatggtgacagtaaggaaagcaagatggaaacatctgagaaccttgaagaccgctgtttccctgtggatgcaaaaccagatgcctctgcttaggctcatcactgaaccaccgacgtcgccataagatttggccaaaacccggtgctgtcagcattagcgattggcgtgctctcagtacacgtttgctcccctaaccagatgtttccaaaaaggtgtctggatctgatggggtttccgctgagagatctactagatcgaggtttagccaggatcatgctgccaaatcaaaagcaaagctcaagggcgctttctctttacttggactgaacaatgataccttcaaaggacctcgtacctccaaaaggtttcagttgaaggacctgtcctggagatcaaaggatactactgtcaatgggaaagagaaccatgatcaagagacagtgcatgaggagaataccaagtcctgtgaacatgaatatgggagttactgcctctggtctactgaacacagggaagtaatgaaggatgccattgtcaagaagcttaaagatcaactttttatggcaagagctcattatcctagcattgcaaaattgaagcaacatgaagcatttacacgtgaactgaagcaaaacatccaagaacatgaacgcatgctgagtgacaccatcacagatgctgatcttccaccattttttgcaaagaagctggagaagatggagcacacaattgtgagagccaagtctagtgaagtaggatgctccaatgttgaacggaaacttaggcagctacttgatataactgaagatgaagcttatttccatacaaggcagagtgcatttctatatcatcttggagtgcagactatgccgaaaactcaccattgcttgaacatgagattgacagtagaatatttcaagtctggatcaaatcatgtggatcagttaaatgaccagaagcttgaaagtcctgccttacatcactatgtaatgttttccaggaatgtacttgcagcttccaccactatcaattcaacggttatgaactcccaggattcggaccacatcgttttccatgtattcactgatgcacaaaacttttatgcgatgaagtattggttcgataaaaattcatacttggagtcgactgtacgcgtaactaacattgaggacaaccagaagctctctaaggatgtagattcccttgagatgcaacaattatggcctacagaggaatatcgtgtcacgattcgtaatcattctgaacctttccagaggcagatgaaaactaagtacatatctatcttcggcctttcacatttcctcttgcctgaccttcttcctggcttgaatagagtagttgttctggatgatgatttgattgtccagaaggacttgtcacctctatggaacctcgatatgggtggtaaagtgattggagcagtccagttctgtggagtgagattagggcagctgaaaccttatatagcagaccataacgtcgatgatgattcatgtgtgtggttgtcgggcctgaatgtcattgaattggataaatggagggacaccggcattaccagtttgcatgatcaatcagtccagaagttgcgaaaggacagcctgaaatcacagcgactgcaagcactccctgcaggtctacttgcctttcaagacctgatatatcctttggaagattcatgggttgagtcaggccttggacatgattatggaatcagccatgtcgatatagagaaggctgctactctgcactacaatggtgtgatgaaaccttggcttgacttggggatacttgattacaagaactactggaggaagtacatgaccagtggagagaagttcatgacggaatgcaacattcactaattaacagggcatgaaatgcaccaaacactcattttttcgggcatttggacaacagacttcatgggctttgttcatcatgaaaataaacagaatcacgcctgacctgcaacatccatgatgacacaaattcacccctgacgtgacgagggagtgctcagtccaattccaagaggagaataagatgaaatgctttctgcggaacgttgccataacagcatccacgatgtctgaaggacgctagcacgaaacctgagttatgttgcagagtaccaagatataacgtagaatatttcacactgttcattatggtttgatgagtttttttccctatattcagcttggcattgcaaaagtgcagttccttgctgttcatttttagtataagatctttggtgctattctttttgctcattgtgcaagagcaatactgagggagttcaatgttgacggcggcacatcgtgtataggaaacagcaaaccatgactgaattagcgagtatttccttgtactctttgcagcaagtcgtgtgtttgttatcgtcagatgttgatgtcccattgacgacataccaaatggtggtttgttccgctcaatggcagtctctctcaatctatctgatttgttgggatctttttgtttggaaaatctcaaggtactagaattcagatagttatgtctacgtcccgtttggatcattggtttggatccttggaactgaattttat

SEQ ID NO: 12990 - DNA, 1473 bp, Zea Mays
ctccgttctacgaagtggcgcgccatctgcaccggtcggctgcggcggattgagcggtggctttcctcgtcagttgctcttcccggttctgggattcacatatagaggtacacatgtctgcatcctaagtaattctgtttattagtcctaaactagttgcacctctggctcatgtgttttgctcatatctggtaacaagcatgccacccgagatttctctacttccacaagacttacaggacatccaatatatcagcagaatgagttagaaccaactacgcctgtgaaggatactgacataataattgaccgcatacgaaagagcacacggaaattggaggaaggccctgttggaaaaaatctgtcttcagcggagaaaaggaaatttcttgtcaacactgtatgtacagatagtattgatataattcttttaccctgtgcggaaaatattctactacgtctcaaatgatgatgatacacatgctaatgatgtgtttacaactattttgggaattctccttagccttgaagattcaagagaagctgtttatggcacccttgatgcctgggttgcctttgagcaggattttcctttggcttcactaaagcaagcactttcagttcttgagaaggaggaacagtggcatagaattgtccaggtgatcaaatggatgctgagcaaagggcaaggaaatacaatgagaacatatgagctattggcatgtgcactcgagaaggataatagagctgaggaagcacatagaatctggcagaataaagtgggccacgatctgcattcggttccttggcgtttctgccgtcttatgttggctatctactaccgaaacaataggctagacaggctcgtgaagctcttcaaagaactcgaagcttgtggccgtaaacctccaagcaaagacattgtgcggaaagtcgaagatgcgtacgaaacgcttggattactagaagataaaaaggtgttgcttgataaatacaaggatttatacaacaaaccgtctcgggacgatcggaagaaaggctccaaatccaaaaagatcgagtctgataaaccatctgatggtgacagtaaggaaagcaagatggaaacatctgagaaccttgaagaccgctgtttccctgtggatgcaaaaccagatgcctctgcttaggctcatcactgaaccaccgacgtcgccataagatttggccaaaacccggtgctgtcagcattagcgattggcgtgctctcagtacacgtttgctcccctaaccagttagtgttttttctttctctctagacatgttacaagggcatttgtatttgctgttttgcactgacatcatttttgccaagaccctaagcggtataatactgtgcgacggctatgtataatactgtgcgacgttcattactggcagcaatatacacaccccttgttcgatataatgtgcgcagggaaccgagttacaata

SEQ ID NO: 12991 - DNA, 1442 bp, Zea Mays
gcggtggctttcctcgtcagttgctcttcccgaacgccgccagcaccgctcgtggcatctgcgtctctgccttctccaaccgccagcaccgctcccgatccaggaccaagaagcgtgtgaggagctttcagctgccacccggtgccaccatgctccggcatctccagcgatccctccgtgccattcactactcacccatcatcggccgtgatgccgcctgcaaccccattcccctccaccggttctgggattcacatatagagcatgccacccgagatttctctacttccacaagacttacaggacatccaatatatcagcagaatgagttagaaccaactacgcctgtgaaggatactgacataataattgaccgcatacgaaagagcacacggaaattggaggaaggccctgttggaaaaaatctgtcttcagcggagaaaaggaaatttcttgtcaacactctccttagccttgaagattcaagagaagctgtttatggcacccttgatgcctgggttgcctttgagcaggattttcctttggcttcactaaagcaagcactttcagttcttgagaaggaggaacagtggcatagaattgtccaggtgatcaaatggatgctgagcaaagggcaaggaaatacaatgagaacatatgagctattggcatgtgcactcgagaaggataatagagctgaggaagcacatagaatctggcagaataaagtgggccacgatctgcattcggttccttggcgtttctgccgtcttatgttggctatctactaccgaaacaataggctagacaggctcgtgaagctcttcaaagaactcgaagcttgtggccgtaaacctccaagcaaagacattgtgcggaaagtcgaagatgcgtacgaaacgcttggattactagaagataaaaaggtgttgcttgataaatacaaggatttatacaacaaaccgtctcgggacgatcggaagaaaggctccaaatccaaaaagatcgagtctgataaaccatctgcattattattctgttctcagatggtgacagtaaggaaagcaagatggaaacatctgagaaccttgaagaccgctgtttccctgtggatgcaaaaccagatgcctctgcttaggctcatcactgaaccaccgacgtcgccataagatttggccaaaacccggtgctgtcagcattagcgattggcgtgctctcagtacacgtttgctcccctaaccagttagtgttttttctttctctctagacatgttacaagggcatttgtatttgctgttttgcactgacatcatttttgccaagaccctaagcggtataatactgtgcgacggctatgtataatactgtgcgacgttcattactggcagcaatatacacaccccttgttcgatataatgtgcgcagggaaccgagttacaata

SEQ ID NO: 12992 - DNA, 3286 bp, Zea Mays
aaaaattaatattttatcgtatatatatttggtcaaagctaaacaaatatacatgtataaactaatctatgagacaccgagatagtaataataaacaaaaagaaagtttaaactttgacgagctgcctctgtatacaattttttttccgtcggtacgaaaaaaaacaaagaagtaaaaaaggacggcagagattgggggataaagacgcgtccaaagcaaaactgcaaaagcagaggcgggtccgggacggtcggcccgcgggctccatccattgatgccgctcctccccacggctccttcctgcagcctcctccttcctccctcgccactctcccctccaccgctgcctggtgtgtagcgtagcgtagaggcgcggcgcggcgcggctgactggttggttccagttgttctagacaacgctggcttaaccgcgcgaggcccgaggaaagttagcttgtttcttgcagctgaatgcgggaagcaagcaactgcattttactaacctcaccacaccagacccaccactgacttcccggcctccggctctggagcagagcaggtggcagcactagcacggccacgtgcggcatgaaggggcaccagcaccagcagcagtcgtcgtctccgctgctgccgatgccgccgcccagcaagcgccgctgtagcgcgctggcggcggccgtgccggcgctcgtcgtctgctccacgctgctcccgctcgtctacctcctcgccctgcaccgccccgccgggtatggatcggacgaccgcgccgcggtggtcatcagcaccgagctcgccggcctcggggcgcgtggcagccggcatctggagaacgggggcgccatgaagcacaagctgctcaaggatgtttccaaaaaggtgtctggatctgatggggtttccgctgagagatctactagatcgaggtttagccaggatcatgctgccaaatcaaaagcaaagctcaagggcgctttctctttacttggactgaacaatgataccttcaaaggtaaaggacctcgtacctccaaaaggtttcagttgaaggacctgtcctggagatcaaaggatactactgtcaatgggaaagagaaccatgatcaagagacagtgcatgaggagaataccaagtcctgtgaacatgaatatgggagttactgcctctggtctactgaacacagggaagtaatgaaggatgccattgtcaagaagcttaaagatcaactttttatggcaagagctcattatcctagcattgcaaaattgaagcaacatgaagcatttacacgtgaactgaagcaaaacatccaagaacatgaacgcatgctgagtgacaccatcacagatgctgatcttccaccattttttgcaaagaagctggagaagatggagcacacaattgtgagagccaagtctagtgaagtaggatgctccaatgttgaacggaaacttaggcagctacttgatataactgaagatgaagcttatttccatacaaggcagagtgcatttctatatcatcttggagtgcagactatgccgaaaactcaccattgcttgaacatgagattgacagtagaatatttcaagtctggatcaaatcatgtggatcagttaaatgaccagaagcttgaaagtcctgccttacatcactatgtaatgttttccaggaatgtacttgcagcttccaccactatcaattcaacggttatgaactcccaggattcggaccacatcgttttccatgtattcactgatgcacaaaacttttatgcgatgaagtattggttcgataaaaattcatacttggagtcgactgtacgcgtaactaacattgaggacaaccagaagctctctaaggatgtagattcccttgagatgcaacaattatggcctacagaggaatatcgtgtcacgattcgtaatcattctgaacctttccagaggcagatgaaaactaagtacatatctatcttcggcctttcacatttcctcttgcctgaccttcttcctggcttgaatagagtagttgttctggatgatgatttgattgtccagaaggacttgtcacctctatggaacctcgatatgggtggtaaagtgattggagcagtccagttctgtggagtgagattagggcagctgaaaccttatatagcagaccataacgtcgatgatgattcatgtgtgtggttgtcgggcctgaatgtcattgaattggataaatggagggacaccggcattaccagtttgcatgatcaatcagtccagaagttgcgaaaggacagcctgaaatcacagcgactgcaagcactccctgcaggtctacttgcctttcaagacctgatatatcctttggaagattcatgggttgagtcaggccttggacatgattatggaatcagccatgtcgatatagagaaggctgctactctgcactacaatggtgtgatgaaaccttggcttgacttggggatacttgattacaagaactactggaggaagtacatgaccagtggagagaagttcatgacggaatgcaacattcactaattaacagggcatgaaatgcaccaaacactcattttttcgggcatttggacaacagacttcatgggctttgttcatcatgaaaataaacagaatcacgcctgacctgcaacatccatgatgacacaaattcacccctgacgtgacgagggagtgctcagtccaattccaagaggagaataagatgaaatgctttctgcggaacgttgccataacagcatccacgatgtctgaaggacgctagcacgaaacctgagttatgttgcagagtaccaagatataacgtagaatatttcacactgttcattatggtttgatgagtttttttccctatattcagcttggcattgcaaaagtgcagttccttgctgttcatttttagtataagatctttggtgctattctttttgctcattgtgcaagagcaatactgagggagttcaatgttgacggcggcacatcgtgtataggaaacagcaaaccatgactgaattagcgagtatttccttgtactctttgcagcaagtcgtgtgtttgttatcgtcagatgttgatgtcccattgacgacataccaaatggtggtttgttccgctcaatggcagtctctctcaatctatctgatttgttgggatctttttgtttggaaaatctcaaggtactagaattcagatagttatgtctacgtcccgtttggatcattggtttggatccttggaactgaattttat

SEQ ID NO: 12993 - DNA, 3109 bp, Zea Mays
aaaaattaatattttatcgtatatatatttggtcaaagctaaacaaatatacatgtataaactaatctatgagacaccgagatagtaataataaacaaaaagaaagtttaaactttgacgagctgcctctgtatacaattttttttccgtcggtacgaaaaaaaacaaagaagtaaaaaaggacggcagagattgggggataaagacgcgtccaaagcaaaactgcaaaagcagaggcgggtccgggacggtcggcccgcgggctccatccattgatgccgctcctccccacggctccttcctgcagcctcctccttcctccctcgccactctcccctccaccgctgcctggtgtgtagcgtagcgtagaggcgcggcgcggcgcggctgactgctgaatgcgggaagcaagcaactgcattttactaacctcaccacaccagacccaccactgacttcccggcctccggctctggagcagagcaggtggcagcactagcacggccacgtgcggcatgaaggggcaccagcaccagcagcagtcgtcgtctccgctgctgccgatgccgccgcccagcaagcgccgctgtagcgcgctggcggcggccgtgccggcgctcgtcgtctgctccacgctgctcccgctcgtctacctcctcgccctgcaccgccccgccgggtatggatcggacgaccgcgccgcggtggtcatcagcaccgagctcgccggcctcggggcgcgtggcagccggcatctggagaacgggggcgccatgaagcacaagctgctcaaggatgtttccaaaaaggtgtctggatctgatggggtttccgctgagagatctactagatcgaggtttagccaggatcatgctgccaaatcaaaagcaaagctcaagggcgctttctctttacttggactgaacaatgataccttcaaaggacctcgtacctccaaaaggtttcagttgaaggacctgtcctggagatcaaaggatactactgtcaatgggaaagagaaccatgatcaagagacagtgcatgaggagaataccaagtcctgtgaacatgaatatgggagttactgcctctggtctactgaacacagggaagtaatgaaggatgccattgtcaagaagcttaaagatcaactttttatggcaagagctcattatcctagcattgcaaaattgaagcaacatgaagcatttacacgtgaactgaagcaaaacatccaagaacatgaacgcatgctgagtgacaccatcacagatgctgatcttccaccattttttgcaaagaagctggagaagatggagcacacaattgtgagagccaagtctagtgaagtaggatgctccaatgttgaacggaaacttaggcagctacttgatataactgaagatgaagcttatttccatacaaggcagagtgcatttctatatcatcttggagtgcagactatgccgaaaactcaccattgcttgaacatgagattgacagtagaatatttcaagtctggatcaaatcatgtggatcagttaaatgaccagaagcttgaaagtcctgccttacatcactatgtaatgttttccaggaatgtacttgcagcttccaccactatcaattcaacggttatgaactcccaggattcggaccacatcgttttccatgtattcactgatgcacaaaacttttatgcgatgaagtattggttcgataaaaattcatacttggagtcgactgtacgcgtaactaacattgaggacaaccagaagctctctaaggatgtagattcccttgagatgcaacaattatggcctacagaggaatatcgtgtcacgattcgtaatcattctgaacctttccagaggcagatgaaaactaaaaggacttgtcacctctatggaacctcgatatgggtggtaaagtgattggagcagtccagttctgtggagtgagattagggcagctgaaaccttatatagcagaccataacgtcgatgatgattcatgtgtgtggttgtcgggcctgaatgtcattgaattggataaatggagggacaccggcattaccagtttgcatgatcaatcagtccagaagttgcgaaaggacagcctgaaatcacagcgactgcaagcactccctgcaggtctacttgcctttcaagacctgatatatcctttggaagattcatgggttgagtcaggccttggacatgattatggaatcagccatgtcgatatagagaaggctgctactctgcactacaatggtgtgatgaaaccttggcttgacttggggatacttgattacaagaactactggaggaagtacatgaccagtggagagaagttcatgacggaatgcaacattcactaattaacagggcatgaaatgcaccaaacactcattttttcgggcatttggacaacagacttcatgggctttgttcatcatgaaaataaacagaatcacgcctgacctgcaacatccatgatgacacaaattcacccctgacgtgacgagggagtgctcagtccaattccaagaggagaataagatgaaatgctttctgcggaacgttgccataacagcatccacgatgtctgaaggacgctagcacgaaacctgagttatgttgcagagtaccaagatataacgtagaatatttcacactgttcattatggtttgatgagtttttttccctatattcagcttggcattgcaaaagtgcagttccttgctgttcatttttagtataagatctttggtgctattctttttgctcattgtgcaagagcaatactgagggagttcaatgttgacggcggcacatcgtgtataggaaacagcaaaccatgactgaattagcgagtatttccttgtactctttgcagcaagtcgtgtgtttgttatcgtcagatgttgatgtcccattgacgacataccaaatggtggtttgttccgctcaatggcagtctctctcaatctatctgatttgttgggatctttttgtttggaaaatctcaaggtactagaattcagatagttatgtctacgtcccgtttggatcattggtttggatccttggaactgaattttat

SEQ ID NO: 12994 - DNA, 2996 bp, Zea Mays
cccacggctccttcctgcagcctcctccttcctccctcgccactctcccctccaccgctgcctggtgtgtagcgtagcgtagaggcgcggcgcggcgcggctgactggttggttccagttgttctagacaacgctggcttaaccgcgcgaggcccgaggaaagttagcttgtttcttgcagctgaatgcgggaagcaagcaactgcattttactaacctcaccacaccagacccaccactgacttcccggcctccggctctggagcagagcaggtggcagcactagcacggccacgtgcggcatgaaggggcaccagcaccagcagcagtcgtcgtctccgctgctgccgatgccgccgcccagcaagcgccgctgtagcgcgctggcggcggccgtgccggcgctcgtcgtctgctccacgctgctcccgctcgtctacctcctcgccctgcaccgccccgccgggtatggatcggacgaccgcgccgcggtggtcatcagcaccctcgccggcctcggggcgcgtggcagccggcatctggagaacgggggcgccatgaagcacaagctgctcaaggatgtttccaaaaaggtgtctggatctgatggggtttccgctgagagatctactagatcgaggtttagccaggatcatgctgccaaatcaaaagcaaagctcaagggcgctttctctttacttggactgaacaatgataccttcaaaggtaaaggacctcgtacctccaaaaggtttcagttgaaggacctgtcctggagatcaaaggatactactgtcaatgggaaagagaaccatgatcaagagacagtgcatgaggagaataccaagtcctgtgaacatgaatatgggagttactgcctctggtctactgaacacagggaagtaatgaaggatgccattgtcaagaagcttaaagatcaactttttatggcaagagctcattatcctagcattgcaaaattgaagcaacatgaagcatttacacgtgaactgaagcaaaacatccaagaacatgaacgcatgctgagtgacaccatcacagatgctgatcttccaccattttttgcaaagaagctggagaagatggagcacacaattgtgagagccaagtctagtgaagtaggatgctccaatgttgaacggaaacttaggcagctacttgatataactgaagatgaagcttatttccatacaaggcagagtgcatttctatatcatcttggagtgcagactatgccgaaaactcaccattgcttgaacatgagattgacagtagaatatttcaagtctggatcaaatcatgtggatcagttaaatgaccagaagcttgaaagtcctgccttacatcactatgtaatgttttccaggaatgtacttgcagcttccaccactatcaattcaacggttatgaactcccaggattcggaccacatcgttttccatgtattcactgatgcacaaaacttttatgcgatgaagtattggttcgataaaaattcatacttggagtcgactgtacgcgtaactaacattgaggacaaccagaagctctctaaggatgtagattcccttgagatgcaacaattatggcctacagaggaatatcgtgtcacgattcgtaatcattctgaacctttccagaggcagatgaaaactaagtacatatctatcttcggcctttcacatttcctcttgcctgaccttcttcctggcttgaatagagtagttgttctggatgatgatttgattgtccagaaggacttgtcacctctatggaacctcgatatgggtggtaaagtgattggagcagtccagttctgtggagtgagattagggcagctgaaaccttatatagcagaccataacgtcgatgatgattcatgtgtgtggttgtcgggcctgaatgtcattgaattggataaatggagggacaccggcattaccagtttgcatgatcaatcagtccagaagttgcgaaaggacagcctgaaatcacagcgactgcaagcactccctgcaggtctacttgcctttcaagacctgatatatcctttggaagattcatgggttgagtcaggccttggacatgattatggaatcagccatgtcgatatagagaaggctgctactctgcactacaatggtgtgatgaaaccttggcttgacttggggatacttgattacaagaactactggaggaagtacatgaccagtggagagaagttcatgacggaatgcaacattcactaattaacagggcatgaaatgcaccaaacactcattttttcgggcatttggacaacagacttcatgggctttgttcatcatgaaaataaacagaatcacgcctgacctgcaacatccatgatgacacaaattcacccctgacgtgacgagggagtgctcagtccaattccaagaggagaataagatgaaatgctttctgcggaacgttgccataacagcatccacgatgtctgaaggacgctagcacgaaacctgagttatgttgcagagtaccaagatataacgtagaatatttcacactgttcattatggtttgatgagtttttttccctatattcagcttggcattgcaaaagtgcagttccttgctgttcatttttagtataagatctttggtgctattctttttgctcattgtgcaagagcaatactgagggagttcaatgttgacggcggcacatcgtgtataggaaacagcaaaccatgactgaattagcgagtatttccttgtactctttgcagcaagtcgtgtgtttgttatcgtcagatgttgatgtcccattgacgacataccaaatggtggtttgttccgctcaatggcagtctctctcaatctatctgatttgttgggatctttttgtttggaaaatctcaaggtactagaattcagatagttatgtctacgtcccgtttggatcattggtttggatccttggaactgaattttat

SEQ ID NO: 12995 - DNA, 2934 bp, Zea Mays
ctccaccgctgcctggtgtgtagcgtagcgtagaggcgcggcgcggcgcggctgactggttggttccagttgttctagacaacgctggcttaaccgcgcgaggcccgaggaaagttagcttgtttcttgcagctgaatgcgggaagcaagcaactgcattttactaacctcaccacaccagacccaccactgacttcccggcctccggctctggagcagagcaggtggcagcactagcacggccacgtgcggcatgaaggggcaccagcaccagcagcagtcgtcgtctccgctgctgccgatgccgccgcccagcaagcgccgctgtagcgcgctggcggcggccgtgccggcgctcgtcgtctgctccacgctgctcccgctcgtctacctcctcgccctgcaccgccccgccgggtatggatcggacgaccgcgccgcggtggtcatcagcaccgagctcgccggcctcggggcgcgtggcagccggcatctggagaacgggggcgccatgaagcacaagctgctcaaggatgtttccaaaaaggtgtctggatctgatggggtttccgctgagagatctactagatcgaggtttagccaggatcatgctgccaaatcaaaagcaaagctcaagggcgctttctctttacttggactgaacaatgataccttcaaaggacctcgtacctccaaaaggtttcagttgaaggacctgtcctggagatcaaaggatactactgtcaatgggaaagagaaccatgatcaagagacagtgcatgaggagaataccaagtcctgtgaacatgaatatgggagttactgcctctggtctactgaacacagggaagtaatgaaggatgccattgtcaagaagcttaaagatcaactttttatggcaagagctcattatcctagcattgcaaaattgaagcaacatgaagcatttacacgtgaactgaagcaaaacatccaagaacatgaacgcatgctgagtgacaccatcacagatgctgatcttccaccattaagctggagaagatggagcacacaattgtgagagccaagtctagtgaagtaggatgctccaatgttgaacggaaacttaggcagctacttgatataactgaagatgaagcttatttccatacaaggcagagtgcatttctatatcatcttggagtgcagactatgccgaaaactcaccattgcttgaacatgagattgacagtagaatatttcaagtctggatcaaatcatgtggatcagttaaatgaccagaagcttgaaagtcctgccttacatcactatgtaatgttttccaggaatgtacttgcagcttccaccactatcaattcaacggttatgaactcccaggattcggaccacatcgttttccatgtattcactgatgcacaaaacttttatgcgatgaagtattggttcgataaaaattcatacttggagtcgactgtacgcgtaactaacattgaggacaaccagaagctctctaaggatgtagattcccttgagatgcaacaattatggcctacagaggaatatcgtgtcacgattcgtaatcattctgaacctttccagaggcagatgaaaactaagtacatatctatcttcggcctttcacatttcctcttgcctgaccttcttcctggcttgaatagagtagttgttctggatgatgatttgattgtccagaaggacttgtcacctctatggaacctcgatatgggtggtaaagtgattggagcagtccagttctgtggagtgagattagggcagctgaaaccttatatagcagaccataacgtcgatgatgattcatgtgtgtggttgtcgggcctgaatgtcattgaattggataaatggagggacaccggcattaccagtttgcatgatcaatcagtccagaagttgcgaaaggacagcctgaaatcacagcgactgcaagcactccctgcaggtctacttgcctttcaagacctgatatatcctttggaagattcatgggttgagtcaggccttggacatgattatggaatcagccatgtcgatatagagaaggctgctactctgcactacaatggtgtgatgaaaccttggcttgacttggggatacttgattacaagaactactggaggaagtacatgaccagtggagagaagttcatgacggaatgcaacattcactaattaacagggcatgaaatgcaccaaacactcattttttcgggcatttggacaacagacttcatgggctttgttcatcatgaaaataaacagaatcacgcctgacctgcaacatccatgatgacacaaattcacccctgacgtgacgagggagtgctcagtccaattccaagaggagaataagatgaaatgctttctgcggaacgttgccataacagcatccacgatgtctgaaggacgctagcacgaaacctgagttatgttgcagagtaccaagatataacgtagaatatttcacactgttcattatggtttgatgagtttttttccctatattcagcttggcattgcaaaagtgcagttccttgctgttcatttttagtataagatctttggtgctattctttttgctcattgtgcaagagcaatactgagggagttcaatgttgacggcggcacatcgtgtataggaaacagcaaaccatgactgaattagcgagtatttccttgtactctttgcagcaagtcgtgtgtttgttatcgtcagatgttgatgtcccattgacgacataccaaatggtggtttgttccgctcaatggcagtctctctcaatctatctgatttgttgggatctttttgtttggaaaatctcaaggtactagaattcagatagttatgtctacgtcccgtttggatcattggtttggatccttggaactgaattttat

SEQ ID NO: 12996 - DNA, 3310 bp, Zea Mays
attggctcccctcgccgccgccggagggaggcggtcaaacgatgctatcccttcccctacgccgccgccgccgcctccttcgcttctgcgctcgccggaaccctaccttcctgcgcctctccatcgctgcctccgcggctgccctctccaccgcccctaccgtcgcttccgccgtcgtcactcccatttccgaccgcctacgcgtcctccgctccctccacgctgtcgcccctgaccaccttctctcccacccgctcccctcatccgcccatatctgcctcgccgcccacctcgctgcccgcgctcgcctcttcgcgcactcccgccgcctcctctcccgcctgcttggtgctggccaccggccccacctcgccgcctccctcgtcgacattcttcaccgcgcggccctcgcgctggggcctcatcgcagcgcgctaccttccgtctttgacaccctcctctccctgctcgccgatcacggcctcctcgacgacgccgtccgcgcccttgcccgcgtgcggcagctgcgggtgccccccaacacccgtacctgcaaccacattctgctacgcctcgcccgcaaccgccaaggcgggctcgtcaggcggctcttcgaacatctgcccgcgcccaacgtgttcacgttcaatatcgtgattgattttctgtgcaagcagggagagcttgtggaagcgagggcattgttcgtgaggatgaaggcgatgggctgctcgccggacgttgtcacttacaattctttgattgatgggtacggtaagtgcggggagctggaagaggtggagttgttggtgtcagagatgaggaagtctggatgtgcagctgatgttgtgacgtacaatgcattgatcaattgcttttccaaatttgggtggatcgagaaggcctacagctactttggggagatgaagagactgggagtgatggcaaatgtggttacgttgagcacttttgtcgatgcattttgcaaagaagggttggtccgggaggcaatgaagctgtttgcacagatgagggtgaggggaatgatgccaaatgagttcacttatacttcattggtcgatggcacttgtaaggcagggaggctagatgatgccattgtattgcttgatgaaatggtgcaccaggggttggtgccaaatgtggtgacgtacactgttatggtcgatggcctttgcaaagagggtaaggttgctgtagcagatgatgttttgagtctgatggagagagctggtgttaaagccaatgagttgctctacactacacttatccatggacacttcatgaataagaacagtgagagggctctggatttgttgaatgagatgaagaataaaggaatggaacttgatgtctctctctatggcactcttatttggggtctctgtaaagttcaaaagctggatgaagctaagagtttgttgcataaaatggatgactgtggtttgagacctaatactgtcatttatacgacaataatggatgccttctttaaagcaggaaaagagtcagaggctgttgccttactccacaagattccggattctgggctccaacctaatgttgttacttattgtgcattaattgatggattgtgcaaagcaggatcaatctatgaggccatctctcattttgataaaatgagagagttaggtctggatccaaatgtacaagtttacaccaccttaattgatggtttttgcaagattggttccttgagtaaggctgtgcacttgatgaatgaaatggttgacaagggtatgtctcttgacaaagttgtgtacacatctctcattgatgggcacatgaagcagggagatctccagggtgcctttgcactcaaggccaagatgattgaaactggtttgcaacttgatctctattgctacacttgttttatctcgggcttctgtaatatgaatatgatgcaagaagctagaggggttctttcagaaatgattgggactggcattacacctgataagacggcttacaactgtctgataagaaaataccagaaactgggaaacatggaggaagcgtcaagtcttcagaacgaaatggaaagtgttttgagctcttgcacagaagaggatactgcttctggttctggttgtgaaacctgagtttgcagctgtacaaagagctggccggccttggagcatgtggcaagcacatctggagaatgggggcgccatgaagcacaagctgctgaaggatgtttccaaaatgttgttcgtgcctaatgggatttcgactgagagatctactagatcaaattgtaacaaggatcatgctatcaaatcaaaagcaacacttaagggtgctttgtctttaattgcactaaacattgtcagttacaacaggaagatggaaaataggtttcaaacactaagagagctgggatccaaaggaaaaagaagcaacccactggtgcttgaagagttcatgtgggaaaatgaatgggttgaagaaaatgaagatgatggtgacaacaacatatggtatgctgtggatgaggcattaggagcaactcaggctcttcgaggcagaaacgttccttaaatgaaggtttttgcgatgaagtggtcaaatgggccagagtcactgtacgttcttgaatcctgatgtcatcccggtcttagccaacaaagaagaattcaagggagagacatatcacatatgcaatagaggcgcgtgtagctaaaaacaagcccataacttgaagaccatgtagttttttttcagggacagcagcaacttgagagagaaccataacagtggatcttctcttgggtattggcaattccataccaagtggttatatacaggatttatgcaaagaaagaacagaacatttttgcgagagacatctgttgaaaaatcagcctcgaaggtgcctgtctcttctaggagcaaagagctgccgaacttcaagagaaaagtggaggaagaaagtctccttgtttaccaggaagaaacataggaaggaggcgtcaaaaacgcccgctggaaatgagaaaactgagggcacgtcctctgctgtagcaaaacagaaaccggggcacacgctctgcttcaaacgtctctaaactactttatgctatgaatttataatctttttaccattatgctcataaatcaatgaagtagtaagagaatacacacgtcgtcaatctatctccaattatttttttattatatataaagtatatggtgtctctgcccgcagcaacatatatctaatattagaatttagaacgctgtgtcataatctaactaccagatctgt

SEQ ID NO: 12997 - DNA, 3266 bp, Zea Mays
attggctcccctcgccgccgccggagggaggcggtcaaacgatgctatcccttcccctacgccgccgccgccgcctccttcgcttctgcgctcgccggaaccctaccttcctgcgcctctccatcgctgcctccgcggctgccctctccaccgcccctaccgtcgcttccgccgtcgtcactcccatttccgaccgcctacgcgtcctccgctccctccacgctgtcgcccctgaccaccttctctcccacccgctcccctcatccgcccatatctgcctcgccgcccacctcgctgcccgcgctcgcctcttcgcgcactcccgccgcctcctctcccgcctgcttggtgctggccaccggccccacctcgccgcctccctcgtcgacattcttcaccgcgcggccctcgcgctggggcctcatcgcagcgcgctaccttccgtctttgacaccctcctctccctgctcgccgatcacggcctcctcgacgacgccgtccgcgcccttgcccgcgtgcggcagctgcgggtgccccccaacacccgtacctgcaaccacattctgctacgcctcgcccgcaaccgccaaggcgggctcgtcaggcggctcttcgaacatctgcccgcgcccaacgtgttcacgttcaatatcgtgattgattttctgtgcaagcagggagagcttgtggaagcgagggcattgttcgtgaggatgaaggcgatgggctgctcgccggacgttgtcacttacaattctttgattgatgggtacggtaagtgcggggagctggaagaggtggagttgttggtgtcagagatgaggaagtctggatgtgcagctgatgttgtgacgtacaatgcattgatcaattgcttttccaaatttgggtggatcgagaaggcctacagctactttggggagatgaagagactgggagtgatggcaaatgtggttacgttgagcacttttgtcgatgcattttgcaaagaagggttggtccgggaggcaatgaagctgtttgcacagatgagggtgaggggaatgatgccaaatgagttcacttatacttcattggtcgatggcacttgtaaggcagggaggctagatgatgccattgtattgcttgatgaaatggtgcaccaggggttggtgccaaatgtggtgacgtacactgttatggtcgatggcctttgcaaagagggtaaggttgctgtagcagatgatgttttgagtctgatggagagagctggtgttaaagccaatgagttgctctacactacacttatccatggacacttcatgaataagaacagtgagagggctctggatttgttgaatgagatgaagaataaaggaatggaacttgatgtctctctctatggcactcttatttggggtctctgtaaagttcaaaagctggatgaagctaagagtttgttgcataaaatggatgactgtggtttgagacctaatactgtcatttatacgacaataatggatgccttctttaaagcaggaaaagagtcagaggctgttgccttactccacaagattccggattctgggctccaacctaatgttgttacttattgtgcattaattgatggattgtgcaaagcaggatcaatctatgaggccatctctcattttgataaaatgagagagttaggtctggatccaaatgtacaagtttacaccaccttaattgatggtttttgcaagattggttccttgagtaaggctgtgcacttgatgaatgaaatggttgacaagggtatgtctcttgacaaagttgtgtacacatctctcattgatgggcacatgaagcagggagatctccagggtgcctttgcactcaaggccaagatgattgaaactggtttgcaacttgatctctattgctacacttgttttatctcgggcttctgtaatatgaatatgatgcaagaagctagaggggttctttcagaaatgattgggactggcattacacctgataagacggcttacaactgtctgataagaaaataccagaaactgggaaacatggaggaagcgtcaagtcttcagaacgaaatggaaagtgttttgagctcttgcacagaagaggatactgcttctggttctggttgtgaaacctgagtttgcagctgtacaaagagctggccggccttggagcatgtggcaagcacatctggagaatgggggcgccatgaagcacaagctgctgaaggatgtttccaaaatgttgttcgtgcctaatgggatttcgactgagagatctactagatcaaattgaagatggaaaataggtttcaaacactaagagagctgggatccaaaggaaaaagaagcaacccactggtgcttgaagagttcatgtgggaaaatgaatgggttgaagaaaatgaagatgatggtgacaacaacatatggtatgctgtggatgaggcattaggagcaactcaggctcttcgaggcagaaacgttccttaaatgaaggtttttgcgatgaagtggtcaaatgggccagagtcactgtacgttcttgaatcctgatgtcatcccggtcttagccaacaaagaagaattcaagggagagacatatcacatatgcaatagaggcgcgtgtagctaaaaacaagcccataacttgaagaccatgtagttttttttcagggacagcagcaacttgagagagaaccataacagtggatcttctcttgggtattggcaattccataccaagtggttatatacaggatttatgcaaagaatttgacaatgccaaacatctgccttttggagcttcttccagagaacagaacatttttgcgagagacatctgttgaaaaatcagcctcgaaggtgcctgtctcttctaggagcaaagagctgccgaacttcaagagaaaagtggaggaagaaagtctccttgtttaccaggaagaaacataggaaggaggcgtcaaaaacgcccgctggaaatgagaaaactgagggcacgtcctctgctgtagcaaaacagaaaccggggcacacgctctgcttcaaacgtctctaaactactttatgctatgaatttataatctttttaccattatgctcataaatcaatgaagtagtaagagaatacacacgtcgtcaatctatctccaattatttttttattatatataaagtatatggtgtctctgcccgcagcaacatatatctaatattagaatttagaacgctgtgtcataatctaactaccagatctgt

SEQ ID NO: 12998 - DNA, 3265 bp, Zea Mays
gctcccctcgccgccgccggagggaggcggtcaaacgatgctatcccttcccctacgccgccgccgccgcctccttcgcttctgcgctcgccggaaccctaccttcctgcgcctctccatcgctgcctccgcggctgccctctccaccgcccctaccgtcgcttccgccgtcgtcactcccatttccgaccgcctacgcgtcctccgctccctccacgctgtcgcccctgaccaccttctctcccacccgctcccctcatccgcccatatctgcctcgccgcccacctcgctgcccgcgctcgcctcttcgcgcactcccgccgcctcctctcccgcctgcttggtgctggccaccggccccacctcgccgcctccctcgtcgacattcttcaccgcgcggccctcgcgctggggcctcatcgcagcgcgctaccttccgtctttgacaccctcctctccctgctcgccgatcacggcctcctcgacgacgccgtccgcgcccttgcccgcgtgcggcagctgcgggtgccccccaacacccgtacctgcaaccacattctgctacgcctcgcccgcaaccgccaaggcgggctcgtcaggcggctcttcgaacatctgcccgcgcccaacgtgttcacgttcaatatcgtgattgattttctgtgcaagcagggagagcttgtggaagcgagggcattgttcgtgaggatgaaggcgatgggctgctcgccggacgttgtcacttacaattctttgattgatgggtacggtaagtgcggggagctggaagaggtggagttgttggtgtcagagatgaggaagtctggatgtgcagctgatgttgtgacgtacaatgcattgatcaattgcttttccaaatttgggtggatcgagaaggcctacagctactttggggagatgaagagactgggagtgatggcaaatgtggttacgttgagcacttttgtcgatgcattttgcaaagaagggttggtccgggaggcaatgaagctgtttgcacagatgagggtgaggggaatgatgccaaatgagttcacttatacttcattggtcgatggcacttgtaaggcagggaggctagatgatgccattgtattgcttgatgaaatggtgcaccaggggttggtgccaaatgtggtgacgtacactgttatggtcgatggcctttgcaaagagggtaaggttgctgtagcagatgatgttttgagtctgatggagagagctggtgttaaagccaatgagttgctctacactacacttatccatggacacttcatgaataagaacagtgagagggctctggatttgttgaatgagatgaagaataaaggaatggaacttgatgtctctctctatggcactcttatttggggtctctgtaaagttcaaaagctggatgaagctaagagtttgttgcataaaatggatgactgtggtttgagacctaatactgtcatttatacgacaataatggatgccttctttaaagcaggaaaagagtcagaggctgttgccttactccacaagattccggattctgggctccaacctaatgttgttacttattgtgcattaattgatggattgtgcaaagcaggatcaatctatgaggccatctctcattttgataaaatgagagagttaggtctggatccaaatgtacaagtttacaccaccttaattgatggtttttgcaagattggttccttgagtaaggctgtgcacttgatgaatgaaatggttgacaagggtatgtctcttgacaaagttgtgtacacatctctcattgatgggcacatgaagcagggagatctccagggtgcctttgcactcaaggccaagatgattgaaactggtttgcaacttgatctctattgctacacttgttttatctcgggcttctgtaatatgaatatgatgcaagaagctagaggggttctttcagaaatgattgggactggcattacacctgataagacggcttacaactgtctgataagaaaataccagaaactgggaaacatggaggaagcgtcaagtcttcagaacgaaatggaaagtgttttgagctcttgcacagaagaggatactgcttctggttctggttgtgaaacctgagtttgcagctgtacaaagagctggccggccttggagcatgtggcaagcacatctggagaatgggggcgccatgaagcacaagctgctgaaggatgtttccaaaatgttgttcgtgcctaatgggatttcgactgagagatctactagatcaaattgaagatggaaaataggtttcaaacactaagagagctgggatccaaaggaaaaagaagcaacccactggtgcttgaagagttcatgtgggaaaatgaatgggttgaagaaaatgaagatgatggtgacaacaacatatggtatgctgtggatgaggcattaggagcaactcaggctcttcgaggcagaaacgttccttaaatgaaggtttttgcgatgaagtggtcaaatgggccagagtcactgtacgttcttgaatcctgatgtcatcccggtcttagccaacaaagaagaattcaagggagagacatatcacatatgcaatagaggcgcgtgtagctaaaaacaagcccataacttgaagaccatgtagttttttttcagggacagcagcaacttgagagagaaccataacagtggatcttctcttgggtattggcaattccataccaagtggttatatacaggatttatgcaaagaacagtttgacaatgccaaacatctgccttttggagcttcttccagagaacagaacatttttgcgagagacatctgttgaaaaatcagcctcgaaggtgcctgtctcttctaggagcaaagagctgccgaacttcaagagaaaagtggaggaagaaagtctccttgtttaccaggaagaaacataggaaggaggcgtcaaaaacgcccgctggaaatgagaaaactgagggcacgtcctctgctgtagcaaaacagaaaccggggcacacgctctgcttcaaacgtctctaaactactttatgctatgaatttataatctttttaccattatgctcataaatcaatgaagtagtaagagaatacacacgtcgtcaatctatctccaattatttttttattatatataaagtatatggtgtctctgcccgcagcaacatatatctaatattagaatttagaacgctgtgtcataatctaactaccagatctgt

SEQ ID NO: 12999 - DNA, 2915 bp, Zea Mays
ccgccggagggaggcggtcaaacgatgctatcccttcccctacgccgccgccgccgcctccttcgcttctgcgctcgccggaaccctaccttcctgcgcctctccatcgctgcctccgcggctgccctctccaccgcccctaccgtcgcttccgccgtcgtcactcccatttccgaccgcctacgcgtcctccgctccctccacgctgtcgcccctgaccaccttctctcccacccgctcccctcatccgcccatatctgcctcgccgcccacctcgctgcccgcgctcgcctcttcgcgcactcccgccgcctcctctcccgcctgcttggtgctggccaccggccccacctcgccgcctccctcgtcgacattcttcaccgcgcggccctcgcgctggggcctcatcgcagcgcgctaccttccgtctttgacaccctcctctccctgctcgccgatcacggcctcctcgacgacgccgtccgcgcccttgcccgcgtgcggcagctgcgggtgccccccaacacccgtacctgcaaccacattctgctacgcctcgcccgcaaccgccaaggcgggctcgtcaggcggctcttcgaacatctgcccgcgcccaacgtgttcacgttcaatatcgtgattgattttctgtgcaagcagggagagcttgtggaagcgagggcattgttcgtgaggatgaaggcgatgggctgctcgccggacgttgtcacttacaattctttgattgatgggtacggtaagtgcggggagctggaagaggtggagttgttggtgtcagagatgaggaagtctggatgtgcagctgatgttgtgacgtacaatgcattgatcaattgcttttccaaatttgggtggatcgagaaggcctacagctactttggggagatgaagagactgggagtgatggcaaatgtggttacgttgagcacttttgtcgatgcattttgcaaagaagggttggtccgggaggcaatgaagctgtttgcacagatgagggtgaggggaatgatgccaaatgagttcacttatacttcattggtcgatggcacttgtaaggcagggaggctagatgatgccattgtattgcttgatgaaatggtgcaccaggggttggtgccaaatgtggtgacgtacactgttatggtcgatggcctttgcaaagagggtaaggttgctgtagcagatgatgttttgagtctgatggagagagctggtgttaaagccaatgagttgctctacactacacttatccatggacacttcatgaataagaacagtgagagggctctggatttgttgaatgagatgaagaataaaggaatggaacttgatgtctctctctatggcactcttatttggggtctctgtaaagttcaaaagctggatgaagctaagagtttgttgcataaaatggatgactgtggtttgagacctaatactgtcatttatacgacaataatggatgccttctttaaagcaggaaaagagtcagaggctgttgccttactccacaagattccggattctgggctccaacctaatgttgttacttattgtgcattaattgatggattgtgcaaagcaggatcaatctatgaggccatctctcattttgataaaatgagagagttaggtctggatccaaatgtacaagtttacaccaccttaattgatggtttttgcaagattggttccttgagtaaggctgtgcacttgatgaatgaaatggttgacaagggtatgtctcttgacaaagttgtgtacacatctctcattgatgggcacatgaagcagggagatctccagggtgcctttgcactcaaggccaagatgattgaaactggagctggccggccttggagcatgtggcaagcacatctggagaatgggggcgccatgaagcacaagctgctgaaggatgtttccaaaatgttgttcgtgcctaatgggatttcgactgagagatctactagatcaaattgtaacaaggatcatgctatcaaatcaaaagcaacacttaagggtgctttgtctttaattgcactaaacattgtcagttacaacaggaagatggaaaataggtttcaaacactaagagagctgggatccaaaggaaaaagaagcaacccactggtgcttgaagagttcatgtgggaaaatgaatgggttgaagaaaatgaagatgatggtgacaacaacatatggtatgctgtggatgaggcattaggagcaactcaggctcttcgaggcagaaacgttccttaaatgaaggtttttgcgatgaagtggtcaaatgggccagagtcactggacagcagcaacttgagagagaaccataacagtggatcttctcttgggtattggcaattccataccaagtggttatatacaggatttatgcaaagaatttgacaatgccaaacatctgccttttggagcttcttccagagaacagaacatttttgcgagagacatctgttgaaaaatcagcctcgaaggtgcctgtctcttctaggagcaaagagctgccgaacttcaagagaaaagtggaggaagaaagtctccttgtttaccaggaagaaacataggaaggaggcgtcaaaaacgcccgctggaaatgagaaaactgagggcacgtcctctgctgtagcaaaacagaaaccggggcacacgctctgcttcaaacgtctctaaactactttatgctatgaatttataatctttttaccattatgctcataaatcaatgaagtagtaagagaatacacacgtcgtcaatctatctccaattatttttttattatatataaagtatatggtgtctctgcccgcagcaacatatatctaatattagaatttagaacgctgtgtcataatctaactaccagatctgt

SEQ ID NO: 13000 - DNA, 3873 bp, Zea Mays
gttcccgttccttgatcccgtcgatccgggaacctggtttccatccttcaagttcaagccatggggtccacgtgccggatttctcttctttgttccctgctccctctcccccaatcctctcttgtagccacggccgcatgctcgcgcgcccgcgccgcctttctacttccaagtgcagctcgcctcggcttgccagcgccatcttttcttcctcccactccctcacctgaccggtctgattctgggtcgatgtcggtcgccatggtccgacccatggtcggaggatagcggagaccagtgaaggccttgcgcagaagagtggcggggaggagaagcgacggagaagcgcgctgccgcgctcacatggccgaccaaggtaggcatgtgcgtgcagacatttgaattcatgaaccagatctcgacaatttggattctaagtaaaaatgggcagggtcgctctctcccaacaatagtcctgccattcgttgccatgtacccaacgagcgtccagcaccaagaaaacaagagagagaaagagtgggtgtgagcaccgaactgtcgaactgagcatggagctcgccttgggggccatggccagcttggcccccaagctgggcgacctgctcatgaaggagtatgtcgtgcacaagggcctcaagcttgacatcgagtccctctccagggagcttgtgatgatgaacaccgccctcgtccacgcatcccgggttccacctgaccagctcactgaggtggaaaagctctgggcacgccacatccgggagctgtcgtatgacatggaggacgccatcgacgatttcatcctgcgtgtggttggtggtggcaactctgctaccgaagacaccaaagtcttcaaggagatccttggcaaggtcagcgccgtgatgtcaatgaagaagttcaaggatcggcgtcagatctccgacaaggtcaaagacataaaaaaactctctaacgagttggctgaactttatgccaagtacacagtaagaggtgcgggtgctgatctcgccgcgagcaccggcattgacccccgtgtcatcaatctgtacaagaaagagtcggatctcgttggcatccaggagtcaagggacaaagttatcaagatgctatctatagggaccaaagatgacgatgtgcaggcgtctgatcagaatctaaagatagtgtctatagtcggagttggaggattaggtaagactactctagccaaaacagtacatgatatgctagagaagcaattcggttgttctgctttcatttctgttggtaggactcctaatctgaataagtcatttaagaagatgctagtggaactcgatcgcaattataagcaagttgacatggccagatgggatctagaccaatttgtaaacgaactgcatgaattcttacagaacaagaggtacttgatcgttgttgatgacatatgggatgatgactcatgggaagcgatcagatatgccttgaaggacaataattgtgggagtagaatagtcatgactactcgtaattccggggttgtcacgaaagaagaagaggtttacagattaaaacctctttctgatgaaaactccaaaaaattgttctacaaaagaatagagagtcaggaaggagaaagccttgacggtgaactatctagtaaaatcatacacaaatgtggcggcctgccattggctatcattgcaatagctagtttgttggctgaaagaccatgtgaggagtggtcaagagtgtatgactcgattggtcttgggaataatggtgacaatacgacaaagatactgtcatacagctactatgatctgccttcttatctcaagccatgtctgttgcaactaagtattttttccagaagactatctcattgatacaaagcgtctgatatggatgtggataagtgaaggcctagtccatcttgagaaagagggtagcctatttgaggttggagaaaggtacttcaaggaacttgtgaatagaagcatgatccagccgatacagggaaaaaatagctggtttgaagaagagttccgtattcacgacgttgtgtttgatctcatccgtaagttgtcgaaagatgaagacttcgtaacccttttggacagcaacagacaacattcatgtccggatagtttaagaagagagaagaaaacaggagtgcctcgttctgattggaagcaacgtcgactggttatcctaaatcaacgtgtgcattccagaggtgttgaggtcagcatggacatgccagaggtgttgaggacacttaacattgtacactgtaacgttacaattatggccccacttcataacttcagagtttgtcgtgtgctatgtctagtaggcagctatgtacccatcagcctaaagcatctagggaagctgttgcatctcaagttcctacagatatctgacacgactgttgatgagcttcctaaggaaattgggcacctgaggtctcttcaggcactgatattaggctatactggactagacgagctaccatcgactgtttcctcgcttactcagttgatgtgcctgacagctagcgggttcaaaaggttgccagctgacaggatggggaacttaacgtccctggaggagctacggttagagagcatagttggtcagtgtgccgcccaatccctagtggcagagcttggcaagctaacaaggttgagggtggtcagcatcaccttttcagaggagctagaagagagtttgcaagaagcactggtcaaatctctgttcaacctgcggggactccaggaactatcgctttcttctaaaatgtggcagcagggaagcactatgtggggagactgggagccaccaaggcagcttcggggcctgatcgttcaaggcattgtcttctcacgacagcctcgatggatcaaccgctcctgcctgccacacctctgcttcttatgtctgatggtgcacgctgttgaagcacaggacctagataacctagggaggttgccagagctccggtacctcaagctagagggtgtcatctggcctccaagggtactggagttgggaacacaatggtgtgctgttggagcagttcccaacgaaggatgtgatcgaagatcttgacttgggcctggataacttgctttcacttgagcaagtaatagtcaaagtcaactgcttaggtgctactgctgcacaagtgcaggagctggaggctgtggccatgcgtgccgtggaaaatcatgccaaccgtccaaccataaaaatggatcgattatatgaagaaaatatcttatctgatgaaaagctggaggctctgcttcagcagcacattcaactagaaggcggcgtgctccagctgaaggataaacctgacgctttcttcatcagccagctacggttgtatcgacatcttcagaaagccgttatttcctacgactgtgcgggtgccagcatgtgtgaggtgctgaaagtggaagcagcttgtagacatgcagccgaggttcatcctaaccatccaagtattgaactgatcagaacaaataccgatgaaatggcctcctcatctgaccatcctagcacagagcccaggaattgatgactcggtttgtccaatccttccaacccaacagtaggtacgtgtgcatatccatctatactccaaattaattttattactctatccagttatcacatttcagtgccatgtgtaagtttcagtttcttgctgtgttctctttttctcttgcatttgttgcatcttaaaatttcaagcattgtcatttgagaacataatcacttatagctttttggtagacgctctatcagttttcagttaccggattgtcatttactaggaggccactaggaactaactat

SEQ ID NO: 13001 - DNA, 3768 bp, Zea Mays
gttcccgttccttgatcccgtcgatccgggaacctggtttccatccttcaagttcaagccatggggtccacgtgccggatttctcttctttgttccctgctccctctcccccaatcctctcttgtagccacggccgcatgctcgcgcgcccgcgccgcctttctacttccaagtgcagctcgcctcggcttgccagcgccatcttttcttcctcccactccctcacctgaccggtctgattctgggtcgatgtcggtcgccatggtccgacccatggtcggaggatagcggagaccagtgaaggccttgcgcagaagagtggcggggaggagaagcgacggagaagcgcgctgccgcgctcacatggccgaccaaggtaggcatgtgcgtgcagacatttgaattcatgaaccagatctcgacaatttggattctaagtaaaaatgggcagggtcgctctctcccaacaatagtcctgccattcgttgccatgtacccaacgagcgtccagcaccaagaaaacaagagagagaaagagtgggtgtgagcaccgaactgtcgaactgagcatggagctcgccttgggggccatggccagcttggcccccaagctgggcgacctgctcatgaaggagtatgtcgtgcacaagggcctcaagcttgacatcgagtccctctccagggagcttgtgatgatgaacaccgccctcgtccacgcatcccgggttccacctgaccagctcactgaggtggaaaagctctgggcacgccacatccgggagctgtcgtatgacatggaggacgccatcgacgatttcatcctgcgtgtggttggtggtggcaactctgctaccgaagacaccaaagtcttcaaggagatccttggcaaggtcagcgccgtgatgtcaatgaagaagttcaaggatcggcgtcagatctccgacaaggtcaaagacataaaaaaactctctaacgagttggctgaactttatgccaagtacacagtaagaggtgcgggtgctgatctcgccgcgagcaccggcattgacccccgtgtcatcaatctgtacaagaaagagtcggatctcgttggcatccaggagtcaagggacaaagttatcaagatgctatctatagggaccaaagatgacgatgtgcaggcgtctgatcagaatctaaagatagtgtctatagtcggagttggaggattagatgctagtggaactcgatcgcaattataagcaagttgacatggccagatgggatctagaccaatttgtaaacgaactgcatgaattcttacagaacaagaggtacttgatcgttgttgatgacatatgggatgatgactcatgggaagcgatcagatatgccttgaaggacaataattgtgggagtagaatagtcatgactactcgtaattccggggttgtcacgaaagaagaagaggtttacagattaaaacctctttctgatgaaaactccaaaaaattgttctacaaaagaatagagagtcaggaaggagaaagccttgacggtgaactatctagtaaaatcatacacaaatgtggcggcctgccattggctatcattgcaatagctagtttgttggctgaaagaccatgtgaggagtggtcaagagtgtatgactcgattggtcttgggaataatggtgacaatacgacaaagatactgtcatacagctactatgatctgccttcttatctcaagccatgtctgttgcaactaagtattttttccagaagactatctcattgatacaaagcgtctgatatggatgtggataagtgaaggcctagtccatcttgagaaagagggtagcctatttgaggttggagaaaggtacttcaaggaacttgtgaatagaagcatgatccagccgatacagggaaaaaatagctggtttgaagaagagttccgtattcacgacgttgtgtttgatctcatccgtaagttgtcgaaagatgaagacttcgtaacccttttggacagcaacagacaacattcatgtccggatagtttaagaagagagaagaaaacaggagtgcctcgttctgattggaagcaacgtcgactggttatcctaaatcaacgtgtgcattccagaggtgttgaggtcagcatggacatgccagaggtgttgaggacacttaacattgtacactgtaacgttacaattatggccccacttcataacttcagagtttgtcgtgtgctatgtctagtaggcagctatgtacccatcagcctaaagcatctagggaagctgttgcatctcaagttcctacagatatctgacacgactgttgatgagcttcctaaggaaattgggcacctgaggtctcttcaggcactgatattaggctatactggactagacgagctaccatcgactgtttcctcgcttactcagttgatgtgcctgacagctagcgggttcaaaaggttgccagctgacaggatggggaacttaacgtccctggaggagctacggttagagagcatagttggtcagtgtgccgcccaatccctagtggcagagcttggcaagctaacaaggttgagggtggtcagcatcaccttttcagaggagctagaagagagtttgcaagaagcactggtcaaatctctgttcaacctgcggggactccaggaactatcgctttcttctaaaatgtggcagcagggaagcactatgtggggagactgggagccaccaaggcagcttcggggcctgatcgttcaaggcattgtcttctcacgacagcctcgatggatcaaccgctcctgcctgccacacctctgcttcttatgtctgatggtgcacgctgttgaagcacaggacctagataacctagggaggttgccagagctccggtacctcaagctagagggtgtcatctggcctccaagggtactggagttgggaacacaatggtgtgctgttggagcagttcccaacgaaggatgtgatcgaagatcttgacttgggcctggataacttgctttcacttgagcaagtaatagtcaaagtcaactgcttaggtgctactgctgcacaagtgcaggagctggaggctgtggccatgcgtgccgtggaaaatcatgccaaccgtccaaccataaaaatggatcgattatatgaagaaaatatcttatctgatgaaaagctggaggctctgcttcagcagcacattcaactagaaggcggcgtgctccagctgaaggataaacctgacgctttcttcatcagccagctacggttgtatcgacatcttcagaaagccgttatttcctacgactgtgcgggtgccagcatgtgtgaggtgctgaaagtggaagcagcttgtagacatgcagccgaggttcatcctaaccatccaagtattgaactgatcagaacaaataccgatgaaatggcctcctcatctgaccatcctagcacagagcccaggaattgatgactcggtttgtccaatccttccaacccaacagtaggtaaacgtgagttgtttaagtacggaagagacaggtcctgttcagccagatgattacaagcattcgcagggcttgttagatttgtggttcttagtctaaaatcacattgaacagggagatgaacacaagtgatgtagtttatgtgttatctacatttgtctctatttttttaagatggtcatatatttcctcgaaagtgaccttgattgattatgtgtgaagtgtatttttttaatgacatgggtcata

SEQ ID NO: 13002 - DNA, 3999 bp, Zea Mays
gttcccgttccttgatcccgtcgatccgggaacctggtttccatccttcaagttcaagccatggggtccacgtgccggatttctcttctttgttccctgctccctctcccccaatcctctcttgtagccacggccgcatgctcgcgcgcccgcgccgcctttctacttccaagtgcagctcgcctcggcttgccagcgccatcttttcttcctcccactccctcacctgaccggtctgattctgggtcgatgtcggtcgccatggtccgacccatggtcggaggatagcggagaccagtgaaggccttgcgcagaagagtggcggggaggagaagcgacggagaagcgcgctgccgcgctcacatggccgaccaaggtaggcatgtgcgtgcagacatttgaattcatgaaccagatctcgacaatttggattctaagtaaaaatgggcagggtcgctctctcccaacaatagtcctgccattcgttgccatgtacccaacgagcgtccagcaccaagaaaacaagagagagaaagagtgggtgtgagcaccgaactgtcgaactgagcatggagctcgccttgggggccatggccagcttggcccccaagctgggcgacctgctcatgaaggagtatgtcgtgcacaagggcctcaagcttgacatcgagtccctctccagggagcttgtgatgatgaacaccgccctcgtccacgcatcccgggttccacctgaccagctcactgaggtggaaaagctctgggcacgccacatccgggagctgtcgtatgacatggaggacgccatcgacgatttcatcctgcgtgtggttggtggtggcaactctgctaccgaagacaccaaagtcttcaaggagatccttggcaaggtcagcgccgtgatgtcaatgaagaagttcaaggatcggcgtcagatctccgacaaggtcaaagacataaaaaaactctctaacgagttggctgaactttatgccaagtacacagtaagaggtgcgggtgctgatctcgccgcgagcaccggcattgacccccgtgtcatcaatctgtacaagaaagagtcggatctcgttggcatccaggagtcaagggacaaagttatcaagatgctatctatagggaccaaagatgacgatgtgcaggcgtctgatcagaatctaaagatagtgtctatagtcggagttggaggattaggtaagactactctagccaaaacagtacatgatatgctagagaagcaattcggttgttctgctttcatttctgttggtaggactcctaatctgaataagtcatttaagaagatgctagtggaactcgatcgcaattataagcaagttgacatggccagatgggatctagaccaatttgtaaacgaactgcatgaattcttacagaacaagaggtacttgatcgttgttgatgacatatgggatgatgactcatgggaagcgatcagatatgccttgaaggacaataattgtgggagtagaatagtcatgactactcgtaattccggggttgtcacgaaagaagaagaggtttacagattaaaacctctttctgatgaaaactccaaaaaattgttctacaaaagaatagagagtcaggaaggagaaagccttgacggtgaactatctagtaaaatcatacacaaatgtggcggcctgccattggctatcattgcaatagctagtttgttggctgaaagaccatgtgaggagtggtcaagagtgtatgactcgattggtcttgggaataatggtgacaatacgacaaagatactgtcatacagctactatgatctgccttcttatctcaagccatgtctgttgcaactaagtattttttccagaagactatctcattgatacaaagcgtctgatatggatgtggataagtgaaggcctagtccatcttgagaaagagggtagcctatttgaggttggagaaaggtacttcaaggaacttgtgaatagaagcatgatccagccgatacagggaaaaaatagctggtttgaagaagagttccgtattcacgacgttgtgtttgatctcatccgtaagttgtcgaaagatgaagacttcgtaacccttttggacagcaacagacaacattcatgtccggatagtttaagaagagagaagaaaacaggagtgcctcgttctgattggaagcaacgtcgactggttatcctaaatcaacgtgtgcattccagaggtgttgaggtcagcatggacatgccagaggtgttgaggacacttaacattgtacactgtaacgttacaattatggccccacttcataacttcagagtttgtcgtgtgctatgtctagtaggcagctatgtacccatcagcctaaagcatctagggaagctgttgcatctcaagttcctacagatatctgacacgactgttgatgagcttcctaaggaaattgggcacctgaggtctcttcaggcactgatattaggctatactggactagacgagctaccatcgactgtttcctcgcttactcagttgatgtgcctgacagctagcgggttcaaaaggttgccagctgacaggatggggaacttaacgtccctggaggagctacggttagagagcatagttggtcagtgtgccgcccaatccctagtggcagagcttggcaagctaacaaggttgagggtggtcagcatcaccttttcagaggagctagaagagagtttgcaagaagcactggtcaaatctctgttcaacctgcggggactccaggaactatcgctttcttctaaaatgtggcagcagggaagcactatgtggggagactgggagccaccaaggcagcttcggggcctgatcgttcaaggcattgtcttctcacgacagcctcgatggatcaaccgctcctgcctgccacacctctgcttcttatgtctgatggtgcacgctgttgaagcacaggacctagataacctagggaggttgccagagctccggtacctcaagctagagggtgtcatctggcctccaaggtatgctgttagcctggacaacttcaagaatctaagattttgcgatgtgggtacaacgctcgagtttcatatgggcgccatgccgaggcttgaagagctgcaatttgaagtttatgcagggtactggagttgggaacacaatggtgtgctgttggagcagttcccaacgaaggatgtgatcgaagatcttgacttgggcctggataacttgctttcacttgagcaagtaatagtcaaagtcaactgcttaggtgctactgctgcacaagtgcaggagctggaggctgtggccatgcgtgccgtggaaaatcatgccaaccgtccaaccataaaaatggatcgattatatgaagaaaatatcttatctgatgaaaagctggaggctctgcttcagcagcacattcaactagaaggcggcgtgctccagctgaaggataaacctgacgctttcttcatcagccagctacggttgtatcgacatcttcagaaagccgttatttcctacgactgtgcgggtgccagcatgtgtgaggtgctgaaagtggaagcagcttgtagacatgcagccgaggttcatcctaaccatccaagtattgaactgatcagaacaaataccgatgaaatggcctcctcatctgaccatcctagcacagagcccaggaattgatgactcggtttgtccaatccttccaacccaacagtaggtgtaaacgtgagttgtttaagtacggaagagacaggtcctgttcagccagatgattacaagcattcgcagggcttgttagatttgtggttcttagtctaaaatcacattgaacagggagatgaacacaagtgatgtagtttatgtgttatctacatttgtctctatttttttaagatggtcatatatttcctcgaaagtgaccttgattgattatgtgtgaagtgtatttttttaatgacatgggtcata

SEQ ID NO: 13003 - DNA, 3786 bp, Zea Mays
gttcccgttccttgatcccgtcgatccgggaacctggtttccatccttcaagttcaagccatggggtccacgtgccggatttctcttctttgttccctgctccctctcccccaatcctctcttgtagccacggccgcatgctcgcgcgcccgcgccgcctttctacttccaagtgcagctcgcctcggcttgccagcgccatcttttcttcctcccactccctcacctgaccggtctgattctgggtcgatgtcggtcgccatggtccgacccatggtcggaggatagcggagaccagtgaaggccttgcgcagaagagtggcggggaggagaagcgacggagaagcgcgctgccgcgctcacatggccgaccaaggtaggcatgtgcgtgcagacatttgaattcatgaaccagatctcgacaatttggattctaagtaaaaatgggcagggtcgctctctcccaacaatagtcctgccattcgttgccatgtacccaacgagcgtccagcaccaagaaaacaagagagagaaagagtgggtgtgagcaccgaactgtcgaactgagcatggagctcgccttgggggccatggccagcttggcccccaagctgggcgacctgctcatgaaggagtatgtcgtgcacaagggcctcaagcttgacatcgagtccctctccagggagcttgtgatgatgaacaccgccctcgtccacgcatcccgggttccacctgaccagctcactgaggtggaaaagctctgggcacgccacatccgggagctgtcgtatgacatggaggacgccatcgacgatttcatcctgcgtgtggttggtggtggcaactctgctaccgaagacaccaaagtcttcaaggagatccttggcaaggtcagcgccgtgatgtcaatgaagaagttcaaggatcggcgtcagatctccgacaaggtcaaagacataaaaaaactctctaacgagttggctgaactttatgccaagtacacagtaagaggtgcgggtgctgatctcgccgcgagcaccggcattgacccccgtgtcatcaatctgtacaagaaagagtcggatctcgttggcatccaggagtcaagggacaaagttatcaagatgctatctatagggaccaaagatgacgatgtgcaggcgtctgatcagaatctaaagatagtgtctatagtcggagttggaggattaggtacttgatcgttgttgatgacatatgggatgatgactcatgggaagcgatcagatatgccttgaaggacaataattgtgggagtagaatagtcatgactactcgtaattccggggttgtcacgaaagaagaagaggtttacagattaaaacctctttctgatgaaaactccaaaaaattgttctacaaaagaatagagagtcaggaaggagaaagccttgacggtgaactatctagtaaaatcatacacaaatgtggcggcctgccattggctatcattgcaatagctagtttgttggctgaaagaccatgtgaggagtggtcaagagtgtatgactcgattggtcttgggaataatggtgacaatacgacaaagatactgtcatacagctactatgatctgccttcttatctcaagccatgtctgttgcaactaagtattttttccagaagactatctcattgatacaaagcgtctgatatggatgtggataagtgaaggcctagtccatcttgagaaagagggtagcctatttgaggttggagaaaggtacttcaaggaacttgtgaatagaagcatgatccagccgatacagggaaaaaatagctggtttgaagaagagttccgtattcacgacgttgtgtttgatctcatccgtaagttgtcgaaagatgaagacttcgtaacccttttggacagcaacagacaacattcatgtccggatagtttaagaagagagaagaaaacaggagtgcctcgttctgattggaagcaacgtcgactggttatcctaaatcaacgtgtgcattccagaggtgttgaggtcagcatggacatgccagaggtgttgaggacacttaacattgtacactgtaacgttacaattatggccccacttcataacttcagagtttgtcgtgtgctatgtctagtaggcagctatgtacccatcagcctaaagcatctagggaagctgttgcatctcaagttcctacagatatctgacacgactgttgatgagcttcctaaggaaattgggcacctgaggtctcttcaggcactgatattaggctatactggactagacgagctaccatcgactgtttcctcgcttactcagttgatgtgcctgacagctagcgggttcaaaaggttgccagctgacaggatggggaacttaacgtccctggaggagctacggttagagagcatagttggtcagtgtgccgcccaatccctagtggcagagcttggcaagctaacaaggttgagggtggtcagcatcaccttttcagaggagctagaagagagtttgcaagaagcactggtcaaatctctgttcaacctgcggggactccaggaactatcgctttcttctaaaatgtggcagcagggaagcactatgtggggagactgggagccaccaaggcagcttcggggcctgatcgttcaaggcattgtcttctcacgacagcctcgatggatcaaccgctcctgcctgccacacctctgcttcttatgtctgatggtgcacgctgttgaagcacaggacctagataacctagggaggttgccagagctccggtacctcaagctagagggtgtcatctggcctccaaggtatgctgttagcctggacaacttcaagaatctaagattttgcgatgtgggtacaacgctcgagtttcatatgggcgccatgccgaggcttgaagagctgcaatttgaagtttatgcagggtactggagttgggaacacaatggtgtgctgttggagcagttcccaacgaaggatgtgatcgaagatcttgacttgggcctggataacttgctttcacttgagcaagtaatagtcaaagtcaactgcttaggtgctactgctgcacaagtgcaggagctggaggctgtggccatgcgtgccgtggaaaatcatgccaaccgtccaaccataaaaatggatcgattatatgaagaaaatatcttatctgatgaaaagctggaggctctgcttcagcagcacattcaactagaaggcggcgtgctccagctgaaggataaacctgacgctttcttcatcagccagctacggttgtatcgacatcttcagaaagccgttatttcctacgactgtgcgggtgccagcatgtgtgaggtgctgaaagtggaagcagcttgtagacatgcagccgaggttcatcctaaccatccaagtattgaactgatcagaacaaataccgatgaaatggcctcctcatctgaccatcctagcacagagcccaggaattgatgactcggtttgtccaatccttccaacccaacagtaggtaaacgtgagttgtttaagtacggaagagacaggtcctgttcagccagatgattacaagcattcgcagggcttgttagatttgtggttcttagtctaaaatcacattgaacagggagatgaacacaagtgatgtagtttatgtgttatctacatttgtctctatttttttaagatggtcatatatttcctcgaaagtgaccttgattgattatgtgtgaagtgtatttttttaatgacatgggtcata

SEQ ID NO: 13004 - DNA, 3721 bp, Zea Mays
gttcccgttccttgatcccgtcgatccgggaacctggtttccatccttcaagttcaagccatggggtccacgtgccggatttctcttctttgttccctgctccctctcccccaatcctctcttgtagccacggccgcatgctcgcgcgcccgcgccgcctttctacttccaagtgcagctcgcctcggcttgccagcgccatcttttcttcctcccactccctcacctgaccggtctgattctgggtcgatgtcggtcgccatggtccgacccatggtcggaggatagcggagaccagtgaaggccttgcgcagaagagtggcggggaggagaagcgacggagaagcgcgctgccgcgctcacatggccgaccaaggtaggcatgtgcgtgcagacatttgaattcatgaaccagatctcgacaatttggattctaagtaaaaatgggcagggtcgctctctcccaacaatagtcctgccattcgttgccatgtacccaacgagcgtccagcaccaagaaaacaagagagagaaagagtgggtgtgagcaccgaactgtcgaactgagcatggagctcgccttgggggccatggccagcttggcccccaagctgggcgacctgctcatgaaggagtatgtcgtgcacaagggcctcaagcttgacatcgagtccctctccagggagcttgtgatgatgaacaccgccctcgtccacgcatcccgggttccacctgaccagctcactgaggtggaaaagctctgggcacgccacatccgggagctgtcgtatgacatggaggacgccatcgacgatttcatcctgcgtgtggttggtggtggcaactctgctaccgaagacaccaaagtcttcaaggagatccttggcaaggtcagcgccgtgatgtcaatgaagaagttcaaggatcggcgtcagatctccgacaaggtcaaagacataaaaaaactctctaacgagttggctgaactttatgccaagtacacagtaagaggtgcgggtgctgatctcgccgcgagcaccggcattgacccccgtgtcatcaatctgtacaagaaagagtcggatctcgttggcatccaggagtcaagggacaaagttatcaagatgctatctatagggaccaaagatgacgatgtgcaggcgtctgatcagaatctaaagatagtgtctatagtcggagttggaggattagatgggatctagaccaatttgtaaacgaactgcatgaattcttacagaacaagaggtacttgatcgttgttgatgacatatgggatgatgactcatgggaagcgatcagatatgccttgaaggacaataattgtgggagtagaatagtcatgactactcgtaattccggggttgtcacgaaagaagaagaggtttacagattaaaacctctttctgatgaaaactccaaaaaattgttctacaaaagaatagagagtcaggaaggagaaagccttgacggtgaactatctagtaaaatcatacacaaatgtggcggcctgccattggctatcattgcaatagctagtttgttggctgaaagaccatgtgaggagtggtcaagagtgtatgactcgattggtcttgggaataatggtgacaatacgacaaagatactgtcatacagctactatgatctgccttcttatctcaagccatgtctgttgcaactaagtattttttccagaagactatctcattgatacaaagcgtctgatatggatgtggataagtgaaggcctagtccatcttgagaaagagggtagcctatttgaggttggagaaaggtacttcaaggaacttgtgaatagaagcatgatccagccgatacagggaaaaaatagctggtttgaagaagagttccgtattcacgacgttgtgtttgatctcatccgtaagttgtcgaaagatgaagacttcgtaacccttttggacagcaacagacaacattcatgtccggatagtttaagaagagagaagaaaacaggagtgcctcgttctgattggaagcaacgtcgactggttatcctaaatcaacgtgtgcattccagaggtgttgaggtcagcatggacatgccagaggtgttgaggacacttaacattgtacactgtaacgttacaattatggccccacttcataacttcagagtttgtcgtgtgctatgtctagtaggcagctatgtacccatcagcctaaagcatctagggaagctgttgcatctcaagttcctacagatatctgacacgactgttgatgagcttcctaaggaaattgggcacctgaggtctcttcaggcactgatattaggctatactggactagacgagctaccatcgactgtttcctcgcttactcagttgatgtgcctgacagctagcgggttcaaaaggttgccagctgacaggatggggaacttaacgtccctggaggagctacggttagagagcatagttggtcagtgtgccgcccaatccctagtggcagagcttggcaagctaacaaggttgagggtggtcagcatcaccttttcagaggagctagaagagagtttgcaagaagcactggtcaaatctctgttcaacctgcggggactccaggaactatcgctttcttctaaaatgtggcagcagggaagcactatgtggggagactgggagccaccaaggcagcttcggggcctgatcgttcaaggcattgtcttctcacgacagcctcgatggatcaaccgctcctgcctgccacacctctgcttcttatgtctgatggtgcacgctgttgaagcacaggacctagataacctagggaggttgccagagctccggtacctcaagctagagggtgtcatctggcctccaagggtactggagttgggaacacaatggtgtgctgttggagcagttcccaacgaaggatgtgatcgaagatcttgacttgggcctggataacttgctttcacttgagcaagtaatagtcaaagtcaactgcttaggtgctactgctgcacaagtgcaggagctggaggctgtggccatgcgtgccgtggaaaatcatgccaaccgtccaaccataaaaatggatcgattatatgaagaaaatatcttatctgatgaaaagctggaggctctgcttcagcagcacattcaactagaaggcggcgtgctccagctgaaggataaacctgacgctttcttcatcagccagctacggttgtatcgacatcttcagaaagccgttatttcctacgactgtgcgggtgccagcatgtgtgaggtgctgaaagtggaagcagcttgtagacatgcagccgaggttcatcctaaccatccaagtattgaactgatcagaacaaataccgatgaaatggcctcctcatctgaccatcctagcacagagcccaggaattgatgactcggtttgtccaatccttccaacccaacagtaggtaaacgtgagttgtttaagtacggaagagacaggtcctgttcagccagatgattacaagcattcgcagggcttgttagatttgtggttcttagtctaaaatcacattgaacagggagatgaacacaagtgatgtagtttatgtgttatctacatttgtctctatttttttaagatggtcatatatttcctcgaaagtgaccttgattgattatgtgtgaagtgtatttttttaatgacatgggtcata

SEQ ID NO: 13005 - DNA, 3984 bp, Zea Mays
cacttgtttagatcgtcaaaaatacaattttctcctccctctctcccccaatcctctcttctagccacggccgcatgctcgctcgcacgcgcccgcgccgccgttctacttccaagtacagctcgcctcggcttgccagcgccatcttttcttcctcccactccctcacctgaccggtctgattctgggtcgatgtcggtcaccatggtccgacccatggtcggaggagagcggagacctgcggtagcagcatggcgcggacacggggaacggagatcagtgaaggccttccgcggaagagtggcggggaagagaagcgacggggaagcgcactgccgcgctcacatggccgaccaaggtaggcatgtgcctgaagacatttgaattcatgaaccagatctcgaaaatgtagatttccaagcaaaaatgggcaaagcgcctctaatcgctctccccccacaataggcttgccatttgttgccatgcaaccaacgagcgtccagcaccaagcaaacgagagaaagaaagagtgggtgtgagcactgagcatggagctcgccttgggggccatggccagcttggcccccaagctgggcgacctgctcatggaggagtatgtcgtgcacaagggcctcaagcccgacatcgagtccctctccgatgagcttgtgatgatgaacgccgccctccttgacgcgtcccggattccacctgaccagctcactgcggtggaaaagctctgggcacgcaaggtccgggacctgtcgtatgacatggaggacgccattgacgatttcatcctgcgtgtggctggtggtgacaactcagccaccgactccaaactcttaaagaagatccttgtgaaggtcaaggacgtgatgtcaataaagaagctcaaggatcgacgccagatctccgacaaggtcaaagacatcaagaaactctccagtgagttggctgagcttcgtgccaagtacacagtaaggggtgcaggtgctgatcttgctgcgagcatcggcattgacccccgtgtcatcaatctgtacaagaaagagtcggatctcgttggcatccaggagtcaagggacaaagtcatcaggatgctgtctttagggaccaaatatgatgatgcgcatgcgtctcatcaggatctaaagatagtctctatagtcggggttggaggattaggtaagactactctagccaaaacagtgcacgatatgcttaagaagcaattcagcccttctgcttttatttctgttggtagaactcctaatctgaatagaacattcgagaagattctagtggaacttgatgccaagtataagcaagttgacatgaccagatgggatctagaacaatttggaaaagaactgcatgaattcttacagaacaagaggtacttgatcgttgttgatgacatatgggatgttggatcatgggaagcgatcagatatggcttgaagaacaataattgtggaagtagaataatcatgactactcggaattttgagcttgtcacgaaagtagaagaggtttatagattaaaacctctttctaatgaaaactctaagaaactattttacaaaagaatacaaagtcaggaaggagaaagtcttgatgatgaactgtccactgaaatcatagataaatgtggcggcataccattggctatcattgcaatagctagtttgttggttgaaagaccatgtgaggagtggtcaaaagtgtatcactcaatcagtcttgggaatggagacaatacaacaaagatattgtcctacagctactatgatcttccttcttatctcaagccatgtctactgcaactaagcatatttcctgaagactatcagtttgatacaaatgctgcaatatggatgtggataggtgagggtctagtccatcttgagaaagaggagggtagcctatttgtggttggagaaagatatttcaaggagcttgtgaatagaagcatgatccagccgatagaggacaaatatgatcggttggtagaagtattccgtattcacgacattgtatttgatcttatccgtaagttgttgaaagatgaagacttcattacccttttggacagcggtgggcaacattcacctcaagctagtttaagaagagagaagaaaacatgtgtgcctcgctctgactgcaagctacgtcggctggctgtccgaaatcaccatgtgcagcgcttccctgaagacatcatggacataccagaggcgttgaggtcacttaacattatatattgtaatattgcgattatgaccccacttcatagtttcagagtctgtcgtgtgctatgtatagaatacagctatgtaccgatcagcctaaagcatctagggaagttgttgcatctcaagtacctagagctatatggcacgcctgttgatgagctccctaaggaaattgggcatctgaggtctcttcagacactgttattagtcaatactggactagacgagctgccaccggctgtttgctcgcttacacggctgatgtgcctgatggctgaggggttcaaaaggttgccagctgacaagatggggaacctaacgtccctggaggagctacggctagagagcatagttggtcagagtgccacccaagccctagtggcagagcttggcaagctgacgaggttgagggtggtcaacatcaccttttcagaggagcttgaggagagcttgcaagaagcattggtgcaatctctgttcaatctgtggggacttcaggagctagcactttcttctaaatggtcgcagcagggaagcgctatgtggggagactgggagccaccaaggcagctcaggcgcctgattattaaaggtatcatcttctcacgacagcctcgatggatcaaccgctcttgcatggcacacctctgcttcttatctctggcggtgcacgctgttgaagcacaggacctagataacctagcgaggttgccagagctccggtacctcaagctagatggtgtcagctggcctccaaggatactggagttgggaacacaatggtgtgctgttggagcagtgcccaacaatggatgtgattgaagatcttgacttgggcctggataacctcctttcacttgagcaagtcacggtcgtagtcgactgttcaggcgctactgctgcaaaagtgcaggaggtggaggccgtggtcatgcgtgccatggaaaatcatgccaaccgtccaaccataaaaatggaacgagtatgtgaaaacttcatcttatctgacaaagagcaggaggatctgcttcagcgacgcattgaaaaggaaggccgcttgctcgagttcaaggataaatctgatgctttcttcatcacattcctgcggttgcttcgacatcctctaaaatccgttatttcccacgactgtgcgggtgccagcatgtgcgaggtgcagaaagtggaaccagcttggagacatgcagccgaggttcatcctaaccatccaagtattgaactgatcagaaaaaacaacgacgaaattgcctcctcatctgaccatcccaacacagagctcaggaattgataactcggtatgtccaatccttccaaaccagccgcagctttcacgttgtctcatcccttcctacgggcttggagattttagatgctatatttatcgagtgatctagacgacatgattgagggtctatatatcgtgtgtttatgacttatgtattgtgaggttaaaatttatgagaggacatgtatgattcattatgtgtggtcaagattgcattgtgtgtaattgagatttgtatgtggatgtaaatgaataattgtgtgtttaagatttatgtattgtgtggttaaaatttatgagtgaacatatacgatcaattgtgtgtttgtgtgtggtcaatactatgtattgtgtatttgtgcgtgggcgtgaatgaacaatcacgtatagttaggaattatttattatgagcttttctgaaac

SEQ ID NO: 13006 - DNA, 4057 bp, Zea Mays
ctcccccaatcctctcttctagccacggccgcatgctcgctcgcacgcgcccgcgccgccgttctacttccaagtacagctcgcctcggcttgccagcgccatcttttcttcctcccactccctcacctgaccggtctgattctgggtcgatgtcggtcaccatggtccgacccatggtcggaggagagcggagacctgcggtagcagcatggcgcggacacggggaacggagatcagtgaaggccttccgcggaagagtggcggggaagagaagcgacggggaagcgcactgccgcgctcacatggccgaccaaggcatgtgcctgaagacatttgaattcatgaaccagatctcgaaaatgtagatttccaagcaaaaatgggcaaagcgcctctaatcgctctccccccacaataggcttgccatttgttgccatgcaaccaacgagcgtccagcaccaagcaaacgagagaaagaaagagtgggtgtgagcactgagcatggagctcgccttgggggccatggccagcttggcccccaagctgggcgacctgctcatggaggagtatgtcgtgcacaagggcctcaagcccgacatcgagtccctctccgatgagcttgtgatgatgaacgccgccctccttgacgcgtcccggattccacctgaccagctcactgcggtggaaaagctctgggcacgcaaggtccgggacctgtcgtatgacatggaggacgccattgacgatttcatcctgcgtgtggctggtggtgacaactcagccaccgactccaaactcttaaagaagatccttgtgaaggtcaaggacgtgatgtcaataaagaagctcaaggatcgacgccagatctccgacaaggtcaaagacatcaagaaactctccagtgagttggctgagcttcgtgccaagtacacagtaaggggtgcaggtgctgatcttgctgcgagcatcggcattgacccccgtgtcatcaatctgtacaagaaagagtcggatctcgttggcatccaggagtcaagggacaaagtcatcaggatgctgtctttagggaccaaatatgatgatgcgcatgcgtctcatcaggatctaaagatagtctctatagtcggggttggaggattaggtaagactactctagccaaaacagtgcacgatatgcttaagaagcaattcagcccttctgcttttatttctgttggtagaactcctaatctgaatagaacattcgagaagattctagtggaacttgatgccaagtataagcaagttgacatgaccagatgggatctagaacaatttggaaaagaactgcatgaattcttacagaacaagaggtacttgatcgttgttgatgacatatgggatgttggatcatgggaagcgatcagatatggcttgaagaacaataattgtggaagtagaataatcatgactactcggaattttgagcttgtcacgaaagtagaagaggtttatagattaaaacctctttctaatgaaaactctaagaaactattttacaaaagaatacaaagtcaggaaggagaaagtcttgatgatgaactgtccactgaaatcatagataaatgtggcggcataccattggctatcattgcaatagctagtttgttggttgaaagaccatgtgaggagtggtcaaaagtgtatcactcaatcagtcttgggaatggagacaatacaacaaagatattgtcctacagctactatgatcttccttcttatctcaagccatgtctactgcaactaagcatatttcctgaagactatcagtttgatacaaatgctgcaatatggatgtggataggtgagggtctagtccatcttgagaaagaggagggtagcctatttgtggttggagaaagatatttcaaggagcttgtgaatagaagcatgatccagccgatagaggacaaatatgatcggttggtagaagtattccgtattcacgacattgtatttgatcttatccgtaagttgttgaaagatgaagacttcattacccttttggacagcggtgggcaacattcacctcaagctagtttaagaagagagaagaaaacatgtgtgcctcgctctgactgcaagctacgtcggctggctgtccgaaatcaccatgtgcagcgcttccctgaagacatcatggacataccagaggcgttgaggtcacttaacattatatattgtaatattgcgattatgaccccacttcatagtttcagagtctgtcgtgtgctatgtatagaatacagctatgtaccgatcagcctaaagcatctagggaagttgttgcatctcaagtacctagagctatatggcacgcctgttgatgagctccctaaggaaattgggcatctgaggtctcttcagacactgttattagtcaatactggactagacgagctgccaccggctgtttgctcgcttacacggctgatgtgcctgatggctgaggggttcaaaaggttgccagctgacaagatggggaacctaacgtccctggaggagctacggctagagagcatagttggtcagagtgccacccaagccctagtggcagagcttggcaagctgacgaggttgagggtggtcaacatcaccttttcagaggagcttgaggagagcttgcaagaagcattggtgcaatctctgttcaatctgtggggacttcaggagctagcactttcttctaaatggtcgcagcagggaagcgctatgtggggagactgggagccaccaaggcagctcaggcgcctgattattaaaggtatcatcttctcacgacagcctcgatggatcaaccgctcttgcatggcacacctctgcttcttatctctggcggtgcacgctgttgaagcacaggacctagataacctagcgaggttgccagagctccggtacctcaagctagatggtgtcagctggcctccaaggtatgatactggcccggacgacttcaggaatctgaggttctgcgatgtgggtacaatgctcgtgtttcatatgggcgccatgccaaggcttgaagagctggtgtttggagtttgtgcaggatactggagttgggaacacaatggtgtgctgttggagcagtgcccaacaatggatgtgattgaagatcttgacttgggcctggataacctcctttcacttgagcaagtcacggtcgtagtcgactgttcaggcgctactgctgcaaaagtgcaggaggtggaggccgtggtcatgcgtgccatggaaaatcatgccaaccgtccaaccataaaaatggaacgagtatgtgaaaacttcatcttatctgacaaagagcaggaggatctgcttcagcgacgcattgaaaaggaaggccgcttgctcgagttcaaggataaatctgatgctttcttcatcacattcctgcggttgcttcgacatcctctaaaatccgttatttcccacgactgtgcgggtgccagcatgtgcgaggtgcagaaagtggaaccagcttggagacatgcagccgaggttcatcctaaccatccaagtattgaactgatcagaaaaaacaacgacgaaattgcctcctcatctgaccatcccaacacagagctcaggaattgataactcggtatgtccaatccttccaaaccagccgcagctttcacgttgtctcatcccttcctacgggcttggagattttagatgctatatttatcgagtgatctagacgacatgattgagggtctatatatcgtgtgtttatgacttatgtattgtgaggttaaaatttatgagaggacatgtatgattcattatgtgtggtcaagattgcattgtgtgtaattgagatttgtatgtggatgtaaatgaataattgtgtgtttaagatttatgtattgtgtggttaaaatttatgagtgaacatatacgatcaattgtgtgtttgtgtgtggtcaatactatgtattgtgtatttgtgcgtgggcgtgaatgaacaatcacgtatagttaggaattatttattatgagcttttctgaaac

SEQ ID NO: 13007 - DNA, 3954 bp, Zea Mays
ctcccccaatcctctcttctagccacggccgcatgctcgctcgcacgcgcccgcgccgccgttctacttccaagtacagctcgcctcggcttgccagcgccatcttttcttcctcccactccctcacctgaccggtctgattctgggtcgatgtcggtcaccatggtccgacccatggtcggaggagagcggagacctgcggtagcagcatggcgcggacacggggaacggagatcagtgaaggccttccgcggaagagtggcggggaagagaagcgacggggaagcgcactgccgcgctcacatggccgaccaaggcttgccatttgttgccatgcaaccaacgagcgtccagcaccaagcaaacgagagaaagaaagagtgggtgtgagcactgagcatggagctcgccttgggggccatggccagcttggcccccaagctgggcgacctgctcatggaggagtatgtcgtgcacaagggcctcaagcccgacatcgagtccctctccgatgagcttgtgatgatgaacgccgccctccttgacgcgtcccggattccacctgaccagctcactgcggtggaaaagctctgggcacgcaaggtccgggacctgtcgtatgacatggaggacgccattgacgatttcatcctgcgtgtggctggtggtgacaactcagccaccgactccaaactcttaaagaagatccttgtgaaggtcaaggacgtgatgtcaataaagaagctcaaggatcgacgccagatctccgacaaggtcaaagacatcaagaaactctccagtgagttggctgagcttcgtgccaagtacacagtaaggggtgcaggtgctgatcttgctgcgagcatcggcattgacccccgtgtcatcaatctgtacaagaaagagtcggatctcgttggcatccaggagtcaagggacaaagtcatcaggatgctgtctttagggaccaaatatgatgatgcgcatgcgtctcatcaggatctaaagatagtctctatagtcggggttggaggattaggtaagactactctagccaaaacagtgcacgatatgcttaagaagcaattcagcccttctgcttttatttctgttggtagaactcctaatctgaatagaacattcgagaagattctagtggaacttgatgccaagtataagcaagttgacatgaccagatgggatctagaacaatttggaaaagaactgcatgaattcttacagaacaagaggtacttgatcgttgttgatgacatatgggatgttggatcatgggaagcgatcagatatggcttgaagaacaataattgtggaagtagaataatcatgactactcggaattttgagcttgtcacgaaagtagaagaggtttatagattaaaacctctttctaatgaaaactctaagaaactattttacaaaagaatacaaagtcaggaaggagaaagtcttgatgatgaactgtccactgaaatcatagataaatgtggcggcataccattggctatcattgcaatagctagtttgttggttgaaagaccatgtgaggagtggtcaaaagtgtatcactcaatcagtcttgggaatggagacaatacaacaaagatattgtcctacagctactatgatcttccttcttatctcaagccatgtctactgcaactaagcatatttcctgaagactatcagtttgatacaaatgctgcaatatggatgtggataggtgagggtctagtccatcttgagaaagaggagggtagcctatttgtggttggagaaagatatttcaaggagcttgtgaatagaagcatgatccagccgatagaggacaaatatgatcggttggtagaagtattccgtattcacgacattgtatttgatcttatccgtaagttgttgaaagatgaagacttcattacccttttggacagcggtgggcaacattcacctcaagctagtttaagaagagagaagaaaacatgtgtgcctcgctctgactgcaagctacgtcggctggctgtccgaaatcaccatgtgcagcgcttccctgaagacatcatggacataccagaggcgttgaggtcacttaacattatatattgtaatattgcgattatgaccccacttcatagtttcagagtctgtcgtgtgctatgtatagaatacagctatgtaccgatcagcctaaagcatctagggaagttgttgcatctcaagtacctagagctatatggcacgcctgttgatgagctccctaaggaaattgggcatctgaggtctcttcagacactgttattagtcaatactggactagacgagctgccaccggctgtttgctcgcttacacggctgatgtgcctgatggctgaggggttcaaaaggttgccagctgacaagatggggaacctaacgtccctggaggagctacggctagagagcatagttggtcagagtgccacccaagccctagtggcagagcttggcaagctgacgaggttgagggtggtcaacatcaccttttcagaggagcttgaggagagcttgcaagaagcattggtgcaatctctgttcaatctgtggggacttcaggagctagcactttcttctaaatggtcgcagcagggaagcgctatgtggggagactgggagccaccaaggcagctcaggcgcctgattattaaaggtatcatcttctcacgacagcctcgatggatcaaccgctcttgcatggcacacctctgcttcttatctctggcggtgcacgctgttgaagcacaggacctagataacctagcgaggttgccagagctccggtacctcaagctagatggtgtcagctggcctccaaggtatgatactggcccggacgacttcaggaatctgaggttctgcgatgtgggtacaatgctcgtgtttcatatgggcgccatgccaaggcttgaagagctggtgtttggagtttgtgcaggatactggagttgggaacacaatggtgtgctgttggagcagtgcccaacaatggatgtgattgaagatcttgacttgggcctggataacctcctttcacttgagcaagtcacggtcgtagtcgactgttcaggcgctactgctgcaaaagtgcaggaggtggaggccgtggtcatgcgtgccatggaaaatcatgccaaccgtccaaccataaaaatggaacgagtatgtgaaaacttcatcttatctgacaaagagcaggaggatctgcttcagcgacgcattgaaaaggaaggccgcttgctcgagttcaaggataaatctgatgctttcttcatcacattcctgcggttgcttcgacatcctctaaaatccgttatttcccacgactgtgcgggtgccagcatgtgcgaggtgcagaaagtggaaccagcttggagacatgcagccgaggttcatcctaaccatccaagtattgaactgatcagaaaaaacaacgacgaaattgcctcctcatctgaccatcccaacacagagctcaggaattgataactcggtatgtccaatccttccaaaccagccgcagctttcacgttgtctcatcccttcctacgggcttggagattttagatgctatatttatcgagtgatctagacgacatgattgagggtctatatatcgtgtgtttatgacttatgtattgtgaggttaaaatttatgagaggacatgtatgattcattatgtgtggtcaagattgcattgtgtgtaattgagatttgtatgtggatgtaaatgaataattgtgtgtttaagatttatgtattgtgtggttaaaatttatgagtgaacatatacgatcaattgtgtgtttgtgtgtggtcaatactatgtattgtgtatttgtgcgtgggcgtgaatgaacaatcacgtatagttaggaattatttattatgagcttttctgaaac

SEQ ID NO: 13008 - DNA, 1141 bp, Zea Mays
ctgctccctcacgtcaatcctatatactctcgcaccaccaccaccacaccttctcttcctcttccttttcctctgcatccatcatcctcagctcctaccatgagtacacggatacacccttcgtcttcggacgctgccggccgtgcccatcgtcgtcgtcgggctgctgctgctgaacgggaacgccggccgccggcggtgtacacggtgtggaagaggtccagcatgggcttccagggcaccgacggcttctgcgtctacgacgacgccggcaggctcgcgttccgcgtcgacaactactcccgccgccgcaagctctgcgccggcgacctgctgctcatggacggccaaggcacgcctctcctctccctcaggccacagcaacggaagacgccgtggtcgacaagaaggcgcctcccgcgtcttcggcgcagcagcaggtgttcacgatgagcaggtgctcagctctgcgtagcagcagcgacaacgcggaggtgcacatgtcagcctcaagaccgggatccgctgctgctgcgtcgtcctcgtcctcctctctcagtctcagctgcaacaagcacaacccgcaggccgccgctcccggctaccgggtggagggctccttctcgaggcgaagctgcaagatccggcgcggcagcgatggcagggaggcggcgcggataacgaggaagagcgccggcgtggcgtccaggccggtggccacgctcggggacgacgacgtgttcagcctcgtggtccggccgggcgtcgacgtggccaccgtcatggccatcgtcgtcgtcatggacaggatctgtcgcaggccgtacacgcccatggtgtgcccttcgcagtgcgagtagtaatgagaaacgtgtataagtgttctgattttgacattgcatttgctaattgctagcacctctcctagctagtggtgtgggggaatgaggatacgggatacctgaagacaactactacttttgtcagtgctgcatctcctgatcagcagcatctaataagaaaaggacagacagaattagcaatactaatctggagtcccaccggaccacaaaagcaaccacttgtttgcgcatgtcaagtaggccagggcaagcagattgtttgttgcaggtgacctaat

SEQ ID NO: 13009 - DNA, 4153 bp, Zea Mays
tgaagattgtgcctatatcgattgttctagttttgaggcaaataacatcccacggtctatccgttacctatccatttccatgcaagatcattgtgctcagaatttcgaggaacaaatgggaaaactgaaagaaaagatatacattaacaatttgcggagtttgatgatatttggaaaatacattatgttacatctgctcaatattttaagggacacatttaaggaaataagacgtcttcgtgttctatctatattcatatactcccatagttccttgccaaacaacttttcagagcttcttcatctccgctacttaaaacttttgtcaccttattactcagaaatgtcattgccaaacacggtctcaaggttttatcacctgaaatttctagatcttgaacaatggggaagtgatcgttctttgcctaaggacattagccgccttgaaaatctatgccattttgttgtttcggaaaagattgattccaatgttcctgaggtggggaaaatgatcttcttacaagaattgaaagaattccatgttaataaagagagtgttggatttgagctacaagaattgggtaaactagatgagcttggagggaagctcaatatatacgggcttgaaaatgtgagaaccaagaaagaagctaaagaggccaagctgatgtcaaagaggaatttagttgagttgggattaatttggaacatgaaacaagagtccaccgaagatgatatcctagatagtatccaaccacactctaatgttaggagtctttttattgtaaatcatggtggtaccctcggtcctagttggttgtgcagcagcgacaccatatacatgaaaaacttggagactctacatctagagagcgtatcgtgggctaaccttccacctattgggcagttctatcacttaagagagctaaggctgagtaaaattgttggcatatcacagattggacctggcttcttcgatagcacgacagaaaaaagtgtctcacacttgaaggcagttgagtttaatgatatgccagagcttgtcgagtgggttgggggagctaactggaatctgttctcaggaattgaaagaatcaagtgtactaattgtcctaggctgacagggttgctgttgtgccttccacccttgcctcacacttcaaaggtatcccgtattcatatgggagacttttcttatgaaggtcgtaccatgttgaaaattaataacccctctagatttgccttcgaaaatctgggtgacctagagacattggtagcttgggatgcactacccttgtcctttatggatcttaaaaagctacattccttgagacgtataaatgtcactagatgtgaggaaacatttttgagaggactggatgatggtgttgtgctacccacagtccaatctctctaccttggacgatttacacctaccaaaaattatttgtcaaaattattcaaatgttttccagcactttcttctttgcatgtgatggcatcaccatcagatgaggacaacgaggaagtggtactgcattttccaccctctagctcgctgagagatgtcaacttcacagggtgtaagaatctgatcctacccatggaggaaggagctggattctgtggcctctcgtcgctcgagtcagtgaccatacacaaatgtgacagaaatatcacaatggatggattcaatcctcacatcacatccagcctcaagtatctatgcgtgtacaatgagagaaatgatggaactgatccgtattctgtagcagcagatctacttgtagcggtggtgaggaccaaaacaatgcccgacgtttccttcaaactggtgggactttatgtggacaacatctcgggagtgcttgttgctcccatctgcaagctgctctccgctaccctcgagacgttaaacttcagtaatgattggcggacagagaacttcacgaaagagcaggacgaggcgcttcagctcctcacgtctctccaattccttgagttttataactgcagggctctgcagtccctcccccaaggactgcaccgccttccttctctccacggaataactatctatgggcctcaaaacattagatcactgcctaaggagggcctccccgattcactacgaatactacgtataactaactgttgtgctgagatttatgaggcatgccagcaattgaagggaacaaggccagatataaatgtacttgcctccaaagctcgtgtgcaaaattgaatacctgcttctgcatgtcttcacagtcagctctgcttcaacatgcctttcactctacaggtaaatactgtgaaaacatcttcctatacgtgagatagttgatcttcatcgattctacagccaggatgatgtcttattggatgatgtgttggtcatggttggcacaaaattcagtagcgttcaaggcaataaacgagaacaagcatgggatgtggaaaattttagaaagtaaagacaagtgaattcttgacgacgttggcttggcaccttagtttgagtacataatgaaagaacaaccttttagcaaccctggagcatctagaaaatatcagtcatgtaactatcgttaatcatttgaaaaccactggaagacaggagatgtagcaccacaagccattcctttgatcatttgaaaaccattgcggctctttctgattatatcaaccagttgagtggatgaaagaccaaaaaatgctttggaagaagggctcacaattgtggataataaggcatccagtattatagaggaaacaaaggaaattcaaattagacggaaacctgctagtccaagttcttatatgccaaattcatcaatttgcatcctactggagacattgctggcagaggaattgagactggcataggagaactcaatatatgcttgtgaataacgcatccagtgaaagatagtagattttcatcaattcactacccaggatgttgtcgcattggatgagaatgacatggaagacggcgaactagaggaagacaacaacctcatctaagctgaaaatgtgttgcctgtggttgaagaaaatctagcagatgaacaacactgccttccctgtcctctctagacctgaatctctctgatggtttggattcgtccatgattgatcctgtacgatgaaggatcagctcgtccaacgtttttcaaggaacgaactcaatctgaggaattaccttttcattggtcacctggggtactacgaggaatgacttcacgatagacgactcggttttgcgacgcaaaccaaacgccatggttaggctcagatgttggatcagatgattcctcgtggcttcgtgacgcaaaccaaacgacatggctaggctcagatgttggatcgtatgatttctcgtggcttcgtgacgcaaaccaaacagcctgtaagtccgcacaccttatctatcatggtcattgttgagctgatcagtaattggagtcgtgtgataagcttaatggacctcctatttgtcgtgatcttcacagatcaacaagtgagcggcctttgcatgctgcatgagatcaagcaagccgccgactggcaatgctccacctgccattcagttcgttggtgaggtattaatcaccagccatgttggcacttggcggcatgcagatggagcagaacatccaggtgaagcggacagatacatgatcgatcatgagttggcgcagacacaggccagacaaccagaggctatattccaattcatacattccatgataagcaaaggaagatccaagacaacacaaatatacaaatagttagttatacaagcaaaaatcctgttgttttgtgcctcccattttctagtccagaattaatatgacaatttttcactgaaactggttggatcagagaccaggaaaaaaagggaaatgacaactacagctgtgttttttttttcaaagaaggcagctgcccgtcgatgatgtgctcacttgaggatttcctctgccttttcagtgacactgcttcatccttttcagagtcaaatgaatctctacctcatttcactgcacatacttccaaactgatttgctgtaacatacttgagtttcggtatgacattaatttttaactcataagagaacaaaatcagaagaaaaaaaaacaacaa

SEQ ID NO: 13010 - DNA, 4267 bp, Zea Mays
tgaagattgtgcctatatcgattgttctagttttgaggcaaataacatcccacggtctatccgttacctatccatttccatgcaagatcattgtgctcagaatttcgaggaacaaatgggaaaactgaaagaaaagatatacattaacaatttgcggagtttgatgatatttggaaaatacattatgttacatctgctcaatattttaagggacacatttaaggaaataagacgtcttcgtgttctatctatattcatatactcccatagttccttgccaaacaacttttcagagcttcttcatctccgctacttaaaacttttgtcaccttattactcagaaatgtcattgccaaacacggtctcaaggttttatcacctgaaatttctagatcttgaacaatggggaagtgatcgttctttgcctaaggacattagccgccttgaaaatctatgccattttgttgtttcggaaaagattgattccaatgttcctgaggtggggaaaatgatcttcttacaagaattgaaagaattccatgttaataaagagagtgttggatttgagctacaagaattgggtaaactagatgagcttggagggaagctcaatatatacgggcttgaaaatgtgagaaccaagaaagaagctaaagaggccaagctgatgtcaaagaggaatttagttgagttgggattaatttggaacatgaaacaagagtccaccgaagatgatatcctagatagtatccaaccacactctaatgttaggagtctttttattgtaaatcatggtggtaccctcggtcctagttggttgtgcagcagcgacaccatatacatgaaaaacttggagactctacatctagagagcgtatcgtgggctaaccttccacctattgggcagttctatcacttaagagagctaaggctgagtaaaattgttggcatatcacagattggacctggcttcttcgatagcacgacagaaaaaagtgtctcacacttgaaggcagttgagtttaatgatatgccagagcttgtcgagtgggttgggggagctaactggaatctgttctcaggaattgaaagaatcaagtgtactaattgtcctaggctgacagggttgctggtttcagattggtctatttcttctatataagacagcactgtatggttccctaatcttcatgacctttacatttatgaatgcccgaagttgtgccttccacccttgcctcacacttcaaaggtatcccgtattcatatgggagacttttcttatgaaggtcgtaccatgttgaaaattaataacccctctagatttgccttcgaaaatctgggtgacctagagacattggtagcttgggatgcactacccttgtcctttatggatcttaaaaagctacattccttgagacgtataaatgtcactagatgtgaggaaacatttttgagaggactggatgatggtgttgtgctacccacagtccaatctctctaccttggacgatttacacctaccaaaaattatttgtcaaaattattcaaatgttttccagcactttcttctttgcatgtgatggcatcaccatcagatgaggacaacgaggaagtggtactgcattttccaccctctagctcgctgagagatgtcaacttcacagggtgtaagaatctgatcctacccatggaggaaggagctggattctgtggcctctcgtcgctcgagtcagtgaccatacacaaatgtgacagaaatatcacaatggatggattcaatcctcacatcacatccagcctcaagtatctatgcgtgtacaatgagagaaatgatggaactgatccgtattctgtagcagcagatctacttgtagcggtggtgaggaccaaaacaatgcccgacgtttccttcaaactggtgggactttatgtggacaacatctcgggagtgcttgttgctcccatctgcaagctgctctccgctaccctcgagacgttaaacttcagtaatgattggcggacagagaacttcacgaaagagcaggacgaggcgcttcagctcctcacgtctctccaattccttgagttttataactgcagggctctgcagtccctcccccaaggactgcaccgccttccttctctccacggaataactatctatgggcctcaaaacattagatcactgcctaaggagggcctccccgattcactacgaatactacgtataactaactgttgtgctgagatttatgaggcatgccagcaattgaagggaacaaggccagatataaatgtacttgcctccaaagctcgtgtgcaaaattgaatacctgcttctgcatgtcttcacagtcagctctgcttcaacatgcctttcactctacaggtaaatactgtgaaaacatcttcctatacgtgagatagttgatcttcatcgattctacagccaggatgatgtcttattggatgatgtgttggtcatggttggcacaaaattcagtagactatgcttcatcgtaatgttgcacagcgttcaaggcaataaacgagaacaagcatgggatgtggaaaattttagaaagtaaagacaagtgaattcttgacgacgttggcttggcaccttagtttgagtacataatgaaagaacaaccttttagcaaccctggagcatctagaaaatatcagtcatgtaactatcgttaatcatttgaaaaccactggaagacaggagatgtagcaccacaagccattcctttgatcatttgaaaaccattgcggctctttctgattatatcaaccagttgagtggatgaaagaccaaaaaatgctttggaagaagggctcacaattgtggataataaggcatccagtattatagaggaaacaaaggaaattcaaattagacggaaacctgctagtccaagttcttatatgccaaattcatcaatttgcatcctactggagacattgctggcagaggaattgagactggcataggagaactcaatatatgcttgtgaataacgcatccagtgaaagatagtagattttcatcaattcactacccaggatgttgtcgcattggatgagaatgacatggaagacggcgaactagaggaagacaacaacctcatctaagctgaaaatgtgttgcctgtggttgaagaaaatctagcagatgaacaacactgccttccctgtcctctctagacctgaatctctctgatggtttggattcgtccatgattgatcctgtacgatgaaggatcagctcgtccaacgtttttcaaggaacgaactcaatctgaggaattaccttttcattggtcacctggggtactacgaggaatgacttcacgatagacgactcggttttgcgacgcaaaccaaacgccatggttaggctcagatgttggatcagatgattcctcgtggcttcgtgacgcaaaccaaacgacatggctaggctcagatgttggatcgtatgatttctcgtggcttcgtgacgcaaaccaaacagcctgtaagtccgcacaccttatctatcatggtcattgttgagctgatcagtaattggagtcgtgtgataagcttaatggacctcctatttgtcgtgatcttcacagatcaacaagtgagcggcctttgcatgctgcatgagatcaagcaagccgccgactggcaatgctccacctgccattcagttcgttggtgaggtattaatcaccagccatgttggcacttggcggcatgcagatggagcagaacatccaggtgaagcggacagatacatgatcgatcatgagttggcgcagacacaggccagacaaccagaggctatattccaattcatacattccatgataagcaaaggaagatccaagacaacacaaatatacaaatagttagttatacaagcaaaaatcctgttgttttgtgcctcccattttctagtccagaattaatatgacaatttttcactgaaactggttggatcagagaccaggaaaaaaagggaaatgacaactacagctgtgttttttttttcaaagaaggcagctgcccgtcgatgatgtgctcacttgaggatttcctctgccttttcagtgacactgcttcatccttttcagagtcaaatgaatctctacctcatttcactgcacatacttccaaactgatttgctgtaacatacttgagtttcggtatgacattaatttttaactcataagagaacaaaatcagaagaaaaaaaaacaacaa

SEQ ID NO: 13011 - DNA, 5099 bp, Zea Mays
tgaagattgtgcctatatcgattgttctagttttgaggcaaataacatcccacggtctatccgttacctatccatttccatgcaagatcattgtgctcagaatttcgaggaacaaatgggaaaactgaaagaaaagatatacattaacaatttgcggagtttgatgatatttggaaaatacattatgttacatctgctcaatattttaagggacacatttaaggaaataagacgtcttcgtgttctatctatattcatatactcccatagttccttgccaaacaacttttcagagcttcttcatctccgctacttaaaacttttgtcaccttattactcagaaatgtcattgccaaacacggtctcaaggttttatcacctgaaatttctagatcttgaacaatggggaagtgatcgttctttgcctaaggacattagccgccttgaaaatctatgccattttgttgtttcggaaaagattgattccaatgttcctgaggtggggaaaatgatcttcttacaagaattgaaagaattccatgttaataaagagagtgttggatttgagctacaagaattgggtaaactagatgagcttggagggaagctcaatatatacgggcttgaaaatgtgagaaccaagaaagaagctaaagaggccaagctgatgtcaaagaggaatttagttgagttgggattaatttggaacatgaaacaagagtccaccgaagatgatatcctagatagtatccaaccacactctaatgttaggagtctttttattgtaaatcatggtggtaccctcggtcctagttggttgtgcagcagcgacaccatatacatgaaaaacttggagactctacatctagagagcgtatcgtgggctaaccttccacctattgggcagttctatcacttaagagagctaaggctgagtaaaattgttggcatatcacagattggacctggcttcttcgatagcacgacagaaaaaagtgtctcacacttgaaggcagttgagtttaatgatatgccagagcttgtcgagtgggttgggggagctaactggaatctgttctcaggaattgaaagaatcaagtgtactaattgtcctaggctgacagggttgctggtttcagattggtctatttcttctatataagacagcactgtatggttccctaatcttcatgacctttacatttatgaatgcccgaagttgtgccttccacccttgcctcacacttcaaaggtatcccgtattcatatgggagacttttcttatgaaggtcgtaccatgttgaaaattaataacccctctagatttgccttcgaaaatctgggtgacctagagacattggtagcttgggatgcactacccttgtcctttatggatcttaaaaagctacattccttgagacgtataaatgtcactagatgtgaggaaacatttttgagaggactggatgatggtgttgtgctacccacagtccaatctctctaccttggacgatttacacctaccaaaaattatttgtcaaaattattcaaatgttttccagcactttcttctttgcatgtgatggcatcaccatcagatgaggacaacgaggaagtggtactgcattttccaccctctagctcgctgagagatgtcaacttcacagggtgtaagaatctgatcctacccatggaggaaggagctggattctgtggcctctcgtcgctcgagtcagtgaccatacacaaatgtgacaggttattctctcgatggtccatcggaggacgagcaactcagactcagagcatcatcaaccctctcccaccctacctgaggaaactcttcctttcttatatggaaactctgcctcaggaagctctgctcatgaatttgacatctcttgagaaactcacactatgtaattgtcttggctgtgagcaaagcaccgagcgaatggctgtactcgcgaatctaacatctcttaccacgctatatttatataattgcagaaatatcacaatggatggattcaatcctcacatcacatccagcctcaagtatctatgcgtgtacaatgagagaaatgatggaactgatccgtattctgtagcagcagatctacttgtagcggtggtgaggaccaaaacaatgcccgacgtttccttcaaactggtgggactttatgtggacaacatctcgggagtgcttgttgctcccatctgcaagctgctctccgctaccctcgagacgttaaacttcagtaatgattggcggacagagaacttcacgaaagagcaggacgaggcgcttcagctcctcacgtctctccaattccttgagttttataactgcagggctctgcagtccctcccccaaggactgcaccgccttccttctctccacggaataactatctatgggcctcaaaacattagatcactgcctaaggagggcctccccgattcactacgaatactacgtataactaactgttgtgctgagatttatgaggcatgccagcaattgaagggaacaaggccagatataaatgtacttgcctccaaagctcgtgtgcaaaattgaatacctgcttctgcatgtcttcacagtcagctctgcttcaacatgcctttcactctacaggtaaatactgtgaaaacatcttcctatacgtgagatagttgatcttcatcgattctacagccaggatgatgtcttattggatgatgtgttggtcatggttggcacaaaattcagtagcgttcaaggcaataaacgagaacaagcatgggatgtggaaaattttagaaagtaaagacaagtgaattcttgacgacgttggcttggcaccttagtttgagtacataatgaaagaacaaccttttagcaaccctggagcatctagaaaatatcaggagatgtagcaccacaagccattcctttgatcatttgaaaaccattgcggctctttctgattatatcaaccagttgagtggatgaaagaccaaaaaatgctttggaagaagggctcacaattgtggataataaggcatccagtattatagaggaaacaaaggaaattcaaattagacggaaacctgctagtccaagttcttatatgccaaattcatcagtagatacacatacactctacaccctaatcttctttgttatgacatttattgtttttttcatgaactacgtacatcttaattttcaattcatctagaatactgaataggtgatgattcatcaccaaattgataagtgaatattaatacatctgaaacctaaaattaaatatatattatataagttgttgttaatgttcattccatttttgaacacttgcatgaattttagttctctgtttcttttgaaaaattctgtgttgcaaaaatataaatttatatgaaaatatattatatggtgatgagaagtttgagtttagtatatggtttcatattagctatacattgttggtactatcggcttgttctctttttgtttgaaaaaaatactatcggcttgttcttaaggacacataaaggactagttcggaagcaagagaattagaggagagatggctaaaatccccttcctaattaaataggaagggaatttgagcaccctcaatcccctctaattcccttgctttcaaactagcccaaagagtgtcactgcatcctctgaattatgatatattgaacatggtgttataattgtgaaccgatgagtataacttattttctccatattctgaacaacccattacttaaacagatttgcatcctactggagacattgctggcagaggaattgagactggcataggagaactcaatatatgcttgtgaataacgcatccagtgaaagatagtagattttcatcaattcactacccaggatgttgtcgcattggatgagaatgacatggaagacggcgaactagaggaagacaacaacctcatctaagctgaaaatgtgttgcctgtggttgaagaaaatctagcagatgaacaacactgccttccctgtcctctctagacctgaatctctctgatggtttggattcgtccatgattgatcctgtacgatgaaggatcagctcgtccaacgtttttcaaggaacgaactcaatctgaggaattaccttttcattggtcacctggggtactacgaggaatgacttcacgatagacgactcggttttgcgacgcaaaccaaacgccatggttaggctcagatgttggatcagatgattcctcgtggcttcgtgacgcaaaccaaacgacatggctaggctcagatgttggatcgtatgatttctcgtggcttcgtgacgcaaaccaaacagcctgtaagtccgcacaccttatctatcatggtcattgttgagctgatcagtaattggagtcgtgtgataagcttaatggacctcctatttgtcgtgatcttcacagatcaacaagtgagcggcctttgcatgctgcatgagatcaagcaagccgccgactggcaatgctccacctgccattcagttcgttggtgaggtattaatcaccagccatgttggcacttggcggcatgcagatggagcagaacatccaggtgaagcggacagatacatgatcgatcatgagttggcgcagacacaggccagacaaccagaggctatattccaattcatacattccatgataagcaaaggaagatccaagacaacacaaatatacaaatagttagttatacaagcaaaaatcctgttgttttgtgcctcccattttctagtccagaattaatatgacaatttttcactgaaactggttggatcagagaccaggaaaaaaagggaaatgacaactacagctgtgttttttttttcaaagaaggcagctgcccgtcgatgatgtgctcacttgaggatttcctctgccttttcagtgacactgcttcatccttttcagagtcaaatgaatctctacctcatttcactgcacatacttccaaactgatttgctgtaacatacttgagtttcggtatgacattaatttttaactcataagagaacaaaatcagaagaaaaaaaaacaacaa

SEQ ID NO: 13012 - DNA, 5169 bp, Zea Mays
tgaagattgtgcctatatcgattgttctagttttgaggcaaataacatcccacggtctatccgttacctatccatttccatgcaagatcattgtgctcagaatttcgaggaacaaatgggaaaactgaaagaaaagatatacattaacaatttgcggagtttgatgatatttggaaaatacattatgttacatctgctcaatattttaagggacacatttaaggaaataagacgtcttcgtgttctatctatattcatatactcccatagttccttgccaaacaacttttcagagcttcttcatctccgctacttaaaacttttgtcaccttattactcagaaatgtcattgccaaacacggtctcaaggttttatcacctgaaatttctagatcttgaacaatggggaagtgatcgttctttgcctaaggacattagccgccttgaaaatctatgccattttgttgtttcggaaaagattgattccaatgttcctgaggtggggaaaatgatcttcttacaagaattgaaagaattccatgttaataaagagagtgttggatttgagctacaagaattgggtaaactagatgagcttggagggaagctcaatatatacgggcttgaaaatgtgagaaccaagaaagaagctaaagaggccaagctgatgtcaaagaggaatttagttgagttgggattaatttggaacatgaaacaagagtccaccgaagatgatatcctagatagtatccaaccacactctaatgttaggagtctttttattgtaaatcatggtggtaccctcggtcctagttggttgtgcagcagcgacaccatatacatgaaaaacttggagactctacatctagagagcgtatcgtgggctaaccttccacctattgggcagttctatcacttaagagagctaaggctgagtaaaattgttggcatatcacagattggacctggcttcttcgatagcacgacagaaaaaagtgtctcacacttgaaggcagttgagtttaatgatatgccagagcttgtcgagtgggttgggggagctaactggaatctgttctcaggaattgaaagaatcaagtgtactaattgtcctaggctgacagggttgctggtttcagattggtctatttcttctatataagacagcactgtatggttccctaatcttcatgacctttacatttatgaatgcccgaagttgtgccttccacccttgcctcacacttcaaaggtatcccgtattcatatgggagacttttcttatgaaggtcgtaccatgttgaaaattaataacccctctagatttgccttcgaaaatctgggtgacctagagacattggtagcttgggatgcactacccttgtcctttatggatcttaaaaagctacattccttgagacgtataaatgtcactagatgtgaggaaacatttttgagaggactggatgatggtgttgtgctacccacagtccaatctctctaccttggacgatttacacctaccaaaaattatttgtcaaaattattcaaatgttttccagcactttcttctttgcatgtgatggcatcaccatcagatgaggacaacgaggaagtggtactgcattttccaccctctagctcgctgagagatgtcaacttcacagggtgtaagaatctgatcctacccatggaggaaggagctggattctgtggcctctcgtcgctcgagtcagtgaccatacacaaatgtgacaggttattctctcgatggtccatcggaggacgagcaactcagactcagagcatcatcaaccctctcccaccctacctgaggaaactcttcctttcttatatggaaactctgcctcaggaagctctgctcatgaatttgacatctcttgagaaactcacactatgtaattgtcttggctgtgagcaaagcaccgagcgaatggctgtactcgcgaatctaacatctcttaccacgctatatttatataattgcagaaatatcacaatggatggattcaatcctcacatcacatccagcctcaagtatctatgcgtgtacaatgagagaaatgatggaactgatccgtattctgtagcagcagatctacttgtagcggtggtgaggaccaaaacaatgcccgacgtttccttcaaactggtgggactttatgtggacaacatctcgggagtgcttgttgctcccatctgcaagctgctctccgctaccctcgagacgttaaacttcagtaatgattggcggacagagaacttcacgaaagagcaggacgaggcgcttcagctcctcacgtctctccaattccttgagttttataactgcagggctctgcagtccctcccccaaggactgcaccgccttccttctctccacggaataactatctatgggcctcaaaacattagatcactgcctaaggagggcctccccgattcactacgaatactacgtataactaactgttgtgctgagatttatgaggcatgccagcaattgaagggaacaaggccagatataaatgtacttgcctccaaagctcgtgtgcaaaattgaatacctgcttctgcatgtcttcacagtcagctctgcttcaacatgcctttcactctacaggtaaatactgtgaaaacatcttcctatacgtgagatagttgatcttcatcgattctacagccaggatgatgtcttattggatgatgtgttggtcatggttggcacaaaattcagtagactatgcttcatcgtaatgttgcacagcgttcaaggcaataaacgagaacaagcatgggatgtggaaaattttagaaagtaaagacaagtgaattcttgacgacgttggcttggcaccttagtttgagtacataatgaaagaacaaccttttagcaaccctggagcatctagaaaatatcagtcatgtaactatcgttaatcatttgaaaaccactggaagacaggagatgtagcaccacaagccattcctttgatcatttgaaaaccattgcggctctttctgattatatcaaccagttgagtggatgaaagaccaaaaaatgctttggaagaagggctcacaattgtggataataaggcatccagtattatagaggaaacaaaggaaattcaaattagacggaaacctgctagtccaagttcttatatgccaaattcatcagtagatacacatacactctacaccctaatcttctttgttatgacatttattgtttttttcatgaactacgtacatcttaattttcaattcatctagaatactgaataggtgatgattcatcaccaaattgataagtgaatattaatacatctgaaacctaaaattaaatatatattatataagttgttgttaatgttcattccatttttgaacacttgcatgaattttagttctctgtttcttttgaaaaattctgtgttgcaaaaatataaatttatatgaaaatatattatatggtgatgagaagtttgagtttagtatatggtttcatattagctatacattgttggtactatcggcttgttctctttttgtttgaaaaaaatactatcggcttgttcttaaggacacataaaggactagttcggaagcaagagaattagaggagagatggctaaaatccccttcctaattaaataggaagggaatttgagcaccctcaatcccctctaattcccttgctttcaaactagcccaaagagtgtcactgcatcctctgaattatgatatattgaacatggtgttataattgtgaaccgatgagtataacttattttctccatattctgaacaacccattacttaaacagatttgcatcctactggagacattgctggcagaggaattgagactggcataggagaactcaatatatgcttgtgaataacgcatccagtgaaagatagtagattttcatcaattcactacccaggatgttgtcgcattggatgagaatgacatggaagacggcgaactagaggaagacaacaacctcatctaagctgaaaatgtgttgcctgtggttgaagaaaatctagcagatgaacaacactgccttccctgtcctctctagacctgaatctctctgatggtttggattcgtccatgattgatcctgtacgatgaaggatcagctcgtccaacgtttttcaaggaacgaactcaatctgaggaattaccttttcattggtcacctggggtactacgaggaatgacttcacgatagacgactcggttttgcgacgcaaaccaaacgccatggttaggctcagatgttggatcagatgattcctcgtggcttcgtgacgcaaaccaaacgacatggctaggctcagatgttggatcgtatgatttctcgtggcttcgtgacgcaaaccaaacagcctgtaagtccgcacaccttatctatcatggtcattgttgagctgatcagtaattggagtcgtgtgataagcttaatggacctcctatttgtcgtgatcttcacagatcaacaagtgagcggcctttgcatgctgcatgagatcaagcaagccgccgactggcaatgctccacctgccattcagttcgttggtgaggtattaatcaccagccatgttggcacttggcggcatgcagatggagcagaacatccaggtgaagcggacagatacatgatcgatcatgagttggcgcagacacaggccagacaaccagaggctatattccaattcatacattccatgataagcaaaggaagatccaagacaacacaaatatacaaatagttagttatacaagcaaaaatcctgttgttttgtgcctcccattttctagtccagaattaatatgacaatttttcactgaaactggttggatcagagaccaggaaaaaaagggaaatgacaactacagctgtgttttttttttcaaagaaggcagctgcccgtcgatgatgtgctcacttgaggatttcctctgccttttcagtgacactgcttcatccttttcagagtcaaatgaatctctacctcatttcactgcacatacttccaaactgatttgctgtaacatacttgagtttcggtatgacattaatttttaactcataagagaacaaaatcagaagaaaaaaaaacaacaa

SEQ ID NO: 13013 - DNA, 4855 bp, Zea Mays
tgaagattgtgcctatatcgattgttctagttttgaggcaaataacatcccacggtctatccgttacctatccatttccatgcaagatcattgtgctcagaatttcgaggaacaaatgggaaaactgaaagaaaagatatacattaacaatttgcggagtttgatgatatttggaaaatacattatgttacatctgctcaatattttaagggacacatttaaggaaataagacgtcttcgtgttctatctatattcatatactcccatagttccttgccaaacaacttttcagagcttcttcatctccgctacttaaaacttttgtcaccttattactcagaaatgtcattgccaaacacggtctcaaggttttatcacctgaaatttctagatcttgaacaatggggaagtgatcgttctttgcctaaggacattagccgccttgaaaatctatgccattttgttgtttcggaaaagattgattccaatgttcctgaggtggggaaaatgatcttcttacaagaattgaaagaattccatgttaataaagagagtgttggatttgagctacaagaattgggtaaactagatgagcttggagggaagctcaatatatacgggcttgaaaatgtgagaaccaagaaagaagctaaagaggccaagctgatgtcaaagaggaatttagttgagttgggattaatttggaacatgaaacaagagtccaccgaagatgatatcctagatagtatccaaccacactctaatgttaggagtctttttattgtaaatcatggtggtaccctcggtcctagttggttgtgcagcagcgacaccatatacatgaaaaacttggagactctacatctagagagcgtatcgtgggctaaccttccacctattgggcagttctatcacttaagagagctaaggctgagtaaaattgttggcatatcacagattggacctggcttcttcgatagcacgacagaaaaaagtgtctcacacttgaaggcagttgagtttaatgatatgccagagcttgtcgagtgggttgggggagctaactggaatctgttctcaggaattgaaagaatcaagtgtactaattgtcctaggctgacagggttgctggtttcagattggtctatttcttctatataagacagcactgtatggttccctaatcttcatgacctttacatttatgaatgcccgaagttgtgccttccacccttgcctcacacttcaaaggtatcccgtattcatatgggagacttttcttatgaaggtcgtaccatgttgaaaattaataacccctctagatttgccttcgaaaatctgggtgacctagagacattggtagcttgggatgcactacccttgtcctttatggatcttaaaaagctacattccttgagacgtataaatgtcactagatgtgaggaaacatttttgagaggactggatgatggtgttgtgctacccacagtccaatctctctaccttggacgatttacacctaccaaaaattatttgtcaaaattattcaaatgttttccagcactttcttctttgcatgtgatggcatcaccatcagatgaggacaacgaggaagtggtactgcattttccaccctctagctcgctgagagatgtcaacttcacagggtgtaagaatctgatcctacccatggaggaaggagctggattctgtggcctctcgtcgctcgagtcagtgaccatacacaaatgtgacagaaatatcacaatggatggattcaatcctcacatcacatccagcctcaagtatctatgcgtgtacaatgagagaaatgatggaactgatccgtattctgtagcagcagatctacttgtagcggtggtgaggaccaaaacaatgcccgacgtttccttcaaactggtgggactttatgtggacaacatctcgggagtgcttgttgctcccatctgcaagctgctctccgctaccctcgagacgttaaacttcagtaatgattggcggacagagaacttcacgaaagagcaggacgaggcgcttcagctcctcacgtctctccaattccttgagttttataactgcagggctctgcagtccctcccccaaggactgcaccgccttccttctctccacggaataactatctatgggcctcaaaacattagatcactgcctaaggagggcctccccgattcactacgaatactacgtataactaactgttgtgctgagatttatgaggcatgccagcaattgaagggaacaaggccagatataaatgtacttgcctccaaagctcgtgtgcaaaattgaatacctgcttctgcatgtcttcacagtcagctctgcttcaacatgcctttcactctacaggtaaatactgtgaaaacatcttcctatacgtgagatagttgatcttcatcgattctacagccaggatgatgtcttattggatgatgtgttggtcatggttggcacaaaattcagtagcgttcaaggcaataaacgagaacaagcatgggatgtggaaaattttagaaagtaaagacaagtgaattcttgacgacgttggcttggcaccttagtttgagtacataatgaaagaacaaccttttagcaaccctggagcatctagaaaatatcagtcatgtaactatcgttaatcatttgaaaaccactggaagacaggagatgtagcaccacaagccattcctttgatcatttgaaaaccattgcggctctttctgattatatcaaccagaagggctcacaattgtggataataaggcatccagtattatagaggaaacaaaggaaattcaaattagacggaaacctgctagtccaagttcttatatgccaaattcatcagtagatacacatacactctacaccctaatcttctttgttatgacatttattgtttttttcatgaactacgtacatcttaattttcaattcatctagaatactgaataggtgatgattcatcaccaaattgataagtgaatattaatacatctgaaacctaaaattaaatatatattatataagttgttgttaatgttcattccatttttgaacacttgcatgaattttagttctctgtttcttttgaaaaattctgtgttgcaaaaatataaatttatatgaaaatatattatatggtgatgagaagtttgagtttagtatatggtttcatattagctatacattgttggtactatcggcttgttctctttttgtttgaaaaaaatactatcggcttgttcttaaggacacataaaggactagttcggaagcaagagaattagaggagagatggctaaaatccccttcctaattaaataggaagggaatttgagcaccctcaatcccctctaattcccttgctttcaaactagcccaaagagtgtcactgcatcctctgaattatgatatattgaacatggtgttataattgtgaaccgatgagtataacttattttctccatattctgaacaacccattacttaaacagatttgcatcctactggagacattgctggcagaggaattgagactggcataggagaactcaatatatgcttgtgaataacgcatccagtgaaagatagtagattttcatcaattcactacccaggatgttgtcgcattggatgagaatgacatggaagacggcgaactagaggaagacaacaacctcatctaagctgaaaatgtgttgcctgtggttgaagaaaatctagcagatgaacaacactgccttccctgtcctctctagacctgaatctctctgatggtttggattcgtccatgattgatcctgtacgatgaaggatcagctcgtccaacgtttttcaaggaacgaactcaatctgaggaattaccttttcattggtcacctggggtactacgaggaatgacttcacgatagacgactcggttttgcgacgcaaaccaaacgccatggttaggctcagatgttggatcagatgattcctcgtggcttcgtgacgcaaaccaaacgacatggctaggctcagatgttggatcgtatgatttctcgtggcttcgtgacgcaaaccaaacagcctgtaagtccgcacaccttatctatcatggtcattgttgagctgatcagtaattggagtcgtgtgataagcttaatggacctcctatttgtcgtgatcttcacagatcaacaagtgagcggcctttgcatgctgcatgagatcaagcaagccgccgactggcaatgctccacctgccattcagttcgttggtgaggtattaatcaccagccatgttggcacttggcggcatgcagatggagcagaacatccaggtgaagcggacagatacatgatcgatcatgagttggcgcagacacaggccagacaaccagaggctatattccaattcatacattccatgataagcaaaggaagatccaagacaacacaaatatacaaatagttagttatacaagcaaaaatcctgttgttttgtgcctcccattttctagtccagaattaatatgacaatttttcactgaaactggttggatcagagaccaggaaaaaaagggaaatgacaactacagctgtgttttttttttcaaagaaggcagctgcccgtcgatgatgtgctcacttgaggatttcctctgccttttcagtgacactgcttcatccttttcagagtcaaatgaatctctacctcatttcactgcacatacttccaaactgatttgctgtaacatacttgagtttcggtatgacattaatttttaactcataagagaacaaaatcagaagaaaaaaaaacaacaa

SEQ ID NO: 13014 - DNA, 5102 bp, Zea Mays
gaagattgtgcctatatcgattgttctagttttgaggcaaataacatcccacggtctatccgttacctatccatttccatgcaagatcattgtgctcagaatttcgaggaacaaatgggaaaactgaaagaaaagatatacattaacaatttgcggagtttgatgatatttggaaaatacattatgttacatctgctcaatattttaagggacacatttaaggaaataagacgtcttcgtgttctatctatattcatatactcccatagttccttgccaaacaacttttcagagcttcttcatctccgctacttaaaacttttgtcaccttattactcagaaatgtcattgccaaacacggtctcaaggttttatcacctgaaatttctagatcttgaacaatggggaagtgatcgttctttgcctaaggacattagccgccttgaaaatctatgccattttgttgtttcggaaaagattgattccaatgttcctgaggtggggaaaatgatcttcttacaagaattgaaagaattccatgttaataaagagagtgttggatttgagctacaagaattgggtaaactagatgagcttggagggaagctcaatatatacgggcttgaaaatgtgagaaccaagaaagaagctaaagaggccaagctgatgtcaaagaggaatttagttgagttgggattaatttggaacatgaaacaagagtccaccgaagatgatatcctagatagtatccaaccacactctaatgttaggagtctttttattgtaaatcatggtggtaccctcggtcctagttggttgtgcagcagcgacaccatatacatgaaaaacttggagactctacatctagagagcgtatcgtgggctaaccttccacctattgggcagttctatcacttaagagagctaaggctgagtaaaattgttggcatatcacagattggacctggcttcttcgatagcacgacagaaaaaagtgtctcacacttgaaggcagttgagtttaatgatatgccagagcttgtcgagtgggttgggggagctaactggaatctgttctcaggaattgaaagaatcaagtgtactaattgtcctaggctgacagggttgctggtttcagattggtctatttcttctatataagacagcactgtatggttccctaatcttcatgacctttacatttatgaatgcccgaagttgtgccttccacccttgcctcacacttcaaaggtatcccgtattcatatgggagacttttcttatgaaggtcgtaccatgttgaaaattaataacccctctagatttgccttcgaaaatctgggtgacctagagacattggtagcttgggatgcactacccttgtcctttatggatcttaaaaagctacattccttgagacgtataaatgtcactagatgtgaggaaacatttttgagaggactggatgatggtgttgtgctacccacagtccaatctctctaccttggacgatttacacctaccaaaaattatttgtcaaaattattcaaatgttttccagcactttcttctttgcatgtgatggcatcaccatcagatgaggacaacgaggaagtggtactgcattttccaccctctagctcgctgagagatgtcaacttcacagggtgtaagaatctgatcctacccatggaggaaggagctggattctgtggcctctcgtcgctcgagtcagtgaccatacacaaatgtgacaggttattctctcgatggtccatcggaggacgagcaactcagactcagagcatcatcaaccctctcccaccctacctgaggaaactcttcctttcttatatggaaactctgcctcaggaagctctgctcatgaatttgacatctcttgagaaactcacactatgtaattgtcttggctgtgagcaaagcaccgagcgaatggctgtactcgcgaatctaacatctcttaccacgctatatttatataattgcagaaatatcacaatggatggattcaatcctcacatcacatccagcctcaagtatctatgcgtgtacaatgagagaaatgatggaactgatccgtattctgtagcagcagatctacttgtagcggtggtgaggaccaaaacaatgcccgacgtttccttcaaactggtgggactttatgtggacaacatctcgggagtgcttgttgctcccatctgcaagctgctctccgctaccctcgagacgttaaacttcagtaatgattggcggacagagaacttcacgaaagagcaggacgaggcgcttcagctcctcacgtctctccaattccttgagttttataactgcagggctctgcagtccctcccccaaggactgcaccgccttccttctctccacggaataactatctatgggcctcaaaacattagatcactgcctaaggagggcctccccgattcactacgaatactacgtataactaactgttgtgctgagatttatgaggcatgccagcaattgaagggaacaaggccagatataaatgtacttgcctccaaagctcgtgtgcaaaattgaatacctgcttctgcatgtcttcacagtcagctctgcttcaacatgcctttcactctacaggtaaatactgtgaaaacatcttcctatacgtgagatagttgatcttcatcgattctacagccaggatgatgtcttattggatgatgtgttggtcatggttggcacaaaattcagtagcgttcaaggcaataaacgagaacaagcatgggatgtggaaaattttagaaagtaaagacaagtgaattcttgacgacgttggcttggcaccttagtttgagtacataatgaaagaacaaccttttagcaaccctggagcatctagaaaatatcagacaggagatgtagcaccacaagccattcctttgatcatttgaaaaccattgcggctctttctgattatatcaaccagttgagtggatgaaagaccaaaaaatgctttggaagaagggctcacaattgtggataataaggcatccagtattatagaggaaacaaaggaaattcaaattagacggaaacctgctagtccaagttcttatatgccaaattcatcagtagatacacatacactctacaccctaatcttctttgttatgacatttattgtttttttcatgaactacgtacatcttaattttcaattcatctagaatactgaataggtgatgattcatcaccaaattgataagtgaatattaatacatctgaaacctaaaattaaatatatattatataagttgttgttaatgttcattccatttttgaacacttgcatgaattttagttctctgtttcttttgaaaaattctgtgttgcaaaaatataaatttatatgaaaatatattatatggtgatgagaagtttgagtttagtatatggtttcatattagctatacattgttggtactatcggcttgttctctttttgtttgaaaaaaatactatcggcttgttcttaaggacacataaaggactagttcggaagcaagagaattagaggagagatggctaaaatccccttcctaattaaataggaagggaatttgagcaccctcaatcccctctaattcccttgctttcaaactagcccaaagagtgtcactgcatcctctgaattatgatatattgaacatggtgttataattgtgaaccgatgagtataacttattttctccatattctgaacaacccattacttaaacagatttgcatcctactggagacattgctggcagaggaattgagactggcataggagaactcaatatatgcttgtgaataacgcatccagtgaaagatagtagattttcatcaattcactacccaggatgttgtcgcattggatgagaatgacatggaagacggcgaactagaggaagacaacaacctcatctaagctgaaaatgtgttgcctgtggttgaagaaaatctagcagatgaacaacactgccttccctgtcctctctagacctgaatctctctgatggtttggattcgtccatgattgatcctgtacgatgaaggatcagctcgtccaacgtttttcaaggaacgaactcaatctgaggaattaccttttcattggtcacctggggtactacgaggaatgacttcacgatagacgactcggttttgcgacgcaaaccaaacgccatggttaggctcagatgttggatcagatgattcctcgtggcttcgtgacgcaaaccaaacgacatggctaggctcagatgttggatcgtatgatttctcgtggcttcgtgacgcaaaccaaacagcctgtaagtccgcacaccttatctatcatggtcattgttgagctgatcagtaattggagtcgtgtgataagcttaatggacctcctatttgtcgtgatcttcacagatcaacaagtgagcggcctttgcatgctgcatgagatcaagcaagccgccgactggcaatgctccacctgccattcagttcgttggtgaggtattaatcaccagccatgttggcacttggcggcatgcagatggagcagaacatccaggtgaagcggacagatacatgatcgatcatgagttggcgcagacacaggccagacaaccagaggctatattccaattcatacattccatgataagcaaaggaagatccaagacaacacaaatatacaaatagttagttatacaagcaaaaatcctgttgttttgtgcctcccattttctagtccagaattaatatgacaatttttcactgaaactggttggatcagagaccaggaaaaaaagggaaatgacaactacagctgtgttttttttttcaaagaaggcagctgcccgtcgatgatgtgctcacttgaggatttcctctgccttttcagtgacactgcttcatccttttcagagtcaaatgaatctctacctcatttcactgcacatacttccaaactgatttgctgtaacatacttgagtttcggtatgacattaatttttaactcataagagaacaaaatcagaagaaaaaaaaacaacaa

SEQ ID NO: 13015 - DNA, 4986 bp, Zea Mays
gaagattgtgcctatatcgattgttctagttttgaggcaaataacatcccacggtctatccgttacctatccatttccatgcaagatcattgtgctcagaatttcgaggaacaaatgggaaaactgaaagaaaagatatacattaacaatttgcggagtttgatgatatttggaaaatacattatgttacatctgctcaatattttaagggacacatttaaggaaataagacgtcttcgtgttctatctatattcatatactcccatagttccttgccaaacaacttttcagagcttcttcatctccgctacttaaaacttttgtcaccttattactcagaaatgtcattgccaaacacggtctcaaggttttatcacctgaaatttctagatcttgaacaatggggaagtgatcgttctttgcctaaggacattagccgccttgaaaatctatgccattttgttgtttcggaaaagattgattccaatgttcctgaggtggggaaaatgatcttcttacaagaattgaaagaattccatgttaataaagagagtgttggatttgagctacaagaattgggtaaactagatgagcttggagggaagctcaatatatacgggcttgaaaatgtgagaaccaagaaagaagctaaagaggccaagctgatgtcaaagaggaatttagttgagttgggattaatttggaacatgaaacaagagtccaccgaagatgatatcctagatagtatccaaccacactctaatgttaggagtctttttattgtaaatcatggtggtaccctcggtcctagttggttgtgcagcagcgacaccatatacatgaaaaacttggagactctacatctagagagcgtatcgtgggctaaccttccacctattgggcagttctatcacttaagagagctaaggctgagtaaaattgttggcatatcacagattggacctggcttcttcgatagcacgacagaaaaaagtgtctcacacttgaaggcagttgagtttaatgatatgccagagcttgtcgagtgggttgggggagctaactggaatctgttctcaggaattgaaagaatcaagtgtactaattgtcctaggctgacagggttgctggtttcagattggtctatttcttctatataagacagcactgtatggttccctaatcttcatgacctttacatttatgaatgcccgaagttgtgccttccacccttgcctcacacttcaaaggtatcccgtattcatatgggagacttttcttatgaaggtcgtaccatgttgaaaattaataacccctctagatttgccttcgaaaatctgggtgacctagagacattggtagcttgggatgcactacccttgtcctttatggatcttaaaaagctacattccttgagacgtataaatgtcactagatgtgaggaaacatttttgagaggactggatgatggtgttgtgctacccacagtccaatctctctaccttggacgatttacacctaccaaaaattatttgtcaaaattattcaaatgttttccagcactttcttctttgcatgtgatggcatcaccatcagatgaggacaacgaggaagtggtactgcattttccaccctctagctcgctgagagatgtcaacttcacagggtgtaagaatctgatcctacccatggaggaaggagctggattctgtggcctctcgtcgctcgagtcagtgaccatacacaaatgtgacaggttattctctcgatggtccatcggaggacgagcaactcagactcagagcatcatcaaccctctcccaccctacctgaggaaactcttcctttcttatatggaaactctgcctcaggaagctctgctcatgaatttgacatctcttgagaaactcacactatgtaattgtcttggctgtgagcaaagcaccgagcgaatggctgtactcgcgaatctaacatctcttaccacgctatatttatataattgcagaaatatcacaatggatggattcaatcctcacatcacatccagcctcaagtatctatgcgtgtacaatgagagaaatgatggaactgatccgtattctgtagcagcagatctacttgtagcggtggtgaggaccaaaacaatgcccgacgtttccttcaaactggtgggactttatgtggacaacatctcgggagtgcttgttgctcccatctgcaagctgctctccgctaccctcgagacgttaaacttcagtaatgattggcggacagagaacttcacgaaagagcaggacgaggcgcttcagctcctcacgtctctccaattccttgagttttataactgcagggctctgcagtccctcccccaaggactgcaccgccttccttctctccacggaataactatctatgggcctcaaaacattagatcactgcctaaggagggcctccccgattcactacgaatactacgtataactaactgttgtgctgagatttatgaggcatgccagcaattgaagggaacaaggccagatataaatgtacttgcctccaaagctcgtgtgcaaaattgaatacctgcttctgcatgtcttcacagtcagctctgcttcaacatgcctttcactctacaggtaaatactgtgaaaacatcttcctatacgtgagatagttgatcttcatcgattctacagccaggatgatgtcttattggatgatgtgttggtcatggttggcacaaaattcagtagtcatgtaactatcgttaatcatttgaaaaccactggaagacaggagatgtagcaccacaagccattcctttgatcatttgaaaaccattgcggctctttctgattatatcaaccagttgagtggatgaaagaccaaaaaatgctttggaagaagggctcacaattgtggataataaggcatccagtattatagaggaaacaaaggaaattcaaattagacggaaacctgctagtccaagttcttatatgccaaattcatcagtagatacacatacactctacaccctaatcttctttgttatgacatttattgtttttttcatgaactacgtacatcttaattttcaattcatctagaatactgaataggtgatgattcatcaccaaattgataagtgaatattaatacatctgaaacctaaaattaaatatatattatataagttgttgttaatgttcattccatttttgaacacttgcatgaattttagttctctgtttcttttgaaaaattctgtgttgcaaaaatataaatttatatgaaaatatattatatggtgatgagaagtttgagtttagtatatggtttcatattagctatacattgttggtactatcggcttgttctctttttgtttgaaaaaaatactatcggcttgttcttaaggacacataaaggactagttcggaagcaagagaattagaggagagatggctaaaatccccttcctaattaaataggaagggaatttgagcaccctcaatcccctctaattcccttgctttcaaactagcccaaagagtgtcactgcatcctctgaattatgatatattgaacatggtgttataattgtgaaccgatgagtataacttattttctccatattctgaacaacccattacttaaacagatttgcatcctactggagacattgctggcagaggaattgagactggcataggagaactcaatatatgcttgtgaataacgcatccagtgaaagatagtagattttcatcaattcactacccaggatgttgtcgcattggatgagaatgacatggaagacggcgaactagaggaagacaacaacctcatctaagctgaaaatgtgttgcctgtggttgaagaaaatctagcagatgaacaacactgccttccctgtcctctctagacctgaatctctctgatggtttggattcgtccatgattgatcctgtacgatgaaggatcagctcgtccaacgtttttcaaggaacgaactcaatctgaggaattaccttttcattggtcacctggggtactacgaggaatgacttcacgatagacgactcggttttgcgacgcaaaccaaacgccatggttaggctcagatgttggatcagatgattcctcgtggcttcgtgacgcaaaccaaacgacatggctaggctcagatgttggatcgtatgatttctcgtggcttcgtgacgcaaaccaaacagcctgtaagtccgcacaccttatctatcatggtcattgttgagctgatcagtaattggagtcgtgtgataagcttaatggacctcctatttgtcgtgatcttcacagatcaacaagtgagcggcctttgcatgctgcatgagatcaagcaagccgccgactggcaatgctccacctgccattcagttcgttggtgaggtattaatcaccagccatgttggcacttggcggcatgcagatggagcagaacatccaggtgaagcggacagatacatgatcgatcatgagttggcgcagacacaggccagacaaccagaggctatattccaattcatacattccatgataagcaaaggaagatccaagacaacacaaatatacaaatagttagttatacaagcaaaaatcctgttgttttgtgcctcccattttctagtccagaattaatatgacaatttttcactgaaactggttggatcagagaccaggaaaaaaagggaaatgacaactacagctgtgttttttttttcaaagaaggcagctgcccgtcgatgatgtgctcacttgaggatttcctctgccttttcagtgacactgcttcatccttttcagagtcaaatgaatctctacctcatttcactgcacatacttccaaactgatttgctgtaacatacttgagtttcggtatgacattaatttttaactcataagagaacaaaatcagaagaaaaaaaaacaacaa

SEQ ID NO: 13016 - DNA, 4473 bp, Zea Mays
gaagattgtgcctatatcgattgttctagttttgaggcaaataacatcccacggtctatccgttacctatccatttccatgcaagatcattgtgctcagaatttcgaggaacaaatgggaaaactgaaagaaaagatatacattaacaatttgcggagtttgatgatatttggaaaatacattatgttacatctgctcaatattttaagggacacatttaaggaaataagacgtcttcgtgttctatctatattcatatactcccatagttccttgccaaacaacttttcagagcttcttcatctccgctacttaaaacttttgtcaccttattactcagaaatgtcattgccaaacacggtctcaaggttttatcacctgaaatttctagatcttgaacaatggggaagtgatcgttctttgcctaaggacattagccgccttgaaaatctatgccattttgttgtttcggaaaagattgattccaatgttcctgaggtggggaaaatgatcttcttacaagaattgaaagaattccatgttaataaagagagtgttggatttgagctacaagaattgggtaaactagatgagcttggagggaagctcaatatatacgggcttgaaaatgtgagaaccaagaaagaagctaaagaggccaagctgatgtcaaagaggaatttagttgagttgggattaatttggaacatgaaacaagagtccaccgaagatgatatcctagatagtatccaaccacactctaatgttaggagtctttttattgtaaatcatggtggtaccctcggtcctagttggttgtgcagcagcgacaccatatacatgaaaaacttggagactctacatctagagagcgtatcgtgggctaaccttccacctattgggcagttctatcacttaagagagctaaggctgagtaaaattgttggcatatcacagattggacctggcttcttcgatagcacgacagaaaaaagtgtctcacacttgaaggcagttgagtttaatgatatgccagagcttgtcgagtgggttgggggagctaactggaatctgttctcaggaattgaaagaatcaagtgtactaattgtcctaggctgacagggttgctggtttcagattggtctatttcttctatataagacagcactgtatggttccctaatcttcatgacctttacatttatgaatgcccgaagttgtgccttccacccttgcctcacacttcaaaggtatcccgtattcatatgggagacttttcttatgaaggtcgtaccatgttgaaaattaataacccctctagatttgccttcgaaaatctgggtgacctagagacattggtagcttgggatgcactacccttgtcctttatggatcttaaaaagctacattccttgagacgtataaatgtcactagatgtgaggaaacatttttgagaggactggatgatggtgttgtgctacccacagtccaatctctctaccttggacgatttacacctaccaaaaattatttgtcaaaattattcaaatgttttccagcactttcttctttgcatgtgatggcatcaccatcagatgaggacaacgaggaagtggtactgcattttccaccctctagctcgctgagagatgtcaacttcacagggtgtaagaatctgatcctacccatggaggaaggagctggattctgtggcctctcgtcgctcgagtcagtgaccatacacaaatgtgacaggttattctctcgatggtccatcggaggacgagcaactcagactcagagcatcatcaaccctctcccaccctacctgaggaaactcttcctttcttatatggaaactctgcctcaggaagctctgctcatgaatttgacatctcttgagaaactcacactatgtaattgtcttggctgtgagcaaagcaccgagcgaatggctgtactcgcgaatctaacatctcttaccacgctatatttatataattgcagaaatatcacaatggatggattcaatcctcacatcacatccagcctcaagtatctatgcgtgtacaatgagagaaatgatggaactgatccgtattctgtagcagcagatctacttgtagcggtggtgaggaccaaaacaatgcccgacgtttccttcaaactggtgggactttatgtggacaacatctcgggagtgcttgttgctcccatctgcaagctgctctccgctaccctcgagacgttaaacttcagtaatgattggcggacagagaacttcacgaaagagcaggacgaggcgcttcagctcctcacgtctctccaattccttgagttttataactgcagggctctgcagtccctcccccaaggactgcaccgccttccttctctccacggaataactatctatgggcctcaaaacattagatcactgcctaaggagggcctccccgattcactacgaatactacgtataactaactgttgtgctgagatttatgaggcatgccagcaattgaagggaacaaggccagatataaatgtacttgcctccaaagctcgtgtgcaaaattgaatacctgcttctgcatgtcttcacagtcagctctgcttcaacatgcctttcactctacaggtaaatactgtgaaaacatcttcctatacgtgagatagttgatcttcatcgattctacagccaggatgatgtcttattggatgatgtgttggtcatggttggcacaaaattcagtagactatgcttcatcgtaatgttgcacagcgttcaaggcaataaacgagaacaagcatgggatgtggaaaattttagaaagtaaagacaagtgaattcttgacgacgttggcttggcaccttagtttgagtacataatgaaagaacaaccttttagcaaccctggagcatctagaaaatatcagtcatgtaactatcgttaatcatttgaaaaccactggaagacaggagatgtagcaccacaagccattcctttgatcatttgaaaaccattgcggctctttctgattatatcaaccagttgagtggatgaaagaccaaaaaatgctttggaagaagggctcacaattgtggataataaggcatccagtattatagaggaaacaaaggaaattcaaattagacggaaacctgctagtccaagttcttatatgccaaattcatcaatttgcatcctactggagacattgctggcagaggaattgagactggcataggagaactcaatatatgcttgtgaataacgcatccagtgaaagatagtagattttcatcaattcactacccaggatgttgtcgcattggatgagaatgacatggaagacggcgaactagaggaagacaacaacctcatctaagctgaaaatgtgttgcctgtggttgaagaaaatctagcagatgaacaacactgccttccctgtcctctctagacctgaatctctctgatggtttggattcgtccatgattgatcctgtacgatgaaggatcagctcgtccaacgtttttcaaggaacgaactcaatctgaggaattaccttttcattggtcacctggggtactacgaggaatgacttcacgatagacgactcggttttgcgacgcaaaccaaacgccatggttaggctcagatgttggatcagatgattcctcgtggcttcgtgacgcaaaccaaacgacatggctaggctcagatgttggatcgtatgatttctcgtggcttcgtgacgcaaaccaaacagcctcatgctctagccaaaggcatgatcgtcatcgttctgaaacaaagaaaatgatgtgtattcctttcagtgagcggcctttgcatgctgcatgagatcaagcaagccgccgactggcaatgctccacctgccattcagttcgttggtgaggtattaatcaccagccatgttggcacttggcggcatgcagatggagcagaacatccaggtgaagcggacagatacatgatcgatcatgagttggcgcagacacaggccagacaaccagaggctatattccaattcatacattccatgataagcaaaggaagatccaagacaacacaaatatacaaatagttagttatacaagcaaaaatcctgttgttttgtgcctcccattttctagtccagaattaatatgacaatttttcactgaaactggttggatcagagaccaggaaaaaaagggaaatgacaactacagctgtgttttttttttcaaagaaggcagctgcccgtcgatgatgtgctcacttgaggatttcctctgccttttcagtgacactgcttcatccttttcagagtcaaatgaatctctacctcatttcactgcacatacttccaaactgatttgctgtaacatacttgagtttcggtatgacattaatttttaactcataagagaacaaaatcagaagaaaaaaaaacaacaa

SEQ ID NO: 13017 - DNA, 4483 bp, Zea Mays
gaagattgtgcctatatcgattgttctagttttgaggcaaataacatcccacggtctatccgttacctatccatttccatgcaagatcattgtgctcagaatttcgaggaacaaatgggaaaactgaaagaaaagatatacattaacaatttgcggagtttgatgatatttggaaaatacattatgttacatctgctcaatattttaagggacacatttaaggaaataagacgtcttcgtgttctatctatattcatatactcccatagttccttgccaaacaacttttcagagcttcttcatctccgctacttaaaacttttgtcaccttattactcagaaatgtcattgccaaacacggtctcaaggttttatcacctgaaatttctagatcttgaacaatggggaagtgatcgttctttgcctaaggacattagccgccttgaaaatctatgccattttgttgtttcggaaaagattgattccaatgttcctgaggtggggaaaatgatcttcttacaagaattgaaagaattccatgttaataaagagagtgttggatttgagctacaagaattgggtaaactagatgagcttggagggaagctcaatatatacgggcttgaaaatgtgagaaccaagaaagaagctaaagaggccaagctgatgtcaaagaggaatttagttgagttgggattaatttggaacatgaaacaagagtccaccgaagatgatatcctagatagtatccaaccacactctaatgttaggagtctttttattgtaaatcatggtggtaccctcggtcctagttggttgtgcagcagcgacaccatatacatgaaaaacttggagactctacatctagagagcgtatcgtgggctaaccttccacctattgggcagttctatcacttaagagagctaaggctgagtaaaattgttggcatatcacagattggacctggcttcttcgatagcacgacagaaaaaagtgtctcacacttgaaggcagttgagtttaatgatatgccagagcttgtcgagtgggttgggggagctaactggaatctgttctcaggaattgaaagaatcaagtgtactaattgtcctaggctgacagggttgctggtttcagattggtctatttcttctatataagacagcactgtatggttccctaatcttcatgacctttacatttatgaatgcccgaagttgtgccttccacccttgcctcacacttcaaaggtatcccgtattcatatgggagacttttcttatgaaggtcgtaccatgttgaaaattaataacccctctagatttgccttcgaaaatctgggtgacctagagacattggtagcttgggatgcactacccttgtcctttatggatcttaaaaagctacattccttgagacgtataaatgtcactagatgtgaggaaacatttttgagaggactggatgatggtgttgtgctacccacagtccaatctctctaccttggacgatttacacctaccaaaaattatttgtcaaaattattcaaatgttttccagcactttcttctttgcatgtgatggcatcaccatcagatgaggacaacgaggaagtggtactgcattttccaccctctagctcgctgagagatgtcaacttcacagggtgtaagaatctgatcctacccatggaggaaggagctggattctgtggcctctcgtcgctcgagtcagtgaccatacacaaatgtgacaggttattctctcgatggtccatcggaggacgagcaactcagactcagagcatcatcaaccctctcccaccctacctgaggaaactcttcctttcttatatggaaactctgcctcaggaagctctgctcatgaatttgacatctcttgagaaactcacactatgtaattgtcttggctgtgagcaaagcaccgagcgaatggctgtactcgcgaatctaacatctcttaccacgctatatttatataattgcagaaatatcacaatggatggattcaatcctcacatcacatccagcctcaagtatctatgcgtgtacaatgagagaaatgatggaactgatccgtattctgtagcagcagatctacttgtagcggtggtgaggaccaaaacaatgcccgacgtttccttcaaactggtgggactttatgtggacaacatctcgggagtgcttgttgctcccatctgcaagctgctctccgctaccctcgagacgttaaacttcagtaatgattggcggacagagaacttcacgaaagagcaggacgaggcgcttcagctcctcacgtctctccaattccttgagttttataactgcagggctctgcagtccctcccccaaggactgcaccgccttccttctctccacggaataactatctatgggcctcaaaacattagatcactgcctaaggagggcctccccgattcactacgaatactacgtataactaactgttgtgctgagatttatgaggcatgccagcaattgaagggaacaaggccagatataaatgtacttgcctccaaagctcgtgtgcaaaattgaatacctgcttctgcatgtcttcacagtcagctctgcttcaacatgcctttcactctacaggtaaatactgtgaaaacatcttcctatacgtgagatagttgatcttcatcgattctacagccaggatgatgtcttattggatgatgtgttggtcatggttggcacaaaattcagtagactatgcttcatcgtaatgttgcacagcgttcaaggcaataaacgagaacaagcatgggatgtggaaaattttagaaagtaaagacaagtgaattcttgacgacgttggcttggcaccttagtttgagtacataatgaaagaacaaccttttagcaaccctggagcatctagaaaatatcagtcatgtaactatcgttaatcatttgaaaaccactggaagacaggagatgtagcaccacaagccattcctttgatcatttgaaaaccattgcggctctttctgattatatcaaccagaagggctcacaattgtggataataaggcatccagtattatagaggaaacaaaggaaattcaaattagacggaaacctgctagtccaagttcttatatgccaaattcatcaatttgcatcctactggagacattgctggcagaggaattgagactggcataggagaactcaatatatgcttgtgaataacgcatccagtgaaagatagtagattttcatcaattcactacccaggatgttgtcgcattggatgagaatgacatggaagacggcgaactagaggaagacaacaacctcatctaagctgaaaatgtgttgcctgtggttgaagaaaatctagcagatgaacaacactgccttccctgtcctctctagacctgaatctctctgatggtttggattcgtccatgattgatcctgtacgatgaaggatcagctcgtccaacgtttttcaaggaacgaactcaatctgaggaattaccttttcattggtcacctggggtactacgaggaatgacttcacgatagacgactcggttttgcgacgcaaaccaaacgccatggttaggctcagatgttggatcagatgattcctcgtggcttcgtgacgcaaaccaaacgacatggctaggctcagatgttggatcgtatgatttctcgtggcttcgtgacgcaaaccaaacagcctgtaagtccgcacaccttatctatcatggtcattgttgagctgatcagtaattggagtcgtgtgataagcttaatggacctcctatttgtcgtgatcttcacagatcaacaagtgagcggcctttgcatgctgcatgagatcaagcaagccgccgactggcaatgctccacctgccattcagttcgttggtgaggtattaatcaccagccatgttggcacttggcggcatgcagatggagcagaacatccaggtgaagcggacagatacatgatcgatcatgagttggcgcagacacaggccagacaaccagaggctatattccaattcatacattccatgataagcaaaggaagatccaagacaacacaaatatacaaatagttagttatacaagcaaaaatcctgttgttttgtgcctcccattttctagtccagaattaatatgacaatttttcactgaaactggttggatcagagaccaggaaaaaaagggaaatgacaactacagctgtgttttttttttcaaagaaggcagctgcccgtcgatgatgtgctcacttgaggatttcctctgccttttcagtgacactgcttcatccttttcagagtcaaatgaatctctacctcatttcactgcacatacttccaaactgatttgctgtaacatacttgagtttcggtatgacattaatttttaactcataagagaacaaaatcagaagaaaaaaaaacaacaa

SEQ ID NO: 13018 - DNA, 4336 bp, Zea Mays
gaagattgtgcctatatcgattgttctagttttgaggcaaataacatcccacggtctatccgttacctatccatttccatgcaagatcattgtgctcagaatttcgaggaacaaatgggaaaactgaaagaaaagatatacattaacaatttgcggagtttgatgatatttggaaaatacattatgttacatctgctcaatattttaagggacacatttaaggaaataagacgtcttcgtgttctatctatattcatatactcccatagttccttgccaaacaacttttcagagcttcttcatctccgctacttaaaacttttgtcaccttattactcagaaatgtcattgccaaacacggtctcaaggttttatcacctgaaatttctagatcttgaacaatggggaagtgatcgttctttgcctaaggacattagccgccttgaaaatctatgccattttgttgtttcggaaaagattgattccaatgttcctgaggtggggaaaatgatcttcttacaagaattgaaagaattccatgttaataaagagagtgttggatttgagctacaagaattgggtaaactagatgagcttggagggaagctcaatatatacgggcttgaaaatgtgagaaccaagaaagaagctaaagaggccaagctgatgtcaaagaggaatttagttgagttgggattaatttggaacatgaaacaagagtccaccgaagatgatatcctagatagtatccaaccacactctaatgttaggagtctttttattgtaaatcatggtggtaccctcggtcctagttggttgtgcagcagcgacaccatatacatgaaaaacttggagactctacatctagagagcgtatcgtgggctaaccttccacctattgggcagttctatcacttaagagagctaaggctgagtaaaattgttggcatatcacagattggacctggcttcttcgatagcacgacagaaaaaagtgtctcacacttgaaggcagttgagtttaatgatatgccagagcttgtcgagtgggttgggggagctaactggaatctgttctcaggaattgaaagaatcaagtgtactaattgtcctaggctgacagggttgctggtttcagattggtctatttcttctatataagacagcactgtatggttccctaatcttcatgacctttacatttatgaatgcccgaagttgtgccttccacccttgcctcacacttcaaaggtatcccgtattcatatgggagacttttcttatgaaggtcgtaccatgttgaaaattaataacccctctagatttgccttcgaaaatctgggtgacctagagacattggtagcttgggatgcactacccttgtcctttatggatcttaaaaagctacattccttgagacgtataaatgtcactagatgtgaggaaacatttttgagaggactggatgatggtgttgtgctacccacagtccaatctctctaccttggacgatttacacctaccaaaaattatttgtcaaaattattcaaatgttttccagcactttcttctttgcatgtgatggcatcaccatcagatgaggacaacgaggaagtggtactgcattttccaccctctagctcgctgagagatgtcaacttcacagggtgtaagaatctgatcctacccatggaggaaggagctggattctgtggcctctcgtcgctcgagtcagtgaccatacacaaatgtgacaggttattctctcgatggtccatcggaggacgagcaactcagactcagagcatcatcaaccctctcccaccctacctgaggaaactcttcctttcttatatggaaactctgcctcaggaagctctgctcatgaatttgacatctcttgagaaactcacactatgtaattgtcttggctgtgagcaaagcaccgagcgaatggctgtactcgcgaatctaacatctcttaccacgctatatttatataattgcagaaatatcacaatggatggattcaatcctcacatcacatccagcctcaagtatctatgcgtgtacaatgagagaaatgatggaactgatccgtattctgtagcagcagatctacttgtagcggtggtgaggaccaaaacaatgcccgacgtttccttcaaactggtgggactttatgtggacaacatctcgggagtgcttgttgctcccatctgcaagctgctctccgctaccctcgagacgttaaacttcagtaatgattggcggacagagaacttcacgaaagagcaggacgaggcgcttcagctcctcacgtctctccaattccttgagttttataactgcagggctctgcagtccctcccccaaggactgcaccgccttccttctctccacggaataactatctatgggcctcaaaacattagatcactgcctaaggagggcctccccgattcactacgaatactacgtataactaactgttgtgctgagatttatgaggcatgccagcaattgaagggaacaaggccagatataaatgtacttgcctccaaagctcgtgtgcaaaattgaatacctgcttctgcatgtcttcacagtcagctctgcttcaacatgcctttcactctacaggtaaatactgtgaaaacatcttcctatacgtgagatagttgatcttcatcgattctacagccaggatgatgtcttattggatgatgtgttggtcatggttggcacaaaattcagtagtcatgtaactatcgttaatcatttgaaaaccactggaagacaggagatgtagcaccacaagccattcctttgatcatttgaaaaccattgcggctctttctgattatatcaaccagttgagtggatgaaagaccaaaaaatgctttggaagaagggctcacaattgtggataataaggcatccagtattatagaggaaacaaaggaaattcaaattagacggaaacctgctagtccaagttcttatatgccaaattcatcaatttgcatcctactggagacattgctggcagaggaattgagactggcataggagaactcaatatatgcttgtgaataacgcatccagtgaaagatagtagattttcatcaattcactacccaggatgttgtcgcattggatgagaatgacatggaagacggcgaactagaggaagacaacaacctcatctaagctgaaaatgtgttgcctgtggttgaagaaaatctagcagatgaacaacactgccttccctgtcctctctagacctgaatctctctgatggtttggattcgtccatgattgatcctgtacgatgaaggatcagctcgtccaacgtttttcaaggaacgaactcaatctgaggaattaccttttcattggtcacctggggtactacgaggaatgacttcacgatagacgactcggttttgcgacgcaaaccaaacgccatggttaggctcagatgttggatcagatgattcctcgtggcttcgtgacgcaaaccaaacgacatggctaggctcagatgttggatcgtatgatttctcgtggcttcgtgacgcaaaccaaacagcctgtaagtccgcacaccttatctatcatggtcattgttgagctgatcagtaattggagtcgtgtgataagcttaatggacctcctatttgtcgtgatcttcacagatcaacaagtgagcggcctttgcatgctgcatgagatcaagcaagccgccgactggcaatgctccacctgccattcagttcgttggtgaggtattaatcaccagccatgttggcacttggcggcatgcagatggagcagaacatccaggtgaagcggacagatacatgatcgatcatgagttggcgcagacacaggccagacaaccagaggctatattccaattcatacattccatgataagcaaaggaagatccaagacaacacaaatatacaaatagttagttatacaagcaaaaatcctgttgttttgtgcctcccattttctagtccagaattaatatgacaatttttcactgaaactggttggatcagagaccaggaaaaaaagggaaatgacaactacagctgtgttttttttttcaaagaaggcagctgcccgtcgatgatgtgctcacttgaggatttcctctgccttttcagtgacactgcttcatccttttcagagtcaaatgaatctctacctcatttcactgcacatacttccaaactgatttgctgtaacatacttgagtttcggtatgacattaatttttaactcataagagaacaaaatcagaagaaaaaaaaacaacaa

SEQ ID NO: 13019 - DNA, 4844 bp, Zea Mays
gaagattgtgcctatatcgattgttctagttttgaggcaaataacatcccacggtctatccgttacctatccatttccatgcaagatcattgtgctcagaatttcgaggaacaaatgggaaaactgaaagaaaagatatacattaacaatttgcggagtttgatgatatttggaaaatacattatgttacatctgctcaatattttaagggacacatttaaggaaataagacgtcttcgtgttctatctatattcatatactcccatagttccttgccaaacaacttttcagagcttcttcatctccgctacttaaaacttttgtcaccttattactcagaaatgtcattgccaaacacggtctcaaggttttatcacctgaaatttctagatcttgaacaatggggaagtgatcgttctttgcctaaggacattagccgccttgaaaatctatgccattttgttgtttcggaaaagattgattccaatgttcctgaggtggggaaaatgatcttcttacaagaattgaaagaattccatgttaataaagagagtgttggatttgagctacaagaattgggtaaactagatgagcttggagggaagctcaatatatacgggcttgaaaatgtgagaaccaagaaagaagctaaagaggccaagctgatgtcaaagaggaatttagttgagttgggattaatttggaacatgaaacaagagtccaccgaagatgatatcctagatagtatccaaccacactctaatgttaggagtctttttattgtaaatcatggtggtaccctcggtcctagttggttgtgcagcagcgacaccatatacatgaaaaacttggagactctacatctagagagcgtatcgtgggctaaccttccacctattgggcagttctatcacttaagagagctaaggctgagtaaaattgttggcatatcacagattggacctggcttcttcgatagcacgacagaaaaaagtgtctcacacttgaaggcagttgagtttaatgatatgccagagcttgtcgagtgggttgggggagctaactggaatctgttctcaggaattgaaagaatcaagtgtactaattgtcctaggctgacagggttgctggtttcagattggtctatttcttctatataagacagcactgtatggttccctaatcttcatgacctttacatttatgaatgcccgaagttgtgccttccacccttgcctcacacttcaaaggtatcccgtattcatatgggagacttttcttatgaaggtcgtaccatgttgaaaattaataacccctctagatttgccttcgaaaatctgggtgacctagagacattggtagcttgggatgcactacccttgtcctttatggatcttaaaaagctacattccttgagacgtataaatgtcactagatgtgaggaaacatttttgagaggactggatgatggtgttgtgctacccacagtccaatctctctaccttggacgatttacacctaccaaaaattatttgtcaaaattattcaaatgttttccagcactttcttctttgcatgtgatggcatcaccatcagatgaggacaacgaggaagtggtactgcattttccaccctctagctcgctgagagatgtcaacttcacagggtgtaagaatctgatcctacccatggaggaaggagctggattctgtggcctctcgtcgctcgagtcagtgaccatacacaaatgtgacagaaatatcacaatggatggattcaatcctcacatcacatccagcctcaagtatctatgcgtgtacaatgagagaaatgatggaactgatccgtattctgtagcagcagatctacttgtagcggtggtgaggaccaaaacaatgcccgacgtttccttcaaactggtgggactttatgtggacaacatctcgggagtgcttgttgctcccatctgcaagctgctctccgctaccctcgagacgttaaacttcagtaatgattggcggacagagaacttcacgaaagagcaggacgaggcgcttcagctcctcacgtctctccaattccttgagttttataactgcagggctctgcagtccctcccccaaggactgcaccgccttccttctctccacggaataactatctatgggcctcaaaacattagatcactgcctaaggagggcctccccgattcactacgaatactacgtataactaactgttgtgctgagatttatgaggcatgccagcaattgaagggaacaaggccagatataaatgtacttgcctccaaagctcgtgtgcaaaattgaatacctgcttctgcatgtcttcacagtcagctctgcttcaacatgcctttcactctacaggtaaatactgtgaaaacatcttcctatacgtgagatagttgatcttcatcgattctacagccaggatgatgtcttattggatgatgtgttggtcatggttggcacaaaattcagtagcgttcaaggcaataaacgagaacaagcatgggatgtggaaaattttagaaagtaaagacaagtgaattcttgacgacgttggcttggcaccttagtttgagtacataatgaaagaacaaccttttagcaaccctggagcatctagaaaatatcagtcatgtaactatcgttaatcatttgaaaaccactggaagacaggagatgtagcaccacaagccattcctttgatcatttgaaaaccattgcggctctttctgattatatcaaccagttgagtggatgaaagaccaaaaaatgctttggaagaagggctcacaattgtggataataaggcatccagtattatagaggaaacaaaggaaattcaaattagacggaaacctgctagtccaagttcttatatgccaaattcatcagtagatacacatacactctacaccctaatcttctttgttatgacatttattgtttttttcatgaactacgtacatcttaattttcaattcatctagaatactgaataggtgatgattcatcaccaaattgataagtgaatattaatacatctgaaacctaaaattaaatatatattatataagttgttgttaatgttcattccatttttgaacacttgcatgaattttagttctctgtttcttttgaaaaattctgtgttgcaaaaatataaatttatatgaaaatatattatatggtgatgagaagtttgagtttagtatatggtttcatattagctatacattgttggtactatcggcttgttctctttttgtttgaaaaaaatactatcggcttgttcttaaggacacataaaggactagttcggaagcaagagaattagaggagagatggctaaaatccccttcctaattaaataggaagggaatttgagcaccctcaatcccctctaattcccttgctttcaaactagcccaaagagtgtcactgcatcctctgaattatgatatattgaacatggtgttataattgtgaaccgatgagtataacttattttctccatattctgaacaacccattacttaaacagatttgcatcctactggagacattgctggcagaggaattgagactggcataggagaactcaatatatgcttgtgaataacgcatccagtgaaagatagtagattttcatcaattcactacccaggatgttgtcgcattggatgagaatgacatggaagacggcgaactagaggaagacaacaacctcatctaagctgaaaatgtgttgcctgtggttgaagaaaatctagcagatgaacaacactgccttccctgtcctctctagacctgaatctctctgatggtttggattcgtccatgattgatcctgtacgatgaaggatcagctcgtccaacgtttttcaaggaacgaactcaatctgaggaattaccttttcattggtcacctggggtactacgaggaatgacttcacgatagacgactcggttttgcgacgcaaaccaaacgccatggttaggctcagatgttggatcagatgattcctcgtggcttcgtgacgcaaaccaaacgacatggctaggctcagatgttggatcgtatgatttctcgtggcttcgtgacgcaaaccaaacagcctcatgctctagccaaaggcatgatcgtcatcgttctgaaacaaagaaaatgatgtgtattcctttcagtgagcggcctttgcatgctgcatgagatcaagcaagccgccgactggcaatgctccacctgccattcagttcgttggtgaggtattaatcaccagccatgttggcacttggcggcatgcagatggagcagaacatccaggtgaagcggacagatacatgatcgatcatgagttggcgcagacacaggccagacaaccagaggctatattccaattcatacattccatgataagcaaaggaagatccaagacaacacaaatatacaaatagttagttatacaagcaaaaatcctgttgttttgtgcctcccattttctagtccagaattaatatgacaatttttcactgaaactggttggatcagagaccaggaaaaaaagggaaatgacaactacagctgtgttttttttttcaaagaaggcagctgcccgtcgatgatgtgctcacttgaggatttcctctgccttttcagtgacactgcttcatccttttcagagtcaaatgaatctctacctcatttcactgcacatacttccaaactgatttgctgtaacatacttgagtttcggtatgacattaatttttaactcataagagaacaaaatcagaagaaaaaaaaacaacaa

SEQ ID NO: 13020 - DNA, 4452 bp, Zea Mays
gaagattgtgcctatatcgattgttctagttttgaggcaaataacatcccacggtctatccgttacctatccatttccatgcaagatcattgtgctcagaatttcgaggaacaaatgggaaaactgaaagaaaagatatacattaacaatttgcggagtttgatgatatttggaaaatacattatgttacatctgctcaatattttaagggacacatttaaggaaataagacgtcttcgtgttctatctatattcatatactcccatagttccttgccaaacaacttttcagagcttcttcatctccgctacttaaaacttttgtcaccttattactcagaaatgtcattgccaaacacggtctcaaggttttatcacctgaaatttctagatcttgaacaatggggaagtgatcgttctttgcctaaggacattagccgccttgaaaatctatgccattttgttgtttcggaaaagattgattccaatgttcctgaggtggggaaaatgatcttcttacaagaattgaaagaattccatgttaataaagagagtgttggatttgagctacaagaattgggtaaactagatgagcttggagggaagctcaatatatacgggcttgaaaatgtgagaaccaagaaagaagctaaagaggccaagctgatgtcaaagaggaatttagttgagttgggattaatttggaacatgaaacaagagtccaccgaagatgatatcctagatagtatccaaccacactctaatgttaggagtctttttattgtaaatcatggtggtaccctcggtcctagttggttgtgcagcagcgacaccatatacatgaaaaacttggagactctacatctagagagcgtatcgtgggctaaccttccacctattgggcagttctatcacttaagagagctaaggctgagtaaaattgttggcatatcacagattggacctggcttcttcgatagcacgacagaaaaaagtgtctcacacttgaaggcagttgagtttaatgatatgccagagcttgtcgagtgggttgggggagctaactggaatctgttctcaggaattgaaagaatcaagtgtactaattgtcctaggctgacagggttgctggtttcagattggtctatttcttctatataagacagcactgtatggttccctaatcttcatgacctttacatttatgaatgcccgaagttgtgccttccacccttgcctcacacttcaaaggtatcccgtattcatatgggagacttttcttatgaaggtcgtaccatgttgaaaattaataacccctctagatttgccttcgaaaatctgggtgacctagagacattggtagcttgggatgcactacccttgtcctttatggatcttaaaaagctacattccttgagacgtataaatgtcactagatgtgaggaaacatttttgagaggactggatgatggtgttgtgctacccacagtccaatctctctaccttggacgatttacacctaccaaaaattatttgtcaaaattattcaaatgttttccagcactttcttctttgcatgtgatggcatcaccatcagatgaggacaacgaggaagtggtactgcattttccaccctctagctcgctgagagatgtcaacttcacagggtgtaagaatctgatcctacccatggaggaaggagctggattctgtggcctctcgtcgctcgagtcagtgaccatacacaaatgtgacaggttattctctcgatggtccatcggaggacgagcaactcagactcagagcatcatcaaccctctcccaccctacctgaggaaactcttcctttcttatatggaaactctgcctcaggaagctctgctcatgaatttgacatctcttgagaaactcacactatgtaattgtcttggctgtgagcaaagcaccgagcgaatggctgtactcgcgaatctaacatctcttaccacgctatatttatataattgcagaaatatcacaatggatggattcaatcctcacatcacatccagcctcaagtatctatgcgtgtacaatgagagaaatgatggaactgatccgtattctgtagcagcagatctacttgtagcggtggtgaggaccaaaacaatgcccgacgtttccttcaaactggtgggactttatgtggacaacatctcgggagtgcttgttgctcccatctgcaagctgctctccgctaccctcgagacgttaaacttcagtaatgattggcggacagagaacttcacgaaagagcaggacgaggcgcttcagctcctcacgtctctccaattccttgagttttataactgcagggctctgcagtccctcccccaaggactgcaccgccttccttctctccacggaataactatctatgggcctcaaaacattagatcactgcctaaggagggcctccccgattcactacgaatactacgtataactaactgttgtgctgagatttatgaggcatgccagcaattgaagggaacaaggccagatataaatgtacttgcctccaaagctcgtgtgcaaaattgaatacctgcttctgcatgtcttcacagtcagctctgcttcaacatgcctttcactctacaggtaaatactgtgaaaacatcttcctatacgtgagatagttgatcttcatcgattctacagccaggatgatgtcttattggatgatgtgttggtcatggttggcacaaaattcagtagcgttcaaggcaataaacgagaacaagcatgggatgtggaaaattttagaaagtaaagacaagtgaattcttgacgacgttggcttggcaccttagtttgagtacataatgaaagaacaaccttttagcaaccctggagcatctagaaaatatcagtcatgtaactatcgttaatcatttgaaaaccactggaagacaggagatgtagcaccacaagccattcctttgatcatttgaaaaccattgcggctctttctgattatatcaaccagttgagtggatgaaagaccaaaaaatgctttggaagtaatggaagggctcacaattgtggataataaggcatccagtattatagaggaaacaaaggaaattcaaattagacggaaacctgctagtccaagttcttatatgccaaattcatcaatttgcatcctactggagacattgctggcagaggaattgagactggcataggagaactcaatatatgcttgtgaataacgcatccagtgaaagatagtagattttcatcaattcactacccaggatgttgtcgcattggatgagaatgacatggaagacggcgaactagaggaagacaacaacctcatctaagctgaaaatgtgttgcctgtggttgaagaaaatctagcagatgaacaacactgccttccctgtcctctctagacctgaatctctctgatggtttggattcgtccatgattgatcctgtacgatgaaggatcagctcgtccaacgtttttcaaggaacgaactcaatctgaggaattaccttttcattggtcacctggggtactacgaggaatgacttcacgatagacgactcggttttgcgacgcaaaccaaacgccatggttaggctcagatgttggatcagatgattcctcgtggcttcgtgacgcaaaccaaacgacatggctaggctcagatgttggatcgtatgatttctcgtggcttcgtgacgcaaaccaaacagcctcatgctctagccaaaggcatgatcgtcatcgttctgaaacaaagaaaatgatgtgtattcctttcagtgagcggcctttgcatgctgcatgagatcaagcaagccgccgactggcaatgctccacctgccattcagttcgttggtgaggtattaatcaccagccatgttggcacttggcggcatgcagatggagcagaacatccaggtgaagcggacagatacatgatcgatcatgagttggcgcagacacaggccagacaaccagaggctatattccaattcatacattccatgataagcaaaggaagatccaagacaacacaaatatacaaatagttagttatacaagcaaaaatcctgttgttttgtgcctcccattttctagtccagaattaatatgacaatttttcactgaaactggttggatcagagaccaggaaaaaaagggaaatgacaactacagctgtgttttttttttcaaagaaggcagctgcccgtcgatgatgtgctcacttgaggatttcctctgccttttcagtgacactgcttcatccttttcagagtcaaatgaatctctacctcatttcactgcacatacttccaaactgatttgctgtaacatacttgagtttcggtatgacattaatttttaactcataagagaacaaaatcagaagaaaaaaaaacaacaa

SEQ ID NO: 13021 - DNA, 4491 bp, Zea Mays
gaagattgtgcctatatcgattgttctagttttgaggcaaataacatcccacggtctatccgttacctatccatttccatgcaagatcattgtgctcagaatttcgaggaacaaatgggaaaactgaaagaaaagatatacattaacaatttgcggagtttgatgatatttggaaaatacattatgttacatctgctcaatattttaagggacacatttaaggaaataagacgtcttcgtgttctatctatattcatatactcccatagttccttgccaaacaacttttcagagcttcttcatctccgctacttaaaacttttgtcaccttattactcagaaatgtcattgccaaacacggtctcaaggttttatcacctgaaatttctagatcttgaacaatggggaagtgatcgttctttgcctaaggacattagccgccttgaaaatctatgccattttgttgtttcggaaaagattgattccaatgttcctgaggtggggaaaatgatcttcttacaagaattgaaagaattccatgttaataaagagagtgttggatttgagctacaagaattgggtaaactagatgagcttggagggaagctcaatatatacgggcttgaaaatgtgagaaccaagaaagaagctaaagaggccaagctgatgtcaaagaggaatttagttgagttgggattaatttggaacatgaaacaagagtccaccgaagatgatatcctagatagtatccaaccacactctaatgttaggagtctttttattgtaaatcatggtggtaccctcggtcctagttggttgtgcagcagcgacaccatatacatgaaaaacttggagactctacatctagagagcgtatcgtgggctaaccttccacctattgggcagttctatcacttaagagagctaaggctgagtaaaattgttggcatatcacagattggacctggcttcttcgatagcacgacagaaaaaagtgtctcacacttgaaggcagttgagtttaatgatatgccagagcttgtcgagtgggttgggggagctaactggaatctgttctcaggaattgaaagaatcaagtgtactaattgtcctaggctgacagggttgctggtttcagattggtctatttcttctatataagacagcactgtatggttccctaatcttcatgacctttacatttatgaatgcccgaagttgtgccttccacccttgcctcacacttcaaaggtatcccgtattcatatgggagacttttcttatgaaggtcgtaccatgttgaaaattaataacccctctagatttgccttcgaaaatctgggtgacctagagacattggtagcttgggatgcactacccttgtcctttatggatcttaaaaagctacattccttgagacgtataaatgtcactagatgtgaggaaacatttttgagaggactggatgatggtgttgtgctacccacagtccaatctctctaccttggacgatttacacctaccaaaaattatttgtcaaaattattcaaatgttttccagcactttcttctttgcatgtgatggcatcaccatcagatgaggacaacgaggaagtggtactgcattttccaccctctagctcgctgagagatgtcaacttcacagggtgtaagaatctgatcctacccatggaggaaggagctggattctgtggcctctcgtcgctcgagtcagtgaccatacacaaatgtgacaggttattctctcgatggtccatcggaggacgagcaactcagactcagagcatcatcaaccctctcccaccctacctgaggaaactcttcctttcttatatggaaactctgcctcaggaagctctgctcatgaatttgacatctcttgagaaactcacactatgtaattgtcttggctgtgagcaaagcaccgagcgaatggctgtactcgcgaatctaacatctcttaccacgctatatttatataattgcagaaatatcacaatggatggattcaatcctcacatcacatccagcctcaagtatctatgcgtgtacaatgagagaaatgatggaactgatccgtattctgtagcagcagatctacttgtagcggtggtgaggaccaaaacaatgcccgacgtttccttcaaactggtgggactttatgtggacaacatctcgggagtgcttgttgctcccatctgcaagctgctctccgctaccctcgagacgttaaacttcagtaatgattggcggacagagaacttcacgaaagagcaggacgaggcgcttcagctcctcacgtctctccaattccttgagttttataactgcagggctctgcagtccctcccccaaggactgcaccgccttccttctctccacggaataactatctatgggcctcaaaacattagatcactgcctaaggagggcctccccgattcactacgaatactacgtataactaactgttgtgctgagatttatgaggcatgccagcaattgaagggaacaaggccagatataaatgtacttgcctccaaagctcgtgtgcaaaattgaatacctgcttctgcatgtcttcacagtcagctctgcttcaacatgcctttcactctacaggtaaatactgtgaaaacatcttcctatacgtgagatagttgatcttcatcgattctacagccaggatgatgtcttattggatgatgtgttggtcatggttggcacaaaattcagtagcgttcaaggcaataaacgagaacaagcatgggatgtggaaaattttagaaagtaaagacaagtgaattcttgacgacgttggcttggcaccttagtttgagtacataatgaaagaacaaccttttagcaaccctggagcatctagaaaatatcagtcatgtaactatcgttaatcatttgaaaaccactggaagacaggagatgtagcaccacaagccattcctttgatcatttgaaaaccattgcggctctttctgattatatcaaccagttgagtggatgaaagaccaaaaaatgctttggaagaagggctcacaattgtggataataaggcatccagtattatagaggaaacaaaggaaattcaaattagacggaaacctgctagtccaagttcttatatgccaaattcatcaatttgcatcctactggagacattgctggcagaggaattgagactggcataggagaactcaatatatgcttgtgaataacgcatccagtgaaagatagtagattttcatcaattcactacccaggatgttgtcgcattggatgagaatgacatggaagacggcgaactagaggaagacaacaacctcatctaagctgaaaatgtgttgcctgtggttgaagaaaatctagcagatgaacaacactgccttccctgtcctctctagacctgaatctctctgatggtttggattcgtccatgattgatcctgtacgatgaaggatcagctcgtccaacgtttttcaaggaacgaactcaatctgaggaattaccttttcattggtcacctggggtactacgaggaatgacttcacgatagacgactcggttttgcgacgcaaaccaaacgccatggttaggctcagatgttggatcagatgattcctcgtggcttcgtgacgcaaaccaaacgacatggctaggctcagatgttggatcgtatgatttctcgtggcttcgtgacgcaaaccaaacagcctgtaagtccgcacaccttatctatcatggtcattgttgagctgatcagtaattggagtcgtgtgataagcttaatggacctcctatttgtcgtgatcttcacagatcaacaagtgagcggcctttgcatgctgcatgagatcaagcaagccgccgactggcaatgctccacctgccattcagttcgttggtgaggtattaatcaccagccatgttggcacttggcggcatgcagatggagcagaacatccaggtgaagcggacagatacatgatcgatcatgagttggcgcagacacaggccagacaaccagaggctatattccaattcatacattccatgataagcaaaggaagatccaagacaacacaaatatacaaatagttagttatacaagcaaaaatcctgttgttttgtgcctcccattttctagtccagaattaatatgacaatttttcactgaaactggttggatcagagaccaggaaaaaaagggaaatgacaactacagctgtgttttttttttcaaagaaggcagctgcccgtcgatgatgtgctcacttgaggatttcctctgccttttcagtgacactgcttcatccttttcagagtcaaatgaatctctacctcatttcactgcacatacttccaaactgatttgctgtaacatacttgagtttcggtatgacattaatttttaactcataagagaacaaaatcagaagaaaaaaaaacaacaa

SEQ ID NO: 13022 - DNA, 4194 bp, Zea Mays
gaagattgtgcctatatcgattgttctagttttgaggcaaataacatcccacggtctatccgttacctatccatttccatgcaagatcattgtgctcagaatttcgaggaacaaatgggaaaactgaaagaaaagatatacattaacaatttgcggagtttgatgatatttggaaaatacattatgttacatctgctcaatattttaagggacacatttaaggaaataagacgtcttcgtgttctatctatattcatatactcccatagttccttgccaaacaacttttcagagcttcttcatctccgctacttaaaacttttgtcaccttattactcagaaatgtcattgccaaacacggtctcaaggttttatcacctgaaatttctagatcttgaacaatggggaagtgatcgttctttgcctaaggacattagccgccttgaaaatctatgccattttgttgtttcggaaaagattgattccaatgttcctgaggtggggaaaatgatcttcttacaagaattgaaagaattccatgttaataaagagagtgttggatttgagctacaagaattgggtaaactagatgagcttggagggaagctcaatatatacgggcttgaaaatgtgagaaccaagaaagaagctaaagaggccaagctgatgtcaaagaggaatttagttgagttgggattaatttggaacatgaaacaagagtccaccgaagatgatatcctagatagtatccaaccacactctaatgttaggagtctttttattgtaaatcatggtggtaccctcggtcctagttggttgtgcagcagcgacaccatatacatgaaaaacttggagactctacatctagagagcgtatcgtgggctaaccttccacctattgggcagttctatcacttaagagagctaaggctgagtaaaattgttggcatatcacagattggacctggcttcttcgatagcacgacagaaaaaagtgtctcacacttgaaggcagttgagtttaatgatatgccagagcttgtcgagtgggttgggggagctaactggaatctgttctcaggaattgaaagaatcaagtgtactaattgtcctaggctgacagggttgctggtttcagattggtctatttcttctatataagacagcactgtatggttccctaatcttcatgacctttacatttatgaatgcccgaagttgtgccttccacccttgcctcacacttcaaaggtatcccgtattcatatgggagacttttcttatgaaggtcgtaccatgttgaaaattaataacccctctagatttgccttcgaaaatctgggtgacctagagacattggtagcttgggatgcactacccttgtcctttatggatcttaaaaagctacattccttgagacgtataaatgtcactagatgtgaggaaacatttttgagaggactggatgatggtgttgtgctacccacagtccaatctctctaccttggacgatttacacctaccaaaaattatttgtcaaaattattcaaatgttttccagcactttcttctttgcatgtgatggcatcaccatcagatgaggacaacgaggaagtggtactgcattttccaccctctagctcgctgagagatgtcaacttcacagggtgtaagaatctgatcctacccatggaggaaggagctggattctgtggcctctcgtcgctcgagtcagtgaccatacacaaatgtgacagaaatatcacaatggatggattcaatcctcacatcacatccagcctcaagtatctatgcgtgtacaatgagagaaatgatggaactgatccgtattctgtagcagcagatctacttgtagcggtggtgaggaccaaaacaatgcccgacgtttccttcaaactggtgggactttatgtggacaacatctcgggagtgcttgttgctcccatctgcaagctgctctccgctaccctcgagacgttaaacttcagtaatgattggcggacagagaacttcacgaaagagcaggacgaggcgcttcagctcctcacgtctctccaattccttgagttttataactgcagggctctgcagtccctcccccaaggactgcaccgccttccttctctccacggaataactatctatgggcctcaaaacattagatcactgcctaaggagggcctccccgattcactacgaatactacgtataactaactgttgtgctgagatttatgaggcatgccagcaattgaagggaacaaggccagatataaatgtacttgcctccaaagctcgtgtgcaaaattgaatacctgcttctgcatgtcttcacagtcagctctgcttcaacatgcctttcactctacaggtaaatactgtgaaaacatcttcctatacgtgagatagttgatcttcatcgattctacagccaggatgatgtcttattggatgatgtgttggtcatggttggcacaaaattcagtagcgttcaaggcaataaacgagaacaagcatgggatgtggaaaattttagaaagtaaagacaagtgaattcttgacgacgttggcttggcaccttagtttgagtacataatgaaagaacaaccttttagcaaccctggagcatctagaaaatatcagtcatgtaactatcgttaatcatttgaaaaccactggaagacaggagatgtagcaccacaagccattcctttgatcatttgaaaaccattgcggctctttctgattatatcaaccagttgagtggatgaaagaccaaaaaatgctttggaagaagggctcacaattgtggataataaggcatccagtattatagaggaaacaaaggaaattcaaattagacggaaacctgctagtccaagttcttatatgccaaattcatcaatttgcatcctactggagacattgctggcagaggaattgagactggcataggagaactcaatatatgcttgtgaataacgcatccagtgaaagatagtagattttcatcaattcactacccaggatgttgtcgcattggatgagaatgacatggaagacggcgaactagaggaagacaacaacctcatctaagctgaaaatgtgttgcctgtggttgaagaaaatctagcagatgaacaacactgccttccctgtcctctctagacctgaatctctctgatggtttggattcgtccatgattgatcctgtacgatgaaggatcagctcgtccaacgtttttcaaggaacgaactcaatctgaggaattaccttttcattggtcacctggggtactacgaggaatgacttcacgatagacgactcggttttgcgacgcaaaccaaacgccatggttaggctcagatgttggatcagatgattcctcgtggcttcgtgacgcaaaccaaacgacatggctaggctcagatgttggatcgtatgatttctcgtggcttcgtgacgcaaaccaaacagcctcatgctctagccaaaggcatgatcgtcatcgttctgaaacaaagaaaatgatgtgtattcctttcagtgagcggcctttgcatgctgcatgagatcaagcaagccgccgactggcaatgctccacctgccattcagttcgttggtgaggtattaatcaccagccatgttggcacttggcggcatgcagatggagcagaacatccaggtgaagcggacagatacatgatcgatcatgagttggcgcagacacaggccagacaaccagaggctatattccaattcatacattccatgataagcaaaggaagatccaagacaacacaaatatacaaatagttagttatacaagcaaaaatcctgttgttttgtgcctcccattttctagtccagaattaatatgacaatttttcactgaaactggttggatcagagaccaggaaaaaaagggaaatgacaactacagctgtgttttttttttcaaagaaggcagctgcccgtcgatgatgtgctcacttgaggatttcctctgccttttcagtgacactgcttcatccttttcagagtcaaatgaatctctacctcatttcactgcacatacttccaaactgatttgctgtaacatacttgagtttcggtatgacattaatttttaactcataagagaacaaaatcagaagaaaaaaaaacaacaa

SEQ ID NO: 13023 - DNA, 5106 bp, Zea Mays
gaagattgtgcctatatcgattgttctagttttgaggcaaataacatcccacggtctatccgttacctatccatttccatgcaagatcattgtgctcagaatttcgaggaacaaatgggaaaactgaaagaaaagatatacattaacaatttgcggagtttgatgatatttggaaaatacattatgttacatctgctcaatattttaagggacacatttaaggaaataagacgtcttcgtgttctatctatattcatatactcccatagttccttgccaaacaacttttcagagcttcttcatctccgctacttaaaacttttgtcaccttattactcagaaatgtcattgccaaacacggtctcaaggttttatcacctgaaatttctagatcttgaacaatggggaagtgatcgttctttgcctaaggacattagccgccttgaaaatctatgccattttgttgtttcggaaaagattgattccaatgttcctgaggtggggaaaatgatcttcttacaagaattgaaagaattccatgttaataaagagagtgttggatttgagctacaagaattgggtaaactagatgagcttggagggaagctcaatatatacgggcttgaaaatgtgagaaccaagaaagaagctaaagaggccaagctgatgtcaaagaggaatttagttgagttgggattaatttggaacatgaaacaagagtccaccgaagatgatatcctagatagtatccaaccacactctaatgttaggagtctttttattgtaaatcatggtggtaccctcggtcctagttggttgtgcagcagcgacaccatatacatgaaaaacttggagactctacatctagagagcgtatcgtgggctaaccttccacctattgggcagttctatcacttaagagagctaaggctgagtaaaattgttggcatatcacagattggacctggcttcttcgatagcacgacagaaaaaagtgtctcacacttgaaggcagttgagtttaatgatatgccagagcttgtcgagtgggttgggggagctaactggaatctgttctcaggaattgaaagaatcaagtgtactaattgtcctaggctgacagggttgctggtttcagattggtctatttcttctatataagacagcactgtatggttccctaatcttcatgacctttacatttatgaatgcccgaagttgtgccttccacccttgcctcacacttcaaaggtatcccgtattcatatgggagacttttcttatgaaggtcgtaccatgttgaaaattaataacccctctagatttgccttcgaaaatctgggtgacctagagacattggtagcttgggatgcactacccttgtcctttatggatcttaaaaagctacattccttgagacgtataaatgtcactagatgtgaggaaacatttttgagaggactggatgatggtgttgtgctacccacagtccaatctctctaccttggacgatttacacctaccaaaaattatttgtcaaaattattcaaatgttttccagcactttcttctttgcatgtgatggcatcaccatcagatgaggacaacgaggaagtggtactgcattttccaccctctagctcgctgagagatgtcaacttcacagggtgtaagaatctgatcctacccatggaggaaggagctggattctgtggcctctcgtcgctcgagtcagtgaccatacacaaatgtgacaggttattctctcgatggtccatcggaggacgagcaactcagactcagagcatcatcaaccctctcccaccctacctgaggaaactcttcctttcttatatggaaactctgcctcaggaagctctgctcatgaatttgacatctcttgagaaactcacactatgtaattgtcttggctgtgagcaaagcaccgagcgaatggctgtactcgcgaatctaacatctcttaccacgctatatttatataattgcagaaatatcacaatggatggattcaatcctcacatcacatccagcctcaagtatctatgcgtgtacaatgagagaaatgatggaactgatccgtattctgtagcagcagatctacttgtagcggtggtgaggaccaaaacaatgcccgacgtttccttcaaactggtgggactttatgtggacaacatctcgggagtgcttgttgctcccatctgcaagctgctctccgctaccctcgagacgttaaacttcagtaatgattggcggacagagaacttcacgaaagagcaggacgaggcgcttcagctcctcacgtctctccaattccttgagttttataactgcagggctctgcagtccctcccccaaggactgcaccgccttccttctctccacggaataactatctatgggcctcaaaacattagatcactgcctaaggagggcctccccgattcactacgaatactacgtataactaactgttgtgctgagatttatgaggcatgccagcaattgaagggaacaaggccagatataaatgtacttgcctccaaagctcgtgtgcaaaattgaatacctgcttctgcatgtcttcacagtcagctctgcttcaacatgcctttcactctacaggtaaatactgtgaaaacatcttcctatacgtgagatagttgatcttcatcgattctacagccaggatgatgtcttattggatgatgtgttggtcatggttggcacaaaattcagtagcgttcaaggcaataaacgagaacaagcatgggatgtggaaaattttagaaagtaaagacaagtgaattcttgacgacgttggcttggcaccttagtttgagtacataatgaaagaacaaccttttagcaaccctggagcatctagaaaatatcagtcatgtaactatcgttaatcatttgaaaaccactggaagacaggagatgtagcaccacaagccattcctttgatcatttgaaaaccattgcggctctttctgattatatcaaccagaagggctcacaattgtggataataaggcatccagtattatagaggaaacaaaggaaattcaaattagacggaaacctgctagtccaagttcttatatgccaaattcatcagtagatacacatacactctacaccctaatcttctttgttatgacatttattgtttttttcatgaactacgtacatcttaattttcaattcatctagaatactgaataggtgatgattcatcaccaaattgataagtgaatattaatacatctgaaacctaaaattaaatatatattatataagttgttgttaatgttcattccatttttgaacacttgcatgaattttagttctctgtttcttttgaaaaattctgtgttgcaaaaatataaatttatatgaaaatatattatatggtgatgagaagtttgagtttagtatatggtttcatattagctatacattgttggtactatcggcttgttctctttttgtttgaaaaaaatactatcggcttgttcttaaggacacataaaggactagttcggaagcaagagaattagaggagagatggctaaaatccccttcctaattaaataggaagggaatttgagcaccctcaatcccctctaattcccttgctttcaaactagcccaaagagtgtcactgcatcctctgaattatgatatattgaacatggtgttataattgtgaaccgatgagtataacttattttctccatattctgaacaacccattacttaaacagatttgcatcctactggagacattgctggcagaggaattgagactggcataggagaactcaatatatgcttgtgaataacgcatccagtgaaagatagtagattttcatcaattcactacccaggatgttgtcgcattggatgagaatgacatggaagacggcgaactagaggaagacaacaacctcatctaagctgaaaatgtgttgcctgtggttgaagaaaatctagcagatgaacaacactgccttccctgtcctctctagacctgaatctctctgatggtttggattcgtccatgattgatcctgtacgatgaaggatcagctcgtccaacgtttttcaaggaacgaactcaatctgaggaattaccttttcattggtcacctggggtactacgaggaatgacttcacgatagacgactcggttttgcgacgcaaaccaaacgccatggttaggctcagatgttggatcagatgattcctcgtggcttcgtgacgcaaaccaaacgacatggctaggctcagatgttggatcgtatgatttctcgtggcttcgtgacgcaaaccaaacagcctgtaagtccgcacaccttatctatcatggtcattgttgagctgatcagtaattggagtcgtgtgataagcttaatggacctcctatttgtcgtgatcttcacagatcaacaagtgagcggcctttgcatgctgcatgagatcaagcaagccgccgactggcaatgctccacctgccattcagttcgttggtgaggtattaatcaccagccatgttggcacttggcggcatgcagatggagcagaacatccaggtgaagcggacagatacatgatcgatcatgagttggcgcagacacaggccagacaaccagaggctatattccaattcatacattccatgataagcaaaggaagatccaagacaacacaaatatacaaatagttagttatacaagcaaaaatcctgttgttttgtgcctcccattttctagtccagaattaatatgacaatttttcactgaaactggttggatcagagaccaggaaaaaaagggaaatgacaactacagctgtgttttttttttcaaagaaggcagctgcccgtcgatgatgtgctcacttgaggatttcctctgccttttcagtgacactgcttcatccttttcagagtcaaatgaatctctacctcatttcactgcacatacttccaaactgatttgctgtaacatacttgagtttcggtatgacattaatttttaactcataagagaacaaaatcagaagaaaaaaaaacaacaa

SEQ ID NO: 13024 - DNA, 5054 bp, Zea Mays
gaagattgtgcctatatcgattgttctagttttgaggcaaataacatcccacggtctatccgttacctatccatttccatgcaagatcattgtgctcagaatttcgaggaacaaatgggaaaactgaaagaaaagatatacattaacaatttgcggagtttgatgatatttggaaaatacattatgttacatctgctcaatattttaagggacacatttaaggaaataagacgtcttcgtgttctatctatattcatatactcccatagttccttgccaaacaacttttcagagcttcttcatctccgctacttaaaacttttgtcaccttattactcagaaatgtcattgccaaacacggtctcaaggttttatcacctgaaatttctagatcttgaacaatggggaagtgatcgttctttgcctaaggacattagccgccttgaaaatctatgccattttgttgtttcggaaaagattgattccaatgttcctgaggtggggaaaatgatcttcttacaagaattgaaagaattccatgttaataaagagagtgttggatttgagctacaagaattgggtaaactagatgagcttggagggaagctcaatatatacgggcttgaaaatgtgagaaccaagaaagaagctaaagaggccaagctgatgtcaaagaggaatttagttgagttgggattaatttggaacatgaaacaagagtccaccgaagatgatatcctagatagtatccaaccacactctaatgttaggagtctttttattgtaaatcatggtggtaccctcggtcctagttggttgtgcagcagcgacaccatatacatgaaaaacttggagactctacatctagagagcgtatcgtgggctaaccttccacctattgggcagttctatcacttaagagagctaaggctgagtaaaattgttggcatatcacagattggacctggcttcttcgatagcacgacagaaaaaagtgtctcacacttgaaggcagttgagtttaatgatatgccagagcttgtcgagtgggttgggggagctaactggaatctgttctcaggaattgaaagaatcaagtgtactaattgtcctaggctgacagggttgctgttgtgccttccacccttgcctcacacttcaaaggtatcccgtattcatatgggagacttttcttatgaaggtcgtaccatgttgaaaattaataacccctctagatttgccttcgaaaatctgggtgacctagagacattggtagcttgggatgcactacccttgtcctttatggatcttaaaaagctacattccttgagacgtataaatgtcactagatgtgaggaaacatttttgagaggactggatgatggtgttgtgctacccacagtccaatctctctaccttggacgatttacacctaccaaaaattatttgtcaaaattattcaaatgttttccagcactttcttctttgcatgtgatggcatcaccatcagatgaggacaacgaggaagtggtactgcattttccaccctctagctcgctgagagatgtcaacttcacagggtgtaagaatctgatcctacccatggaggaaggagctggattctgtggcctctcgtcgctcgagtcagtgaccatacacaaatgtgacaggttattctctcgatggtccatcggaggacgagcaactcagactcagagcatcatcaaccctctcccaccctacctgaggaaactcttcctttcttatatggaaactctgcctcaggaagctctgctcatgaatttgacatctcttgagaaactcacactatgtaattgtcttggctgtgagcaaagcaccgagcgaatggctgtactcgcgaatctaacatctcttaccacgctatatttatataattgcagaaatatcacaatggatggattcaatcctcacatcacatccagcctcaagtatctatgcgtgtacaatgagagaaatgatggaactgatccgtattctgtagcagcagatctacttgtagcggtggtgaggaccaaaacaatgcccgacgtttccttcaaactggtgggactttatgtggacaacatctcgggagtgcttgttgctcccatctgcaagctgctctccgctaccctcgagacgttaaacttcagtaatgattggcggacagagaacttcacgaaagagcaggacgaggcgcttcagctcctcacgtctctccaattccttgagttttataactgcagggctctgcagtccctcccccaaggactgcaccgccttccttctctccacggaataactatctatgggcctcaaaacattagatcactgcctaaggagggcctccccgattcactacgaatactacgtataactaactgttgtgctgagatttatgaggcatgccagcaattgaagggaacaaggccagatataaatgtacttgcctccaaagctcgtgtgcaaaattgaatacctgcttctgcatgtcttcacagtcagctctgcttcaacatgcctttcactctacaggtaaatactgtgaaaacatcttcctatacgtgagatagttgatcttcatcgattctacagccaggatgatgtcttattggatgatgtgttggtcatggttggcacaaaattcagtagcgttcaaggcaataaacgagaacaagcatgggatgtggaaaattttagaaagtaaagacaagtgaattcttgacgacgttggcttggcaccttagtttgagtacataatgaaagaacaaccttttagcaaccctggagcatctagaaaatatcagtcatgtaactatcgttaatcatttgaaaaccactggaagacaggagatgtagcaccacaagccattcctttgatcatttgaaaaccattgcggctctttctgattatatcaaccagttgagtggatgaaagaccaaaaaatgctttggaagaagggctcacaattgtggataataaggcatccagtattatagaggaaacaaaggaaattcaaattagacggaaacctgctagtccaagttcttatatgccaaattcatcagtagatacacatacactctacaccctaatcttctttgttatgacatttattgtttttttcatgaactacgtacatcttaattttcaattcatctagaatactgaataggtgatgattcatcaccaaattgataagtgaatattaatacatctgaaacctaaaattaaatatatattatataagttgttgttaatgttcattccatttttgaacacttgcatgaattttagttctctgtttcttttgaaaaattctgtgttgcaaaaatataaatttatatgaaaatatattatatggtgatgagaagtttgagtttagtatatggtttcatattagctatacattgttggtactatcggcttgttctctttttgtttgaaaaaaatactatcggcttgttcttaaggacacataaaggactagttcggaagcaagagaattagaggagagatggctaaaatccccttcctaattaaataggaagggaatttgagcaccctcaatcccctctaattcccttgctttcaaactagcccaaagagtgtcactgcatcctctgaattatgatatattgaacatggtgttataattgtgaaccgatgagtataacttattttctccatattctgaacaacccattacttaaacagatttgcatcctactggagacattgctggcagaggaattgagactggcataggagaactcaatatatgcttgtgaataacgcatccagtgaaagatagtagattttcatcaattcactacccaggatgttgtcgcattggatgagaatgacatggaagacggcgaactagaggaagacaacaacctcatctaagctgaaaatgtgttgcctgtggttgaagaaaatctagcagatgaacaacactgccttccctgtcctctctagacctgaatctctctgatggtttggattcgtccatgattgatcctgtacgatgaaggatcagctcgtccaacgtttttcaaggaacgaactcaatctgaggaattaccttttcattggtcacctggggtactacgaggaatgacttcacgatagacgactcggttttgcgacgcaaaccaaacgccatggttaggctcagatgttggatcagatgattcctcgtggcttcgtgacgcaaaccaaacgacatggctaggctcagatgttggatcgtatgatttctcgtggcttcgtgacgcaaaccaaacagcctgtaagtccgcacaccttatctatcatggtcattgttgagctgatcagtaattggagtcgtgtgataagcttaatggacctcctatttgtcgtgatcttcacagatcaacaagtgagcggcctttgcatgctgcatgagatcaagcaagccgccgactggcaatgctccacctgccattcagttcgttggtgaggtattaatcaccagccatgttggcacttggcggcatgcagatggagcagaacatccaggtgaagcggacagatacatgatcgatcatgagttggcgcagacacaggccagacaaccagaggctatattccaattcatacattccatgataagcaaaggaagatccaagacaacacaaatatacaaatagttagttatacaagcaaaaatcctgttgttttgtgcctcccattttctagtccagaattaatatgacaatttttcactgaaactggttggatcagagaccaggaaaaaaagggaaatgacaactacagctgtgttttttttttcaaagaaggcagctgcccgtcgatgatgtgctcacttgaggatttcctctgccttttcagtgacactgcttcatccttttcagagtcaaatgaatctctacctcatttcactgcacatacttccaaactgatttgctgtaacatacttgagtttcggtatgacattaatttttaactcataagagaacaaaatcagaagaaaaaaaaacaacaa

SEQ ID NO: 13025 - DNA, 4360 bp, Zea Mays
aagattgtgcctatatcgattgttctagttttgaggcaaataacatcccacggtctatccgttacctatccatttccatgcaagatcattgtgctcagaatttcgaggaacaaatgggaaaactgaaagaaaagatatacattaacaatttgcggagtttgatgatatttggaaaatacattatgttacatctgctcaatattttaagggacacatttaaggaaataagacgtcttcgtgttctatctatattcatatactcccatagttccttgccaaacaacttttcagagcttcttcatctccgctacttaaaacttttgtcaccttattactcagaaatgtcattgccaaacacggtctcaaggttttatcacctgaaatttctagatcttgaacaatggggaagtgatcgttctttgcctaaggacattagccgccttgaaaatctatgccattttgttgtttcggaaaagattgattccaatgttcctgaggtggggaaaatgatcttcttacaagaattgaaagaattccatgttaataaagagagtgttggatttgagctacaagaattgggtaaactagatgagcttggagggaagctcaatatatacgggcttgaaaatgtgagaaccaagaaagaagctaaagaggccaagctgatgtcaaagaggaatttagttgagttgggattaatttggaacatgaaacaagagtccaccgaagatgatatcctagatagtatccaaccacactctaatgttaggagtctttttattgtaaatcatggtggtaccctcggtcctagttggttgtgcagcagcgacaccatatacatgaaaaacttggagactctacatctagagagcgtatcgtgggctaaccttccacctattgggcagttctatcacttaagagagctaaggctgagtaaaattgttggcatatcacagattggacctggcttcttcgatagcacgacagaaaaaagtgtctcacacttgaaggcagttgagtttaatgatatgccagagcttgtcgagtgggttgggggagctaactggaatctgttctcaggaattgaaagaatcaagtgtactaattgtcctaggctgacagggttgctgttgtgccttccacccttgcctcacacttcaaaggtatcccgtattcatatgggagacttttcttatgaaggtcgtaccatgttgaaaattaataacccctctagatttgccttcgaaaatctgggtgacctagagacattggtagcttgggatgcactacccttgtcctttatggatcttaaaaagctacattccttgagacgtataaatgtcactagatgtgaggaaacatttttgagaggactggatgatggtgttgtgctacccacagtccaatctctctaccttggacgatttacacctaccaaaaattatttgtcaaaattattcaaatgttttccagcactttcttctttgcatgtgatggcatcaccatcagatgaggacaacgaggaagtggtactgcattttccaccctctagctcgctgagagatgtcaacttcacagggtgtaagaatctgatcctacccatggaggaaggagctggattctgtggcctctcgtcgctcgagtcagtgaccatacacaaatgtgacaggttattctctcgatggtccatcggaggacgagcaactcagactcagagcatcatcaaccctctcccaccctacctgaggaaactcttcctttcttatatggaaactctgcctcaggaagctctgctcatgaatttgacatctcttgagaaactcacactatgtaattgtcttggctgtgagcaaagcaccgagcgaatggctgtactcgcgaatctaacatctcttaccacgctatatttatataattgcagaaatatcacaatggatggattcaatcctcacatcacatccagcctcaagtatctatgcgtgtacaatgagagaaatgatggaactgatccgtattctgtagcagcagatctacttgtagcggtggtgaggaccaaaacaatgcccgacgtttccttcaaactggtgggactttatgtggacaacatctcgggagtgcttgttgctcccatctgcaagctgctctccgctaccctcgagacgttaaacttcagtaatgattggcggacagagaacttcacgaaagagcaggacgaggcgcttcagctcctcacgtctctccaattccttgagttttataactgcagggctctgcagtccctcccccaaggactgcaccgccttccttctctccacggaataactatctatgggcctcaaaacattagatcactgcctaaggagggcctccccgattcactacgaatactacgtataactaactgttgtgctgagatttatgaggcatgccagcaattgaagggaacaaggccagatataaatgtacttgcctccaaagctcgtgtgcaaaattgaatacctgcttctgcatgtcttcacagtcagctctgcttcaacatgcctttcactctacaggtaaatactgtgaaaacatcttcctatacgtgagatagttgatcttcatcgattctacagccaggatgatgtcttattggatgatgtgttggtcatggttggcacaaaattcacgttcaaggcaataaacgagaacaagcatgggatgtggaaaattttagaaagtaaagacaagtgaattcttgacgacgttggcttggcaccttagtttgagtacataatgaaagaacaaccttttagcaaccctggagcatctagaaaatatcagacaggagatgtagcaccacaagccattcctttgatcatttgaaaaccattgcggctctttctgattatatcaaccagttgagtggatgaaagaccaaaaaatgctttggaagaagggctcacaattgtggataataaggcatccagtattatagaggaaacaaaggaaattcaaattagacggaaacctgctagtccaagttcttatatgccaaattcatcaatttgcatcctactggagacattgctggcagaggaattgagactggcataggagaactcaatatatgcttgtgaataacgcatccagtgaaagatagtagattttcatcaattcactacccaggatgttgtcgcattggatgagaatgacatggaagacggcgaactagaggaagacaacaacctcatctaagctgaaaatgtgttgcctgtggttgaagaaaatctagcagatgaacaacactgccttccctgtcctctctagacctgaatctctctgatggtttggattcgtccatgattgatcctgtacgatgaaggatcagctcgtccaacgtttttcaaggaacgaactcaatctgaggaattaccttttcattggtcacctggggtactacgaggaatgacttcacgatagacgactcggttttgcgacgcaaaccaaacgccatggttaggctcagatgttggatcagatgattcctcgtggcttcgtgacgcaaaccaaacgacatggctaggctcagatgttggatcgtatgatttctcgtggcttcgtgacgcaaaccaaacagcctgtaagtccgcacaccttatctatcatggtcattgttgagctgatcagtaattggagtcgtgtgataagcttaatggacctcctatttgtcgtgatcttcacagatcaacaagtgagcggcctttgcatgctgcatgagatcaagcaagccgccgactggcaatgctccacctgccattcagttcgttggtgaggtattaatcaccagccatgttggcacttggcggcatgcagatggagcagaacatccaggtgaagcggacagatacatgatcgatcatgagttggcgcagacacaggccagacaaccagaggctatattccaattcatacattccatgataagcaaaggaagatccaagacaacacaaatatacaaatagttagttatacaagcaaaaatcctgttgttttgtgcctcccattttctagtccagaattaatatgacaatttttcactgaaactggttggatcagagaccaggaaaaaaagggaaatgacaactacagctgtgttttttttttcaaagaaggcagctgcccgtcgatgatgtgctcacttgaggatttcctctgccttttcagtgacactgcttcatccttttcagagtcaaatgaatctctacctcatttcactgcacatacttccaaactgatttgctgtaacatacttgagtttcggtatgacattaatttttaactcataagagaacaaaatcagaagaaaaaaaaacaacaa

SEQ ID NO: 13026 - DNA, 4249 bp, Zea Mays
aagattgtgcctatatcgattgttctagttttgaggcaaataacatcccacggtctatccgttacctatccatttccatgcaagatcattgtgctcagaatttcgaggaacaaatgggaaaactgaaagaaaagatatacattaacaatttgcggagtttgatgatatttggaaaatacattatgttacatctgctcaatattttaagggacacatttaaggaaataagacgtcttcgtgttctatctatattcatatactcccatagttccttgccaaacaacttttcagagcttcttcatctccgctacttaaaacttttgtcaccttattactcagaaatgtcattgccaaacacggtctcaaggttttatcacctgaaatttctagatcttgaacaatggggaagtgatcgttctttgcctaaggacattagccgccttgaaaatctatgccattttgttgtttcggaaaagattgattccaatgttcctgaggtggggaaaatgatcttcttacaagaattgaaagaattccatgttaataaagagagtgttggatttgagctacaagaattgggtaaactagatgagcttggagggaagctcaatatatacgggcttgaaaatgtgagaaccaagaaagaagctaaagaggccaagctgatgtcaaagaggaatttagttgagttgggattaatttggaacatgaaacaagagtccaccgaagatgatatcctagatagtatccaaccacactctaatgttaggagtctttttattgtaaatcatggtggtaccctcggtcctagttggttgtgcagcagcgacaccatatacatgaaaaacttggagactctacatctagagagcgtatcgtgggctaaccttccacctattgggcagttctatcacttaagagagctaaggctgagtaaaattgttggcatatcacagattggacctggcttcttcgatagcacgacagaaaaaagtgtctcacacttgaaggcagttgagtttaatgatatgccagagcttgtcgagtgggttgggggagctaactggaatctgttctcaggaattgaaagaatcaagtgtactaattgtcctaggctgacagggttgctgttgtgccttccacccttgcctcacacttcaaaggtatcccgtattcatatgggagacttttcttatgaaggtcgtaccatgttgaaaattaataacccctctagatttgccttcgaaaatctgggtgacctagagacattggtagcttgggatgcactacccttgtcctttatggatcttaaaaagctacattccttgagacgtataaatgtcactagatgtgaggaaacatttttgagaggactggatgatggtgttgtgctacccacagtccaatctctctaccttggacgatttacacctaccaaaaattatttgtcaaaattattcaaatgttttccagcactttcttctttgcatgtgatggcatcaccatcagatgaggacaacgaggaagtggtactgcattttccaccctctagctcgctgagagatgtcaacttcacagggtgtaagaatctgatcctacccatggaggaaggagctggattctgtggcctctcgtcgctcgagtcagtgaccatacacaaatgtgacaggttattctctcgatggtccatcggaggacgagcaactcagactcagagcatcatcaaccctctcccaccctacctgaggaaactcttcctttcttatatggaaactctgcctcaggaagctctgctcatgaatttgacatctcttgagaaactcacactatgtaattgtcttggctgtgagcaaagcaccgagcgaatggctgtactcgcgaatctaacatctcttaccacgctatatttatataattgcagaaatatcacaatggatggattcaatcctcacatcacatccagcctcaagtatctatgcgtgtacaatgagagaaatgatggaactgatccgtattctgtagcagcagatctacttgtagcggtggtgaggaccaaaacaatgcccgacgtttccttcaaactggtgggactttatgtggacaacatctcgggagtgcttgttgctcccatctgcaagctgctctccgctaccctcgagacgttaaacttcagtaatgattggcggacagagaacttcacgaaagagcaggacgaggcgcttcagctcctcacgtctctccaattccttgagttttataactgcagggctctgcagtccctcccccaaggactgcaccgccttccttctctccacggaataactatctatgggcctcaaaacattagatcactgcctaaggagggcctccccgattcactacgaatactacgtataactaactgttgtgctgagatttatgaggcatgccagcaattgaagggaacaaggccagatataaatgtacttgcctccaaagctcgtgtgcaaaattgaatacctgcttctgcatgtcttcacagtcagctctgcttcaacatgcctttcactctacaggtaaatactgtgaaaacatcttcctatacgtgagatagttgatcttcatcgattctacagccaggatgatgtcttattggatgatgtgttggtcatggttggcacaaaattcacgttcaaggcaataaacgagaacaagcatgggatgtggaaaattttagaaagtaaagacaagtgaattcttgacgacgttggcttggcaccttagtttgagtacataatgaaagaacaaccttttagcaaccctggagcatctagaaaatatcaggaagggctcacaattgtggataataaggcatccagtattatagaggaaacaaaggaaattcaaattagacggaaacctgctagtccaagttcttatatgccaaattcatcaatttgcatcctactggagacattgctggcagaggaattgagactggcataggagaactcaatatatgcttgtgaataacgcatccagtgaaagatagtagattttcatcaattcactacccaggatgttgtcgcattggatgagaatgacatggaagacggcgaactagaggaagacaacaacctcatctaagctgaaaatgtgttgcctgtggttgaagaaaatctagcagatgaacaacactgccttccctgtcctctctagacctgaatctctctgatggtttggattcgtccatgattgatcctgtacgatgaaggatcagctcgtccaacgtttttcaaggaacgaactcaatctgaggaattaccttttcattggtcacctggggtactacgaggaatgacttcacgatagacgactcggttttgcgacgcaaaccaaacgccatggttaggctcagatgttggatcagatgattcctcgtggcttcgtgacgcaaaccaaacgacatggctaggctcagatgttggatcgtatgatttctcgtggcttcgtgacgcaaaccaaacagcctgtaagtccgcacaccttatctatcatggtcattgttgagctgatcagtaattggagtcgtgtgataagcttaatggacctcctatttgtcgtgatcttcacagatcaacaagtgagcggcctttgcatgctgcatgagatcaagcaagccgccgactggcaatgctccacctgccattcagttcgttggtgaggtattaatcaccagccatgttggcacttggcggcatgcagatggagcagaacatccaggtgaagcggacagatacatgatcgatcatgagttggcgcagacacaggccagacaaccagaggctatattccaattcatacattccatgataagcaaaggaagatccaagacaacacaaatatacaaatagttagttatacaagcaaaaatcctgttgttttgtgcctcccattttctagtccagaattaatatgacaatttttcactgaaactggttggatcagagaccaggaaaaaaagggaaatgacaactacagctgtgttttttttttcaaagaaggcagctgcccgtcgatgatgtgctcacttgaggatttcctctgccttttcagtgacactgcttcatccttttcagagtcaaatgaatctctacctcatttcactgcacatacttccaaactgatttgctgtaacatacttgagtttcggtatgacattaatttttaactcataagagaacaaaatcagaagaaaaaaaaacaacaa

SEQ ID NO: 13027 - DNA, 4399 bp, Zea Mays
aagattgtgcctatatcgattgttctagttttgaggcaaataacatcccacggtctatccgttacctatccatttccatgcaagatcattgtgctcagaatttcgaggaacaaatgggaaaactgaaagaaaagatatacattaacaatttgcggagtttgatgatatttggaaaatacattatgttacatctgctcaatattttaagggacacatttaaggaaataagacgtcttcgtgttctatctatattcatatactcccatagttccttgccaaacaacttttcagagcttcttcatctccgctacttaaaacttttgtcaccttattactcagaaatgtcattgccaaacacggtctcaaggttttatcacctgaaatttctagatcttgaacaatggggaagtgatcgttctttgcctaaggacattagccgccttgaaaatctatgccattttgttgtttcggaaaagattgattccaatgttcctgaggtggggaaaatgatcttcttacaagaattgaaagaattccatgttaataaagagagtgttggatttgagctacaagaattgggtaaactagatgagcttggagggaagctcaatatatacgggcttgaaaatgtgagaaccaagaaagaagctaaagaggccaagctgatgtcaaagaggaatttagttgagttgggattaatttggaacatgaaacaagagtccaccgaagatgatatcctagatagtatccaaccacactctaatgttaggagtctttttattgtaaatcatggtggtaccctcggtcctagttggttgtgcagcagcgacaccatatacatgaaaaacttggagactctacatctagagagcgtatcgtgggctaaccttccacctattgggcagttctatcacttaagagagctaaggctgagtaaaattgttggcatatcacagattggacctggcttcttcgatagcacgacagaaaaaagtgtctcacacttgaaggcagttgagtttaatgatatgccagagcttgtcgagtgggttgggggagctaactggaatctgttctcaggaattgaaagaatcaagtgtactaattgtcctaggctgacagggttgctgttgtgccttccacccttgcctcacacttcaaaggtatcccgtattcatatgggagacttttcttatgaaggtcgtaccatgttgaaaattaataacccctctagatttgccttcgaaaatctgggtgacctagagacattggtagcttgggatgcactacccttgtcctttatggatcttaaaaagctacattccttgagacgtataaatgtcactagatgtgaggaaacatttttgagaggactggatgatggtgttgtgctacccacagtccaatctctctaccttggacgatttacacctaccaaaaattatttgtcaaaattattcaaatgttttccagcactttcttctttgcatgtgatggcatcaccatcagatgaggacaacgaggaagtggtactgcattttccaccctctagctcgctgagagatgtcaacttcacagggtgtaagaatctgatcctacccatggaggaaggagctggattctgtggcctctcgtcgctcgagtcagtgaccatacacaaatgtgacaggttattctctcgatggtccatcggaggacgagcaactcagactcagagcatcatcaaccctctcccaccctacctgaggaaactcttcctttcttatatggaaactctgcctcaggaagctctgctcatgaatttgacatctcttgagaaactcacactatgtaattgtcttggctgtgagcaaagcaccgagcgaatggctgtactcgcgaatctaacatctcttaccacgctatatttatataattgcagaaatatcacaatggatggattcaatcctcacatcacatccagcctcaagtatctatgcgtgtacaatgagagaaatgatggaactgatccgtattctgtagcagcagatctacttgtagcggtggtgaggaccaaaacaatgcccgacgtttccttcaaactggtgggactttatgtggacaacatctcgggagtgcttgttgctcccatctgcaagctgctctccgctaccctcgagacgttaaacttcagtaatgattggcggacagagaacttcacgaaagagcaggacgaggcgcttcagctcctcacgtctctccaattccttgagttttataactgcagggctctgcagtccctcccccaaggactgcaccgccttccttctctccacggaataactatctatgggcctcaaaacattagatcactgcctaaggagggcctccccgattcactacgaatactacgtataactaactgttgtgctgagatttatgaggcatgccagcaattgaagggaacaaggccagatataaatgtacttgcctccaaagctcgtgtgcaaaattgaatacctgcttctgcatgtcttcacagtcagctctgcttcaacatgcctttcactctacaggtaaatactgtgaaaacatcttcctatacgtgagatagttgatcttcatcgattctacagccaggatgatgtcttattggatgatgtgttggtcatggttggcacaaaattcacgttcaaggcaataaacgagaacaagcatgggatgtggaaaattttagaaagtaaagacaagtgaattcttgacgacgttggcttggcaccttagtttgagtacataatgaaagaacaaccttttagcaaccctggagcatctagaaaatatcagtcatgtaactatcgttaatcatttgaaaaccactggaagacaggagatgtagcaccacaagccattcctttgatcatttgaaaaccattgcggctctttctgattatatcaaccagttgagtggatgaaagaccaaaaaatgctttggaagaagggctcacaattgtggataataaggcatccagtattatagaggaaacaaaggaaattcaaattagacggaaacctgctagtccaagttcttatatgccaaattcatcaatttgcatcctactggagacattgctggcagaggaattgagactggcataggagaactcaatatatgcttgtgaataacgcatccagtgaaagatagtagattttcatcaattcactacccaggatgttgtcgcattggatgagaatgacatggaagacggcgaactagaggaagacaacaacctcatctaagctgaaaatgtgttgcctgtggttgaagaaaatctagcagatgaacaacactgccttccctgtcctctctagacctgaatctctctgatggtttggattcgtccatgattgatcctgtacgatgaaggatcagctcgtccaacgtttttcaaggaacgaactcaatctgaggaattaccttttcattggtcacctggggtactacgaggaatgacttcacgatagacgactcggttttgcgacgcaaaccaaacgccatggttaggctcagatgttggatcagatgattcctcgtggcttcgtgacgcaaaccaaacgacatggctaggctcagatgttggatcgtatgatttctcgtggcttcgtgacgcaaaccaaacagcctgtaagtccgcacaccttatctatcatggtcattgttgagctgatcagtaattggagtcgtgtgataagcttaatggacctcctatttgtcgtgatcttcacagatcaacaagtgagcggcctttgcatgctgcatgagatcaagcaagccgccgactggcaatgctccacctgccattcagttcgttggtgaggtattaatcaccagccatgttggcacttggcggcatgcagatggagcagaacatccaggtgaagcggacagatacatgatcgatcatgagttggcgcagacacaggccagacaaccagaggctatattccaattcatacattccatgataagcaaaggaagatccaagacaacacaaatatacaaatagttagttatacaagcaaaaatcctgttgttttgtgcctcccattttctagtccagaattaatatgacaatttttcactgaaactggttggatcagagaccaggaaaaaaagggaaatgacaactacagctgtgttttttttttcaaagaaggcagctgcccgtcgatgatgtgctcacttgaggatttcctctgccttttcagtgacactgcttcatccttttcagagtcaaatgaatctctacctcatttcactgcacatacttccaaactgatttgctgtaacatacttgagtttcggtatgacattaatttttaactcataagagaacaaaatcagaagaaaaaaaaacaacaa

SEQ ID NO: 13028 - DNA, 4445 bp, Zea Mays
aagattgtgcctatatcgattgttctagttttgaggcaaataacatcccacggtctatccgttacctatccatttccatgcaagatcattgtgctcagaatttcgaggaacaaatgggaaaactgaaagaaaagatatacattaacaatttgcggagtttgatgatatttggaaaatacattatgttacatctgctcaatattttaagggacacatttaaggaaataagacgtcttcgtgttctatctatattcatatactcccatagttccttgccaaacaacttttcagagcttcttcatctccgctacttaaaacttttgtcaccttattactcagaaatgtcattgccaaacacggtctcaaggttttatcacctgaaatttctagatcttgaacaatggggaagtgatcgttctttgcctaaggacattagccgccttgaaaatctatgccattttgttgtttcggaaaagattgattccaatgttcctgaggtggggaaaatgatcttcttacaagaattgaaagaattccatgttaataaagagagtgttggatttgagctacaagaattgggtaaactagatgagcttggagggaagctcaatatatacgggcttgaaaatgtgagaaccaagaaagaagctaaagaggccaagctgatgtcaaagaggaatttagttgagttgggattaatttggaacatgaaacaagagtccaccgaagatgatatcctagatagtatccaaccacactctaatgttaggagtctttttattgtaaatcatggtggtaccctcggtcctagttggttgtgcagcagcgacaccatatacatgaaaaacttggagactctacatctagagagcgtatcgtgggctaaccttccacctattgggcagttctatcacttaagagagctaaggctgagtaaaattgttggcatatcacagattggacctggcttcttcgatagcacgacagaaaaaagtgtctcacacttgaaggcagttgagtttaatgatatgccagagcttgtcgagtgggttgggggagctaactggaatctgttctcaggaattgaaagaatcaagtgtactaattgtcctaggctgacagggttgctggtttcagattggtctatttcttctatataagacagcactgtatggttccctaatcttcatgacctttacatttatgaatgcccgaagttgtgccttccacccttgcctcacacttcaaaggtatcccgtattcatatgggagacttttcttatgaaggtcgtaccatgttgaaaattaataacccctctagatttgccttcgaaaatctgggtgacctagagacattggtagcttgggatgcactacccttgtcctttatggatcttaaaaagctacattccttgagacgtataaatgtcactagatgtgaggaaacatttttgagaggactggatgatggtgttgtgctacccacagtccaatctctctaccttggacgatttacacctaccaaaaattatttgtcaaaattattcaaatgttttccagcactttcttctttgcatgtgatggcatcaccatcagatgaggacaacgaggaagtggtactgcattttccaccctctagctcgctgagagatgtcaacttcacagggtgtaagaatctgatcctacccatggaggaaggagctggattctgtggcctctcgtcgctcgagtcagtgaccatacacaaatgtgacaggttattctctcgatggtccatcggaggacgagcaactcagactcagagcatcatcaaccctctcccaccctacctgaggaaactcttcctttcttatatggaaactctgcctcaggaagctctgctcatgaatttgacatctcttgagaaactcacactatgtaattgtcttggctgtgagcaaagcaccgagcgaatggctgtactcgcgaatctaacatctcttaccacgctatatttatataattgcagaaatatcacaatggatggattcaatcctcacatcacatccagcctcaagtatctatgcgtgtacaatgagagaaatgatggaactgatccgtattctgtagcagcagatctacttgtagcggtggtgaggaccaaaacaatgcccgacgtttccttcaaactggtgggactttatgtggacaacatctcgggagtgcttgttgctcccatctgcaagctgctctccgctaccctcgagacgttaaacttcagtaatgattggcggacagagaacttcacgaaagagcaggacgaggcgcttcagctcctcacgtctctccaattccttgagttttataactgcagggctctgcagtccctcccccaaggactgcaccgccttccttctctccacggaataactatctatgggcctcaaaacattagatcactgcctaaggagggcctccccgattcactacgaatactacgtataactaactgttgtgctgagatttatgaggcatgccagcaattgaagggaacaaggccagatataaatgtacttgcctccaaagctcgtgtgcaaaattgaatacctgcttctgcatgtcttcacagtcagctctgcttcaacatgcctttcactctacaggtaaatactgtgaaaacatcttcctatacgtgagatagttgatcttcatcgattctacagccaggatgatgtcttattggatgatgtgttggtcatggttggcacaaaattcagtagcgttcaaggcaataaacgagaacaagcatgggatgtggaaaattttagaaagtaaagacaagtgaattcttgacgacgttggcttggcaccttagtttgagtacataatgaaagaacaaccttttagcaaccctggagcatctagaaaatatcagtcatgtaactatcgttaatcatttgaaaaccactggaagacaggagatgtagcaccacaagccattcctttgatcatttgaaaaccattgcggctctttctgattatatcaaccagttgagtggatgaaagaccaaaaaatgctttggaagaagggctcacaattgtggataataaggcatccagtattatagaggaaacaaaggaaattcaaattagacggaaacctgctagtccaagttcttatatgccaaattcatcaatttgcatcctactggagacattgctggcagaggaattgagactggcataggagaactcaatatatgcttgtgaataacgcatccagtgaaagatagtagattttcatcaattcactacccaggatgttgtcgcattggatgagaatgacatggaagacggcgaactagaggaagacaacaacctcatctaagctgaaaatgtgttgcctgtggttgaagaaaatctagcagatgaacaacactgccttccctgtcctctctagacctgaatctctctgatggtttggattcgtccatgattgatcctgtacgatgaaggatcagctcgtccaacgtttttcaaggaacgaactcaatctgaggaattaccttttcattggtcacctggggtactacgaggaatgacttcacgatagacgactcggttttgcgacgcaaaccaaacgccatggttaggctcagatgttggatcagatgattcctcgtggcttcgtgacgcaaaccaaacgacatggctaggctcagatgttggatcgtatgatttctcgtggcttcgtgacgcaaaccaaacagcctcatgctctagccaaaggcatgatcgtcatcgttctgaaacaaagaaaatgatgtgtattcctttcagtgagcggcctttgcatgctgcatgagatcaagcaagccgccgactggcaatgctccacctgccattcagttcgttggtgaggtattaatcaccagccatgttggcacttggcggcatgcagatggagcagaacatccaggtgaagcggacagatacatgatcgatcatgagttggcgcagacacaggccagacaaccagaggctatattccaattcatacattccatgataagcaaaggaagatccaagacaacacaaatatacaaatagttagttatacaagcaaaaatcctgttgttttgtgcctcccattttctagtccagaattaatatgacaatttttcactgaaactggttggatcagagaccaggaaaaaaagggaaatgacaactacagctgtgttttttttttcaaagaaggcagctgcccgtcgatgatgtgctcacttgaggatttcctctgccttttcagtgacactgcttcatccttttcagagtcaaatgaatctctacctcatttcactgcacatacttccaaactgatttgctgtaacatacttgagtttcggtatgacattaatttttaactcataagagaacaaaatcagaagaaaaaaaaacaacaa

SEQ ID NO: 13029 - DNA, 5095 bp, Zea Mays
aagattgtgcctatatcgattgttctagttttgaggcaaataacatcccacggtctatccgttacctatccatttccatgcaagatcattgtgctcagaatttcgaggaacaaatgggaaaactgaaagaaaagatatacattaacaatttgcggagtttgatgatatttggaaaatacattatgttacatctgctcaatattttaagggacacatttaaggaaataagacgtcttcgtgttctatctatattcatatactcccatagttccttgccaaacaacttttcagagcttcttcatctccgctacttaaaacttttgtcaccttattactcagaaatgtcattgccaaacacggtctcaaggttttatcacctgaaatttctagatcttgaacaatggggaagtgatcgttctttgcctaaggacattagccgccttgaaaatctatgccattttgttgtttcggaaaagattgattccaatgttcctgaggtggggaaaatgatcttcttacaagaattgaaagaattccatgttaataaagagagtgttggatttgagctacaagaattgggtaaactagatgagcttggagggaagctcaatatatacgggcttgaaaatgtgagaaccaagaaagaagctaaagaggccaagctgatgtcaaagaggaatttagttgagttgggattaatttggaacatgaaacaagagtccaccgaagatgatatcctagatagtatccaaccacactctaatgttaggagtctttttattgtaaatcatggtggtaccctcggtcctagttggttgtgcagcagcgacaccatatacatgaaaaacttggagactctacatctagagagcgtatcgtgggctaaccttccacctattgggcagttctatcacttaagagagctaaggctgagtaaaattgttggcatatcacagattggacctggcttcttcgatagcacgacagaaaaaagtgtctcacacttgaaggcagttgagtttaatgatatgccagagcttgtcgagtgggttgggggagctaactggaatctgttctcaggaattgaaagaatcaagtgtactaattgtcctaggctgacagggttgctggtttcagattggtctatttcttctatataagacagcactgtatggttccctaatcttcatgacctttacatttatgaatgcccgaagttgtgccttccacccttgcctcacacttcaaaggtatcccgtattcatatgggagacttttcttatgaaggtcgtaccatgttgaaaattaataacccctctagatttgccttcgaaaatctgggtgacctagagacattggtagcttgggatgcactacccttgtcctttatggatcttaaaaagctacattccttgagacgtataaatgtcactagatgtgaggaaacatttttgagaggactggatgatggtgttgtgctacccacagtccaatctctctaccttggacgatttacacctaccaaaaattatttgtcaaaattattcaaatgttttccagcactttcttctttgcatgtgatggcatcaccatcagatgaggacaacgaggaagtggtactgcattttccaccctctagctcgctgagagatgtcaacttcacagggtgtaagaatctgatcctacccatggaggaaggagctggattctgtggcctctcgtcgctcgagtcagtgaccatacacaaatgtgacaggttattctctcgatggtccatcggaggacgagcaactcagactcagagcatcatcaaccctctcccaccctacctgaggaaactcttcctttcttatatggaaactctgcctcaggaagctctgctcatgaatttgacatctcttgagaaactcacactatgtaattgtcttggctgtgagcaaagcaccgagcgaatggctgtactcgcgaatctaacatctcttaccacgctatatttatataattgcagaaatatcacaatggatggattcaatcctcacatcacatccagcctcaagtatctatgcgtgtacaatgagagaaatgatggaactgatccgtattctgtagcagcagatctacttgtagcggtggtgaggaccaaaacaatgcccgacgtttccttcaaactggtgggactttatgtggacaacatctcgggagtgcttgttgctcccatctgcaagctgctctccgctaccctcgagacgttaaacttcagtaatgattggcggacagagaacttcacgaaagagcaggacgaggcgcttcagctcctcacgtctctccaattccttgagttttataactgcagggctctgcagtccctcccccaaggactgcaccgccttccttctctccacggaataactatctatgggcctcaaaacattagatcactgcctaaggagggcctccccgattcactacgaatactacgtataactaactgttgtgctgagatttatgaggcatgccagcaattgaagggaacaaggccagatataaatgtacttgcctccaaagctcgtgtgcaaaattgaatacctgcttctgcatgtcttcacagtcagctctgcttcaacatgcctttcactctacaggtaaatactgtgaaaacatcttcctatacgtgagatagttgatcttcatcgattctacagccaggatgatgtcttattggatgatgtgttggtcatggttggcacaaaattcagtagcgttcaaggcaataaacgagaacaagcatgggatgtggaaaattttagaaagtaaagacaagtgaattcttgacgacgttggcttggcaccttagtttgagtacataatgaaagaacaaccttttagcaaccctggagcatctagaaaatatcagtcatgtaactatcgttaatcatttgaaaaccactggaagacaggagatgtagcaccacaagccattcctttgatcatttgaaaaccattgcggctctttctgattatatcaaccagttgagtggatgaaagaccaaaaaatgctttggaagaagggctcacaattgtggataataaggcatccagtattatagaggaaacaaaggaaattcaaattagacggaaacctgctagtccaagttcttatatgccaaattcatcagtagatacacatacactctacaccctaatcttctttgttatgacatttattgtttttttcatgaactacgtacatcttaattttcaattcatctagaatactgaataggtgatgattcatcaccaaattgataagtgaatattaatacatctgaaacctaaaattaaatatatattatataagttgttgttaatgttcattccatttttgaacacttgcatgaattttagttctctgtttcttttgaaaaattctgtgttgcaaaaatataaatttatatgaaaatatattatatggtgatgagaagtttgagtttagtatatggtttcatattagctatacattgttggtactatcggcttgttctctttttgtttgaaaaaaatactatcggcttgttcttaaggacacataaaggactagttcggaagcaagagaattagaggagagatggctaaaatccccttcctaattaaataggaagggaatttgagcaccctcaatcccctctaattcccttgctttcaaactagcccaaagagtgtcactgcatcctctgaattatgatatattgaacatggtgttataattgtgaaccgatgagtataacttattttctccatattctgaacaacccattacttaaacagatttgcatcctactggagacattgctggcagaggaattgagactggcataggagaactcaatatatgcttgtgaataacgcatccagtgaaagatagtagattttcatcaattcactacccaggatgttgtcgcattggatgagaatgacatggaagacggcgaactagaggaagacaacaacctcatctaagctgaaaatgtgttgcctgtggttgaagaaaatctagcagatgaacaacactgccttccctgtcctctctagacctgaatctctctgatggtttggattcgtccatgattgatcctgtacgatgaaggatcagctcgtccaacgtttttcaaggaacgaactcaatctgaggaattaccttttcattggtcacctggggtactacgaggaatgacttcacgatagacgactcggttttgcgacgcaaaccaaacgccatggttaggctcagatgttggatcagatgattcctcgtggcttcgtgacgcaaaccaaacgacatggctaggctcagatgttggatcgtatgatttctcgtggcttcgtgacgcaaaccaaacagcctcatgctctagccaaaggcatgatcgtcatcgttctgaaacaaagaaaatgatgtgtattcctttcagtgagcggcctttgcatgctgcatgagatcaagcaagccgccgactggcaatgctccacctgccattcagttcgttggtgaggtattaatcaccagccatgttggcacttggcggcatgcagatggagcagaacatccaggtgaagcggacagatacatgatcgatcatgagttggcgcagacacaggccagacaaccagaggctatattccaattcatacattccatgataagcaaaggaagatccaagacaacacaaatatacaaatagttagttatacaagcaaaaatcctgttgttttgtgcctcccattttctagtccagaattaatatgacaatttttcactgaaactggttggatcagagaccaggaaaaaaagggaaatgacaactacagctgtgttttttttttcaaagaaggcagctgcccgtcgatgatgtgctcacttgaggatttcctctgccttttcagtgacactgcttcatccttttcagagtcaaatgaatctctacctcatttcactgcacatacttccaaactgatttgctgtaacatacttgagtttcggtatgacattaatttttaactcataagagaacaaaatcagaagaaaaaaaaacaacaa

SEQ ID NO: 13030 - DNA, 3933 bp, Zea Mays
aagattgtgcctatatcgattgttctagttttgaggcaaataacatcccacggtctatccgttacctatccatttccatgcaagatcattgtgctcagaatttcgaggaacaaatgggaaaactgaaagaaaagatatacattaacaatttgcggagtttgatgatatttggaaaatacattatgttacatctgctcaatattttaagggacacatttaaggaaataagacgtcttcgtgttctatctatattcatatactcccatagttccttgccaaacaacttttcagagcttcttcatctccgctacttaaaacttttgtcaccttattactcagaaatgtcattgccaaacacggtctcaaggttttatcacctgaaatttctagatcttgaacaatggggaagtgatcgttctttgcctaaggacattagccgccttgaaaatctatgccattttgttgtttcggaaaagattgattccaatgttcctgaggtggggaaaatgatcttcttacaagaattgaaagaattccatgttaataaagagagtgttggatttgagctacaagaattgggtaaactagatgagcttggagggaagctcaatatatacgggcttgaaaatgtgagaaccaagaaagaagctaaagaggccaagctgatgtcaaagaggaatttagttgagttgggattaatttggaacatgaaacaagagtccaccgaagatgatatcctagatagtatccaaccacactctaatgttaggagtctttttattgtaaatcatggtggtaccctcggtcctagttggttgtgcagcagcgacaccatatacatgaaaaacttggagactctacatctagagagcgtatcgtgggctaaccttccacctattgggcagttctatcacttaagagagctaaggctgagtaaaattgttggcatatcacagattggacctggcttcttcgatagcacgacagaaaaaagtgtctcacacttgaaggcagttgagtttaatgatatgccagagcttgtcgagtgggttgggggagctaactggaatctgttctcaggaattgaaagaatcaagtgtactaattgtcctaggctgacagggttgctggtttcagattggtctatttcttctatataagacagcactgtatggttccctaatcttcatgacctttacatttatgaatgcccgaagttgtgccttccacccttgcctcacacttcaaaggtatcccgtattcatatgggagacttttcttatgaaggtcgtaccatgttgaaaattaataacccctctagatttgccttcgaaaatctgggtgacctagagacattggtagcttgggatgcactacccttgtcctttatggatcttaaaaagctacattccttgagacgtataaatgtcactagatgtgaggaaacatttttgagaggactggatgatggtgttgtgctacccacagtccaatctctctaccttggacgatttacacctaccaaaaattatttgtcaaaattattcaaatgttttccagcactttcttctttgcatgtgatggcatcaccatcagatgaggacaacgaggaagtggtactgcattttccaccctctagctcgctgagagatgtcaacttcacagggtgtaagaatctgatcctacccatggaggaaggagctggattctgtggcctctcgtcgctcgagtcagtgaccatacacaaatgtgacagaaatatcacaatggatggattcaatcctcacatcacatccagcctcaagtatctatgcgtgtacaatgagagaaatgatggaactgatccgtattctgtagcagcagatctacttgtagcggtggtgaggaccaaaacaatgcccgacgtttccttcaaactggtgggactttatgtggacaacatctcgggagtgcttgttgctcccatctgcaagctgctctccgctaccctcgagacgttaaacttcagtaatgattggcggacagagaacttcacgaaagagcaggacgaggcgcttcagctcctcacgtctctccaattccttgagttttataactgcagggctctgcagtccctcccccaaggactgcaccgccttccttctctccacggaataactatctatgggcctcaaaacattagatcactgcctaaggagggcctccccgattcactacgaatactacgtataactaactgttgtgctgagatttatgaggcatgccagcaattgaagggaacaaggccagatataaatgtacttgcctccaaagctcgtgtgcaaaattgaatacctgcttctgcatgtcttcacagtcagctctgcttcaacatgcctttcactctacaggtaaatactgtgaaaacatcttcctatacgtgagatagttgatcttcatcgattctacagccaggatgatgtcttattggatgatgtgttggtcatggttggcacaaaattcagtaggaagggctcacaattgtggataataaggcatccagtattatagaggaaacaaaggaaattcaaattagacggaaacctgctagtccaagttcttatatgccaaattcatcaatttgcatcctactggagacattgctggcagaggaattgagactggcataggagaactcaatatatgcttgtgaataacgcatccagtgaaagatagtagattttcatcaattcactacccaggatgttgtcgcattggatgagaatgacatggaagacggcgaactagaggaagacaacaacctcatctaagctgaaaatgtgttgcctgtggttgaagaaaatctagcagatgaacaacactgccttccctgtcctctctagacctgaatctctctgatggtttggattcgtccatgattgatcctgtacgatgaaggatcagctcgtccaacgtttttcaaggaacgaactcaatctgaggaattaccttttcattggtcacctggggtactacgaggaatgacttcacgatagacgactcggttttgcgacgcaaaccaaacgccatggttaggctcagatgttggatcagatgattcctcgtggcttcgtgacgcaaaccaaacgacatggctaggctcagatgttggatcgtatgatttctcgtggcttcgtgacgcaaaccaaacagcctgtaagtccgcacaccttatctatcatggtcattgttgagctgatcagtaattggagtcgtgtgataagcttaatggacctcctatttgtcgtgatcttcacagatcaacaagtgagcggcctttgcatgctgcatgagatcaagcaagccgccgactggcaatgctccacctgccattcagttcgttggtgaggtattaatcaccagccatgttggcacttggcggcatgcagatggagcagaacatccaggtgaagcggacagatacatgatcgatcatgagttggcgcagacacaggccagacaaccagaggctatattccaattcatacattccatgataagcaaaggaagatccaagacaacacaaatatacaaatagttagttatacaagcaaaaatcctgttgttttgtgcctcccattttctagtccagaattaatatgacaatttttcactgaaactggttggatcagagaccaggaaaaaaagggaaatgacaactacagctgtgttttttttttcaaagaaggcagctgcccgtcgatgatgtgctcacttgaggatttcctctgccttttcagtgacactgcttcatccttttcagagtcaaatgaatctctacctcatttcactgcacatacttccaaactgatttgctgtaacatacttgagtttcggtatgacattaatttttaactcataagagaacaaaatcagaagaaaaaaaaacaacaa

SEQ ID NO: 13031 - DNA, 3996 bp, Zea Mays
aagattgtgcctatatcgattgttctagttttgaggcaaataacatcccacggtctatccgttacctatccatttccatgcaagatcattgtgctcagaatttcgaggaacaaatgggaaaactgaaagaaaagatatacattaacaatttgcggagtttgatgatatttggaaaatacattatgttacatctgctcaatattttaagggacacatttaaggaaataagacgtcttcgtgttctatctatattcatatactcccatagttccttgccaaacaacttttcagagcttcttcatctccgctacttaaaacttttgtcaccttattactcagaaatgtcattgccaaacacggtctcaaggttttatcacctgaaatttctagatcttgaacaatggggaagtgatcgttctttgcctaaggacattagccgccttgaaaatctatgccattttgttgtttcggaaaagattgattccaatgttcctgaggtggggaaaatgatcttcttacaagaattgaaagaattccatgttaataaagagagtgttggatttgagctacaagaattgggtaaactagatgagcttggagggaagctcaatatatacgggcttgaaaatgtgagaaccaagaaagaagctaaagaggccaagctgatgtcaaagaggaatttagttgagttgggattaatttggaacatgaaacaagagtccaccgaagatgatatcctagatagtatccaaccacactctaatgttaggagtctttttattgtaaatcatggtggtaccctcggtcctagttggttgtgcagcagcgacaccatatacatgaaaaacttggagactctacatctagagagcgtatcgtgggctaaccttccacctattgggcagttctatcacttaagagagctaaggctgagtaaaattgttggcatatcacagattggacctggcttcttcgatagcacgacagaaaaaagtgtctcacacttgaaggcagttgagtttaatgatatgccagagcttgtcgagtgggttgggggagctaactggaatctgttctcaggaattgaaagaatcaagtgtactaattgtcctaggctgacagggttgctgttgtgccttccacccttgcctcacacttcaaaggtatcccgtattcatatgggagacttttcttatgaaggtcgtaccatgttgaaaattaataacccctctagatttgccttcgaaaatctgggtgacctagagacattggtagcttgggatgcactacccttgtcctttatggatcttaaaaagctacattccttgagacgtataaatgtcactagatgtgaggaaacatttttgagaggactggatgatggtgttgtgctacccacagtccaatctctctaccttggacgatttacacctaccaaaaattatttgtcaaaattattcaaatgttttccagcactttcttctttgcatgtgatggcatcaccatcagatgaggacaacgaggaagtggtactgcattttccaccctctagctcgctgagagatgtcaacttcacagggtgtaagaatctgatcctacccatggaggaaggagctggattctgtggcctctcgtcgctcgagtcagtgaccatacacaaatgtgacagaaatatcacaatggatggattcaatcctcacatcacatccagcctcaagtatctatgcgtgtacaatgagagaaatgatggaactgatccgtattctgtagcagcagatctacttgtagcggtggtgaggaccaaaacaatgcccgacgtttccttcaaactggtgggactttatgtggacaacatctcgggagtgcttgttgctcccatctgcaagctgctctccgctaccctcgagacgttaaacttcagtaatgattggcggacagagaacttcacgaaagagcaggacgaggcgcttcagctcctcacgtctctccaattccttgagttttataactgcagggctctgcagtccctcccccaaggactgcaccgccttccttctctccacggaataactatctatgggcctcaaaacattagatcactgcctaaggagggcctccccgattcactacgaatactacgtataactaactgttgtgctgagatttatgaggcatgccagcaattgaagggaacaaggccagatataaatgtacttgcctccaaagctcgtgtgcaaaattgaatacctgcttctgcatgtcttcacagtcagctctgcttcaacatgcctttcactctacaggtaaatactgtgaaaacatcttcctatacgtgagatagttgatcttcatcgattctacagccaggatgatgtcttattggatgatgtgttggtcatggttggcacaaaattcagtagtcatgtaactatcgttaatcatttgaaaaccactggaagacaggagatgtagcaccacaagccattcctttgatcatttgaaaaccattgcggctctttctgattatatcaaccagttgagtggatgaaagaccaaaaaatgctttggaagaagggctcacaattgtggataataaggcatccagtattatagaggaaacaaaggaaattcaaattagacggaaacctgctagtccaagttcttatatgccaaattcatcaatttgcatcctactggagacattgctggcagaggaattgagactggcataggagaactcaatatatgcttgtgaataacgcatccagtgaaagatagtagattttcatcaattcactacccaggatgttgtcgcattggatgagaatgacatggaagacggcgaactagaggaagacaacaacctcatctaagctgaaaatgtgttgcctgtggttgaagaaaatctagcagatgaacaacactgccttccctgtcctctctagacctgaatctctctgatggtttggattcgtccatgattgatcctgtacgatgaaggatcagctcgtccaacgtttttcaaggaacgaactcaatctgaggaattaccttttcattggtcacctggggtactacgaggaatgacttcacgatagacgactcggttttgcgacgcaaaccaaacgccatggttaggctcagatgttggatcagatgattcctcgtggcttcgtgacgcaaaccaaacgacatggctaggctcagatgttggatcgtatgatttctcgtggcttcgtgacgcaaaccaaacagcctgtaagtccgcacaccttatctatcatggtcattgttgagctgatcagtaattggagtcgtgtgataagcttaatggacctcctatttgtcgtgatcttcacagatcaacaagtgagcggcctttgcatgctgcatgagatcaagcaagccgccgactggcaatgctccacctgccattcagttcgttggtgaggtattaatcaccagccatgttggcacttggcggcatgcagatggagcagaacatccaggtgaagcggacagatacatgatcgatcatgagttggcgcagacacaggccagacaaccagaggctatattccaattcatacattccatgataagcaaaggaagatccaagacaacacaaatatacaaatagttagttatacaagcaaaaatcctgttgttttgtgcctcccattttctagtccagaattaatatgacaatttttcactgaaactggttggatcagagaccaggaaaaaaagggaaatgacaactacagctgtgttttttttttcaaagaaggcagctgcccgtcgatgatgtgctcacttgaggatttcctctgccttttcagtgacactgcttcatccttttcagagtcaaatgaatctctacctcatttcactgcacatacttccaaactgatttgctgtaacatacttgagtttcggtatgacattaatttttaactcataagagaacaaaatcagaagaaaaaaaaacaacaa

SEQ ID NO: 13032 - DNA, 2401 bp, Zea Mays
gtctatttcacatatagaagataacgccactatgcttcatcgtaatgttgcacagcgttcaaggcaataaacgagaacaagcatgggatgtggaaaattttagaaagtaaagacaagtgaattcttgacgacgttggcttggcaccttagtttgagtacataatgaaagaacaaccttttagcaaccctggagcatctagaaaatatcagtcatgtaactatcgttaatcatttgaaaaccactggaagacaggagatgtagcaccacaagccattcctttgatcatttgaaaaccattgcggctctttctgattatatcaaccagaagggctcacaattgtggataataaggcatccagtattatagaggaaacaaaggaaattcaaattagacggaaacctgctagtccaagttcttatatgccaaattcatcagtagatacacatacactctacaccctaatcttctttgttatgacatttattgtttttttcatgaactacgtacatcttaattttcaattcatctagaatactgaataggtgatgattcatcaccaaattgataagtgaatattaatacatctgaaacctaaaattaaatatatattatataagttgttgttaatgttcattccatttttgaacacttgcatgaattttagttctctgtttcttttgaaaaattctgtgttgcaaaaatataaatttatatgaaaatatattatatggtgatgagaagtttgagtttagtatatggtttcatattagctatacattgttggtactatcggcttgttctctttttgtttgaaaaaaatactatcggcttgttcttaaggacacataaaggactagttcggaagcaagagaattagaggagagatggctaaaatccccttcctaattaaataggaagggaatttgagcaccctcaatcccctctaattcccttgctttcaaactagcccaaagagtgtcactgcatcctctgaattatgatatattgaacatggtgttataattgtgaaccgatgagtataacttattttctccatattctgaacaacccattacttaaacagatttgcatcctactggagacattgctggcagaggaattgagactggcataggagaactcaatatatgcttgtgaataacgcatccagtgaaagatagtagattttcatcaattcactacccaggatgttgtcgcattggatgagaatgacatggaagacggcgaactagaggaagacaacaacctcatctaagctgaaaatgtgttgcctgtggttgaagaaaatctagcagatgaacaacactgccttccctgtcctctctagacctgaatctctctgatggtttggattcgtccatgattgatcctgtacgatgaaggatcagctcgtccaacgtttttcaaggaacgaactcaatctgaggaattaccttttcattggtcacctggggtactacgaggaatgacttcacgatagacgactcggttttgcgacgcaaaccaaacgccatggttaggctcagatgttggatcagatgattcctcgtggcttcgtgacgcaaaccaaacgacatggctaggctcagatgttggatcgtatgatttctcgtggcttcgtgacgcaaaccaaacagcctgtaagtccgcacaccttatctatcatggtcattgttgagctgatcagtaattggagtcgtgtgataagcttaatggacctcctatttgtcgtgatcttcacagatcaacaagtgagcggcctttgcatgctgcatgagatcaagcaagccgccgactggcaatgctccacctgccattcagttcgttggtgaggtattaatcaccagccatgttggcacttggcggcatgcagatggagcagaacatccaggtgaagcggacagatacatgatcgatcatgagttggcgcagacacaggccagacaaccagaggctatattccaattcatacattccatgataagcaaaggaagatccaagacaacacaaatatacaaatagttagttatacaagcaaaaatcctgttgttttgtgcctcccattttctagtccagaattaatatgacaatttttcactgaaactggttggatcagagaccaggaaaaaaagggaaatgacaactacagctgtgttttttttttcaaagaaggcagctgcccgtcgatgatgtgctcacttgaggatttcctctgccttttcagtgacactgcttcatccttttcagagtcaaatgaatctctacctcatttcactgcacatacttccaaactgatttgctgtaacatacttgagtttcggtatgacattaatttttaactcataagagaacaaaatcagaagaaaaaaaaacaacaa

SEQ ID NO: 13033 - DNA, 1263 bp, Zea Mays
atggcagacgggatggatctgtggtgtttgtgtttcccagctggactgctgctggactggagccttgttgtagctcatgtgcgctgtgaggttttgccaggccctgccacagcttttgggcgcctcgatcagctactagtacttgctgtcactgcgcacggattcgttctcatcacacagctcatgtgcgctgggccctgcccccaacccattggcgtctactgccttgccttctctggaacggaatttttgtcttgtgctgattaagagcaactccaaccatgagccccataattgggccctataatttgatttagttatctattctatttgtttagggcccaaatacaagtgttgattccaatcatggaccctaaaaacgataggttttttgcgccgccgccaatagcaggcattcgatctggaaggcgtcgggaggagtgttgccgttcgtacgcaacagtttcacaaggatgatatctaaacgtagaagatccaccaggcatcaagaagttgaggaggttgatgatgaatttgaccacatattagatcttatgatgggtgaataccagaagaggaagaatgaagaacaacgtaaaagacgacggggttcagtttttggacatgagatcgatgatcaccatcggcgattgacggacgatagcgagacgccggtgttggaacttgctgagacgcggcacgggcgggctacgaagcacctccgattgcatcaagaaccttattcaaagacatacacctattcttcgccgacggccgtgacaagggggaacgagaccggccatccatctagtctgtcgtcaaaacgagttcgggaagggagaaggataagggaacagtggagaagtttggcggcgatgttccggacgacgtaccaggggaaccgtggaaggagacgagacgcaacttgcaggacgatggatcgaggactctgaggatggcggcaccgaagggagacgagacggatggcagcctgcagcctgcaagacggcggatcaaggactccgaggatggctgtacgaaggggagaaagggctttgtgaaatgtcagtgggggttgagatacaagggaacaagtattgggccgctcgtcccagggtctcaaatttactgctcctgagattaggccctaattttttttatgaattctattgaaatagggcctccgttggacctcatttttctggatggagcctcatatttcaaattgttaatgagtttagggcctctattggagttgctcta

SEQ ID NO: 13034 - DNA, 3851 bp, Zea Mays
ttccattcggttccgttccgttcaatcaagcagcagccagcagctgactgtctgtctgtgagccattgccattccaaggcaccaccaggcatactgacagtggagcaggcggtgtcccctagtcacccggcgattcctcttcccttcctccccccaccgtcgtcgagtccgagtcgcttttctctctctctctctctctctcttgggtttctctctgtctgtctgtctctgacactcactcactctctctctggcccaggccgcgctcagctaatctcgttcctaatcccccccgcgtcaagatcaagacataacacaacacaacacaacagacgatgctctgtcgctgtctgcactctctatcgtcttccttccgtccgctcccctcccagcaggccagcaggctcccagtttgttttgccacgcgccgacgacgacgaccagccgtcattccttggcctcgtccgtttccctcctccagaccagaccagacctccaccgctgagagcatttcagagagagagagagagagagagagagagagaggagagagagagagagagagagagaagaggacgtacgacgaggagggcaatggggatgggcagcgacgccgccgcgctgttccccttctccaccagcaccaccgccacgtcgccgcggctctgcggcgccaccgccgtcagccacaggaggatattctcagacgtcgctgaggacgtgacggtgtcggtggacggccagtcgttcctgctgcacaagttccctctggtgtcccggtgcgggcggatacgcaagatgttggcggactcctccagctccaacagcaaggacgcagacggccaccagaagctggagctggcgaacgtgccggggggagcctacgcgttcgagctggccgccaagttctgctacggcacaaacttcgagataaccgcggcgaacgtggcgcagctgcggtgcgtggcggagtacctggagatgacggaggaccagcacgcggacaacctggtggcgcgggcggaggcgtacctggccgaggtggcgctgcggagcctggacggggcgctggaggtgctgcgcaggtgcgacgacggcgggcccgtggcggagcaggtcgggctggtggcccgctgcgtcgacgccgtcgccgccagcgcgggcaaggagcagctggtctccggcctggcggcgcacctggagacgtgcgactgcgccgccgccgcgcgctgccgggaggactggtgggtggaggacctctccttgctccggatcgaccactaccgccgcgtcatcgccgcgatgcggcggagcggggtccggccggagaccatcggcgcgtccgtggcgcactacgcgcagacgtggctcaagggcgtggacgtggagcagcggcggcgccagcgcgcctgctgggacggatcgggcccgttcgtcggcgacggccagcggatggtcgtcgagacgctcgtcgacgtgcttgccacggagaacgtcgcggccgtcacgctctccttcctgttcggcatgctgcgggtcgccgtcgaggtcgacgccagcctcgactgccggatcgagctcgagcgccgggtcgggatgcgcctggagatggcggcgctcgacgacctgctcgtccccgccgcgcagaccagcgactccatgttcgacgtcgacaccgtccaccgcatactgctcagcttcttgcagaggattgatgaggatagctcgggggacctgtcgtctcccccctgcgggtacgactccgacggcctcaagtctcccagccacggatcggtgctcaaggtcgggaggctcatggacggctatctcgcggaggtggcgccggatccgtatctcaagctgcagaagttcatggcccttattgagctgctcccggattatgcgcgcattgttgatgatggcctctatcgcgccatcgacatatacctcaaggtaaagccattagattacaagtgtcacactttttttttctttttcttctgtagctgtttcagtgaatacagagcagagatcagagttccatattctaagtatctatcttatattcagtcttgatggaactgtgtatatgcaatcaaatggaatgaatgaattctagctggtcgctggaccttgatctgtgtctgcttaaacttttccagatcaatgtatatgcctggagttaagttgcataaaaattgacaaaaaaaacatgatatttgtaggatcaatcagaacaagtttagctgatcaaatagaataagaacatattttatttagtgtcaatgaattccattcctgagcaggcatatttcccatgcaattagatagcatggaaatatgtgtatgcaataaaatactatactctagccgaccactggacttggatttctgtgtggttgaaaacacaattgtctgatcagtcttcaggcctgaaggtaataacatcttgcctgatcaatctttactatgtctgacggtagcctgaagccctttgtaatcaggccaagcgcatcctttgcactagctgtttgctttgtcatttcttgatcggttttgtgtctagagaaagaactcgttggctgaccaaatgttttgctgcgggggggaaaaaaacaaacaaaaacaggcgcatccatctctgacggagtcggagtgcaagcggctgtgcaagctgatcgactgccagaagctgtcgcaggacgcgtcgagccacgcggcgcagaacgaccggctgccgatccagatggtggtgcgcgtgctctacttcgagcagctccgcctcaagtcgtccttctcgggcggcgggtccgggtgcgtcggcttgggcggcgccgacgggtccttctcgcagcggttcgtgtgcagcagcagcggcgtgccgagctcgtgcgtgtccccgcagcgggacaactacgcgtcgctgcggcgggagaaccgggagctgaagctggagatctcgcggatgcgggtgcggctgacggagctggagcgggagcaggggctgatgaagcagcaggggaggatgcgcggcggggacggcggtggcggcggcgggcggggcggtggcggcgagcacggccgcgccttccttgcgtcgctgtcgaggggcatcggccgcatcaccatgttcggcggcgggcctgcggcggccgacaggcggcgcaagaagagcggcggccggagctcccagtgctccgacggcaaggcccgcaggcggcagaaggcgtccttcgcctatgactgaagcttcgctgctggcgtcgacaatggaggcgcggcaggcggcgatcgtggatggatgcggtctcagcgtctggaggatcggtcggagctaaagcagggacggtggctgctgacagctgagtgggtgacgatgatcaagaattcaagactgcggttttagctgttggtgatggcagtccgtcgctcagacgaacaaacaacagggaggaatggaacggatcaggaggagtttattgcaggaaatgctacaggctagcgagagattttttagcatgcaggaacgacgcaggatcagtaaagtagtgtagcaaactgttttagcctgaactctgaatgcctgctttcactggattgcatttgcataatgcatccatgcatcgcagtatcgcacagctttaacgcgcgaaaacggaaactagcgttacgaccacaccgttctggagaacggagatgtgccgttctggtaaattctagagcatggcaaaagacatatttcaccgtttcctcaaagtgtggaattatatttgcgtacatcgctatggttttatataccacatatgtatatcttattcaaattcgatagttatttaaaaatgtttcaaatc

SEQ ID NO: 13035 - DNA, 3341 bp, Zea Mays
tcccttcctccccccaccgtcgtcgagtccgagtcgcttttctctctctctctctctctctcttgggtttctctctgtctgtctgtctctgacactcactcactctctctctggcccaggccgcgctcagctaatctcgttcctaatcccccccgcgtcaagatcaagacataacacaacacaacacaacagacgatgctctgtcgctgtctgcactctctatcgtcttccttccgtccgctcccctcccagcaggccagcaggctcccagtttgttttgccacgcgccgacgacgacgaccagccgtcattccttggcctcgtccgtttccctcctccagaccagaccagacctccaccgctgagagcatttcagagagagagagagagagagagagagagagaggagagagagagagagagagagagaagaggacgtacgacgaggagggcaatggggatgggcagcgacgccgccgcgctgttccccttctccaccagcaccaccgccacgtcgccgcggctctgcggcgccaccgccgtcagccacaggaggtcaggccaccccccacctctctacctctacctctacctcccctcgccgcctttccatttcctttgcatcgcattgcattgtcgacatacctgggcgaaaaagcaacagcgatagcttgcggtgccggtgccggtgccggtgccggtgcgggcgctagtcttcccttctctctagatctcttcgccattccgcttcggcacctctctagctctcactcctacggcccaccgattcggcaccgctgtcctgtctaacgctcctgtgggcgggcattgcgttgcccctgttgcttgtggttcgtgcaggatattctcagacgtcgctgaggacgtgacggtgtcggtggacggccagtcgttcctgctgcacaagttccctctggtgtcccggtgcgggcggatacgcaagatgttggcggactcctccagctccaacagcaaggacgcagacggccaccagaagctggagctggcgaacgtgccggggggagcctacgcgttcgagctggccgccaagttctgctacggcacaaacttcgagataaccgcggcgaacgtggcgcagctgcggtgcgtggcggagtacctggagatgacggaggaccagcacgcggacaacctggtggcgcgggcggaggcgtacctggccgaggtggcgctgcggagcctggacggggcgctggaggtgctgcgcaggtgcgacgacggcgggcccgtggcggagcaggtcgggctggtggcccgctgcgtcgacgccgtcgccgccagcgcgggcaaggagcagctggtctccggcctggcggcgcacctggagacgtgcgactgcgccgccgccgcgcgctgccgggaggactggtgggtggaggacctctccttgctccggatcgaccactaccgccgcgtcatcgccgcgatgcggcggagcggggtccggccggagaccatcggcgcgtccgtggcgcactacgcgcagacgtggctcaagggcgtggacgtggagcagcggcggcgccagcgcgcctgctgggacggatcgggcccgttcgtcggcgacggccagcggatggtcgtcgagacgctcgtcgacgtgcttgccacggagaacgtcgcggccgtcacgctctccttcctgttcggcatgctgcgggtcgccgtcgaggtcgacgccagcctcgactgccggatcgagctcgagcgccgggtcgggatgcgcctggagatggcggcgctcgacgacctgctcgtccccgccgcgcagaccagcgactccatgttcgacgtcgacaccgtccaccgcatactgctcagcttcttgcagaggattgatgaggatagctcgggggacctgtcgtctcccccctgcgggtacgactccgacggcctcaagtctcccagccacggatcggtgctcaaggtcgggaggctcatggacggctatctcgcggaggtggcgccggatccgtatctcaagctgcagaagttcatggcccttattgagctgctcccggattatgcgcgcattgttgatgatggcctctatcgcgccatcgacatatacctcaaggcgcatccatctctgacggagtcggagtgcaagcggctgtgcaagctgatcgactgccagaagctgtcgcaggacgcgtcgagccacgcggcgcagaacgaccggctgccgatccagatggtggtgcgcgtgctctacttcgagcagctccgcctcaagtcgtccttctcgggcggcgggtccgggtgcgtcggcttgggcggcgccgacgggtccttctcgcagcggttcgtgtgcagcagcagcggcgtgccgagctcgtgcgtgtccccgcagcgggacaactacgcgtcgctgcggcgggagaaccgggagctgaagctggagatctcgcggatgcgggtgcggctgacggagctggagcgggagcaggggctgatgaagcagcaggggaggatgcgcggcggggacggcggtggcggcggcgggcggggcggtggcggcgagcacggccgcgccttccttgcgtcgctgtcgaggggcatcggccgcatcaccatgttcggcggcgggcctgcggcggccgacaggcggcgcaagaagagcggcggccggagctcccagtgctccgacggcaaggcccgcaggcggcagaaggcgtccttcgcctatgactgaagcttcgctgctggcgtcgacaatggaggcgcggcaggcggcgatcgtggatggatgcggtctcagcgtctggaggatcggtcggagctaaagcagggacggtggctgctgacagctgagtgggtgacgatgatcaagaattcaagactgcggttttagctgttggtgatggcagtccgtcgctcagacgaacaaacaacagggaggaatggaacggatcaggaggagtttattgcaggaaatgctacaggctagcgagagattttttagcatgcaggaacgacgcaggatcagtaaagtagtgtagcaaactgttttagcctgaactctgaatgcctgctttcactggattgcatttgcataatgcatccatgcatcgcagtatcgcacagctttaacgcgcgaaaacggaaactagcgttacgaccacaccgttctggagaacggagatgtgccgttctggtaaattctagagcatggcaaaagacatatttcaccgtttcctcaaagtgtggaattatatttgcgtacatcgctatggttttatataccacatatgtatatcttattcaaattcgatagttatttaaaaatgtttcaaatc

SEQ ID NO: 13036 - DNA, 2790 bp, Zea Mays
gtcgctgtctgcactctctatcgtcttccttccgtccgctcccctcccagcaggccagcaggctcccagtttgttttgccacgcgccgacgacgacgaccagccgtcattccttggcctcgtccgtttccctcctccagaccagaccagacctccaccgctgagagcatttcagagagagagagagagagagagagagagagaggagagagagagagagagagagagaagaggacgtacgacgaggagggcaatggggatgggcagcgacgccgccgcgctgttccccttctccaccagcaccaccgccacgtcgccgcggctctgcggcgccaccgccgtcagccacaggaggatattctcagacgtcgctgaggacgtgacggtgtcggtggacggccagtcgttcctgctgcacaagttccctctggtgtcccggtgcgggcggatacgcaagatgttggcggactcctccagctccaacagcaaggacgcagacggccaccagaagctggagctggcgaacgtgccggggggagcctacgcgttcgagctggccgccaagttctgctacggcacaaacttcgagataaccgcggcgaacgtggcgcagctgcggtgcgtggcggagtacctggagatgacggaggaccagcacgcggacaacctggtggcgcgggcggaggcgtacctggccgaggtggcgctgcggagcctggacggggcgctggaggtgctgcgcaggtgcgacgacggcgggcccgtggcggagcaggtcgggctggtggcccgctgcgtcgacgccgtcgccgccagcgcgggcaaggagcagctggtctccggcctggcggcgcacctggagacgtgcgactgcgccgccgccgcgcgctgccgggaggactggtgggtggaggacctctccttgctccggatcgaccactaccgccgcgtcatcgccgcgatgcggcggagcggggtccggccggagaccatcggcgcgtccgtggcgcactacgcgcagacgtggctcaagggcgtggacgtggagcagcggcggcgccagcgcgcctgctgggacggatcgggcccgttcgtcggcgacggccagcggatggtcgtcgagacgctcgtcgacgtgcttgccacggagaacgtcgcggccgtcacgctctccttcctgttcggcatgctgcgggtcgccgtcgaggtcgacgccagcctcgactgccggatcgagctcgagcgccgggtcgggatgcgcctggagatggcggcgctcgacgacctgctcgtccccgccgcgcagaccagcgactccatgttcgacgtcgacaccgtccaccgcatactgctcagcttcttgcagaggattgatgaggatagctcgggggacctgtcgtctcccccctgcgggtacgactccgacggctcatggacggctatctcgcggaggtggcgccggatccgtatctcaagctgcagaagttcatggcccttattgagctgctcccggattatgcgcgcattgttgatgatggcctctatcgcgccatcgacatatacctcaaggcgcatccatctctgacggagtcggagtgcaagcggctgtgcaagctgatcgactgccagaagctgtcgcaggacgcgtcgagccacgcggcgcagaacgaccggctgccgatccagatggtggtgcgcgtgctctacttcgagcagctccgcctcaagtcgtccttctcgggcggcgggtccgggtgcgtcggcttgggcggcgccgacgggtccttctcgcagcggttcgtgtgcagcagcagcggcgtgccgagctcgtgcgtgtccccgcagcgggacaactacgcgtcgctgcggcgggagaaccgggagctgaagctggagatctcgcggatgcgggtgcggctgacggagctggagcgggagcaggggctgatgaagcagcaggggaggatgcgcggcggggacggcggtggcggcggcgggcggggcggtggcggcgagcacggccgcgccttccttgcgtcgctgtcgaggggcatcggccgcatcaccatgttcggcggcgggcctgcggcggccgacaggcggcgcaagaagagcggcggccggagctcccagtgctccgacggcaaggcccgcaggcggcagaaggcgtccttcgcctatgactgaagcttcgctgctggcgtcgacaatggaggcgcggcaggcggcgatcgtggatggatgcggtctcagcgtctggaggatcggtcggagctaaagcagggacggtggctgctgacagctgagtgggtgacgatgatcaagaattcaagactgcggttttagctgttggtgatggcagtccgtcgctcagacgaacaaacaacagggaggaatggaacggatcaggaggagtttattgcaggaaatgctacaggctagcgagagattttttagcatgcaggaacgacgcaggatcagtaaagtagtgtagcaaactgttttagcctgaactctgaatgcctgctttcactggattgcatttgcataatgcatccatgcatcgcagtatcgcacagctttaacgcgcgaaaacggaaactagcgttacgaccacaccgttctggagaacggagatgtgccgttctggtaaattctagagcatggcaaaagacatatttcaccgtttcctcaaagtgtggaattatatttgcgtacatcgctatggttttatataccacatatgtatatcttattcaaattcgatagttatttaaaaatgtttcaaatc

SEQ ID NO: 13037 - DNA, 2160 bp, Zea Mays
atatctccgacgtggcgagccggcactggccccgcgtatacggaggccggattcctgcggggccccggcgctatcctccgacggccgacgtgtcctgccggcgtccacacggggctggggaaactagtcgccggcgtacgcggaggtccgctcaatccggcggcgtcgtggggccggatcgaatctgcgccgcttgatcgttcgcgcggccgccgcggacagcggactgaaagcgaggtgatgatcctgctggctcggccgatcgacagggctgggccaccggcgccgcgcgcctcgtgctcttgcgtgctgctgttggctgttgccgccgagaccgagagctgctcctcctgctctcgtatacgtgctcaaggttgtcgggtacatgagacggcgctttcgttcttccggcgtgaggttgacgctgacaatggcgtgcgtggaattccagtgtcgtcgagacttgagacggaggccctgtctgctcgtgctcgtctcgtccaagagcaaggaggccgggcgggccagggcccagggccaccacggcaagcaatggccattggaagtaactgacagggacgagggcgagtcgacggcgacgccgccgttccaagccggccccaacttgcaagcgatttttggtttttgtttttttgtttttgctcgcgcctcgccggtggagtcgacgcctctaatactaataattcaaataaacaccagccatgaaaaaacgcagcttgttctttttctttttatgttttgtaccagccaaataagaatgctatgagcaactggaacgggaacctctcgtagtatatatatgagagggatcgggcaggaaactgcttcgtgaagaggctgagagctcgccttgcatgcacgcgcacacctctgcttgggtgtacgtgcacagcggcagcagcggactaggagctccatgcatctgtctctagggtgtagagatcctgctcattgtacggtagctgccaccgtctcatcgtcaaccatgtctgctgcttccaccgtggatcctcatcctcctcatcagcagcagcagtgcagcgataaggtgtcgtccatggagatggagatccccgccgaccttatcatccggatcggcgagtccgttttccctctccacaaggcggcggtgacgcccgcgggtgagcggaggagccgccgggcgtccatgtccgggacgacggcggcgacggagctcggtgccgccaggcccggcgcgctggagaaggtcgccatgatggtggacgaagtggcggcggagatcgcgacggaggaggcgctgcccatctccaagttcgtcggcgtggccggcgcggtgcccaaggacgcgcgcccgtcgcacgactgcctgtaccgcgccgtcgacatctacctcaagacgcacccggagctggacgagatccagcgggagaaggtctgcagcgtcatggacccgctcaagctctcgtaccaggcgcgcacgcacgcgtcgcagaacaagcggctgccgctgcaggccgcgctcagcgcgctctactacgacgagctcaagctccgcagcgccgcgacggccgacgtggtattggacacgcagtcgtcggccgcggggagggcttgcgcgcaggccagggcggcggacgcggcgctggcgcgagagaacgaggcgctgcggtcagagctggcacggatgcgggcctacctgtcagggatggagcgcagcaaagggggccggtcaacgccgccgtcctcgccgtctcggagggcaaagaaagcaagcttcctgggctccgtgtcccgcactatgagtcggctgaacccgtttagaagtggggggtggatggcgaaggttacgaccagtaacgccgccggtggtggacgccagagcaaaacgatgatgcagcatgtggtgacacccaagaggaggagggcatccataagttaataatcatgacgctgtcgtgtaattttaggaggataccgtgtgtgcatggcttgtagtttgattattattgtgtgtttttagtttattattgtgctaatatataaatgaatgcgtgtgtagtaccaagtggtttgctaaatcagacgataattttacatgttcgcatcgtagtcatcaattttaggccctgtttgggaacaaagtttttgaaaaccaca

SEQ ID NO: 13038 - DNA, 3048 bp, Zea Mays
atatctccgacgtggcgagccggcactggccccgcgtatacggaggccggattcctgcggggccccggcgctatcctccgacggccgacgtgtcctgccggcgtccacacggggctggggaaactagtcgccggcgtacgcggaggtccgctcaatccggcggcgtcgtggggccggatcgaatctgcgccgcttgatcgttcgcgcggccgccgcggacagcggactgaaagcgaggtgatgatcctgctggctcggccgatcgacagggctgggccaccggcgccgcgcgcctcgtgctcttgcgtgctgctgttggctgttgccgccgagaccgagagctgctcctcctgctctcgtatacgtgctcaaggttgtcgggtacatgagacggcgctttcgttcttccggcgtgaggttgacgctgacaatggcgtgcgtggaattccagtgtcgtcgagacttgagacggaggccctgtctgctcgtgctcgtctcgtccaagagcaaggaggccgggcgggccagggcccagggccaccacggcaagcaatggccattggaagtaactgacagggacgagggcgagtcgacggcgacgccgccgttccaagccggccccaacttgcaagcgatttttggtttttgtttttttgtttttgctcgcgcctcgccggtggagtcgacgcctctaatactaataattcaaataaacaccagccatgaaaaaacgcagcttgttctttttctttttatgttttgtaccagccaaataagaatgctatgagcaactggaacgggaacctctcgtagtatatatatgagagggatcgggcaggaaactgcttcgtgaagaggctgagagctcgccttgcatgcacgcgcacacctctgcttgggtgtacgtgcacagcggcagcagcggactaggagctccatgcatctgtctctagggtgtagagatcctgctcattgtacggtagctgccaccgtctcatcgtcaaccatgtctgctgcttccaccgtggatcctcatcctcctcatcagcagcagcagtgcagcgataaggtgtcgtccatggagatggagatccccgccgaccttatcatccggatcggcgagtccgttttccctctccacaaggcggtgatggtgcccaagtgcggctacatccgccgggccgtcgaggcggtggcgaccaggcccagcagcaagggcggcgccgacgccgacgccgacccgccggccaccgtcgagctggacctctcggcgctgccgggcggcgccgacgcgttcgacaaggcggcgcgctactgctacggcgccaacttcgagatcacgccgcaaaacgcggcggcgctgcgctgcgccgcggcgttcctggacatgcgccacgcctcagcggacctggccgggcgcgtggacgagttcctggcgcgggcggcgctgcgcgcgctcccgggcgccgtggccgtgctccgctcctgcgaggcgcccggcctgcgcgcggccgccgaggagctcggcgtcgcgcgccgcgccgcggacgccgtcgcgcgcggcgtctgcgccgaggcgctgtccctgtcgtactcgtcggcgtcgcgcggccccgggtggtggaagctggagctggcggcgctgtcgccgcgctcgttcgggaaggtcgtcacggcgctgcggtgccgccgcgccgagccggccgtggtggccgcggcggcggcggcctacgcggagctcacgactgagattcggcgcggaccaccgcgcgctgctcgagtccgtggtcgacgtgctgggaaacaccacgcgcccggcgtcccggcgccgttcctctgccgcctcctccacgccgccgtcgccgccggggcgtccgccaagacgtgccgcgacctcgagctccgcgtcgccgccgtgctcgaccaggccaccgcccaggacctgctcgccgtcgcgctggacgccaccggggagcgcgtcaggaacacggacatcgtgcgccgcgtcgtcgtcgccttcgtcgagcgccaggcggcggtgacgcccgcgggtgagcggaggagccgccgggcgtccatgtccgggacgacggcggcgacggagctcggtgccgccaggcccggcgcgctggagaaggtcgccatgatggtggacgaagtggcggcggagatcgcgacggaggaggcgctgcccatctccaagttcgtcggcgtggccggcgcggtgcccaaggacgcgcgcccgtcgcacgactgcctgtaccgcgccgtcgacatctacctcaagacgcacccggagctggacgagatccagcgggagaaggtctgcagcgtcatggacccgctcaagctctcgtaccaggcgcgcacgcacgcgtcgcagaacaagcggctgccgctgcaggccgcgctcagcgcgctctactacgacgagctcaagctccgcagcgccgcgacggccgacgtggtattggacacgcagtcgtcggccgcggggagggcttgcgcgcaggccagggcggcggacgcggcgctggcgcgagagaacgaggcgctgcggtcagagctggcacggatgcgggcctacctgtcagggatggagcgcagcaaagggggccggtcaacgccgccgtcctcgccgtctcggagggcaaagaaagcaagcttcctgggctccgtgtcccgcactatgagtcggctgaacccgtttagaagtggggggtggatggcgaaggttacgaccagtaacgccgccggtggtggacgccagagcaaaacgatgatgcagcatgtggtgacacccaagaggaggagggcatccataagttaataatcatgacgctgtcgtgtaattttaggaggataccgtgtgtgcatggcttgtagtttgattattattgtgtgtttttagtttattattgtgctaatatataaatgaatgcgtgtgtagtaccaagtggtttgctaaatcagacgataattttacatgttcgcatcgtagtcatcaattttaggccctgtttgggaacaaagtttttgaaaaccaca

SEQ ID NO: 13039 - DNA, 1151 bp, Zea Mays
atgtctgctgcttccaccgtggatcctcatcctcctcatcagcagcagcagtgcgataaggtgtcgtccatggagatggagatccccgccgaccttatcatccggatcggcgagtccgttttccctctccacaaggcggcggtgacgcccgcgggtgagcggaggagccgccgggcgtccatgtccgggacgacggcggcgacggagctcggtgccgccaggcccggcgcgctggagaaggtcgccatgatggtggacgaagtggcggcggagatcgcgacggaggaggcgctgcccatctccaagttcgtcggcgtggccggcgcggtgcccaaggacgcgcgcccgtcgcacgactgcctgtaccgcgccgtcgacatctacctcaagacgcacccggagctggacgagatccagcgggagaaggtctgcagcgtcatggacccgctcaagctctcgtaccaggcgcgcacgcacgcgtcgcagaacaagcggctgccgctgcaggccgcgctcagcgcgctctactacgacgagctcaagctccgcagcgccgcgacggccgacgtggtattggacacgcagtcgtcggccgcggggagggcttgcgcgcaggccagggcggcggacgcggcgctggcgcgagagaacgaggcgctgcggtcagagctggcacggatgcgggcctacctgtcagggatggagcgcagcaaagggggccggtcaacgccgccgtcctcgccgtctcggagggcaaagaaagcaagcttcctgggctccgtgtcccgcactatgagtcggctgaacccgtttagaagtggggggtggatggcgaaggttacgaccagtaacgccgccggtggtggacgccagagcaaaacgatgatgcagcatgtggtgacacccaagaggaggagggcatccataagttaataatcatgacgctgtcgtgtaattttaggaggataccgtgtgtgcatggcttgtagtttgattattattgtgtgtttttagtttattattgtgctaatatataaatgaatgcgtgtgtagtaccaagtggtttgctaaatcagacgataattttacatgttcgcatcgtagtcatcaattttaggccctgtttgggaacaaagtttttgaaaaccaca

SEQ ID NO: 13040 - DNA, 2081 bp, Zea Mays
atgtctgctgcttccaccgtggatcctcatcctcctcatcagcagcagcagtgcgataaggtgtcgtccatggagatggagatccccgccgaccttatcatccggatcggcgagtccgttttccctctccacaagactgacgtgaacaacggactctgctcgtacgagaacactcaggcggtgatggtgcccaagtgcggctacatccgccgggccgtcgaggcggtggcgaccaggcccagcagcaagggcggcgccgacgccgacgccgacccgccggccaccgtcgagctggacctctcggcgctgccgggcggcgccgacgcgttcgacaaggcggcgcgctactgctacggcgccaacttcgagatcacgccgcaaaacgcggcggcgctgcgctgcgccgcggcgttcctggacatgcgccacgcctcagcggacctggccgggcgcgtggacgagttcctggcgcgggcggcgctgcgcgcgctcccgggcgccgtggccgtgctccgctcctgcgaggcgcccggcctgcgcgcggccgccgaggagctcggcgtcgcgcgccgcgccgcggacgccgtcgcgcgcggcgtctgcgccgaggcgctgtccctgtcgtactcgtcggcgtcgcgcggccccgggtggtggaagctggagctggcggcgctgtcgccgcgctcgttcgggaaggtcgtcacggcgctgcggtgccgccgcgccgagccggccgtggtggccgcggcggcggcggcctacgcggagctcacgactgagattcggcgcggaccaccgcgcgctgctcgagtccgtggtcgacgtgctgggaaacaccacgcgcccggcgtcccggcgccgttcctctgccgcctcctccacgccgccgtcgccgccggggcgtccgccaagacgtgccgcgacctcgagctccgcgtcgccgccgtgctcgaccaggccaccgcccaggacctgctcgccgtcgcgctggacgccaccggggagcgcgtcaggaacacggacatcgtgcgccgcgtcgtcgtcgccttcgtcgagcgccaggcggcggtgacgcccgcgggtgagcggaggagccgccgggcgtccatgtccgggacgacggcggcgacggagctcggtgccgccaggcccggcgcgctggagaaggtcgccatgatggtggacgaagtggcggcggagatcgcgacggaggaggcgctgcccatctccaagttcgtcggcgtggccggcgcggtgcccaaggacgcgcgcccgtcgcacgactgcctgtaccgcgccgtcgacatctacctcaagacgcacccggagctggacgagatccagcgggagaaggtctgcagcgtcatggacccgctcaagctctcgtaccaggcgcgcacgcacgcgtcgcagaacaagcggctgccgctgcaggccgcgctcagcgcgctctactacgacgagctcaagctccgcagcgccgcgacggccgacgtggtattggacacgcagtcgtcggccgcggggagggcttgcgcgcaggccagggcggcggacgcggcgctggcgcgagagaacgaggcgctgcggtcagagctggcacggatgcgggcctacctgtcagggatggagcgcagcaaagggggccggtcaacgccgccgtcctcgccgtctcggagggcaaagaaagcaagcttcctgggctccgtgtcccgcactatgagtcggctgaacccgtttagaagtggggggtggatggcgaaggttacgaccagtaacgccgccggtggtggacgccagagcaaaacgatgatgcagcatgtggtgacacccaagaggaggagggcatccataagttaataatcatgacgctgtcgtgtaattttaggaggataccgtgtgtgcatggcttgtagtttgattattattgtgtgtttttagtttattattgtgctaatatataaatgaatgcgtgtgtagtaccaagtggtttgctaaatcagacgataattttacatgttcgcatcgtagtcatcaattttaggccctgtttgggaacaaagtttttgaaaaccaca

SEQ ID NO: 13041 - DNA, 1799 bp, Zea Mays
ctggcctcgtgtctgctgttttgatctgctcttgggaaacgagtacatggcattagaaaattaaagctgcagctagctgcattatacgtgctcgagggaatcaaaagttgagcctctcccatctcaatcaaatctataggggagtagctcttgctcttggcttcgctcgctaacaatcagtgaactgaacaccttccgcctcccggtctcctccctgcccggtgctgaagaaccctgccatccccggaactggatcgatctgccgccaactctgaaaatccatccgatccatctctgtcgtccaagtctactccccgatggacattatttaccaggacagcagttgtcttgccctagagcaggcgctacatgatgaaggcgtgggaccaatcgacctacctttcatgcttctcagggccatcacaaaagatttctctgatactcaactaattggcaggggtgggttcggagaggtttacaagggagtgcttccaaatgggatggtcgtcgccgtgaagaagcttcttgacaagatcgatgtcctagaggcgaatttccaaagcgaggttgcttgtctcatagaggtcaagcacaggaacatagtccgatgtctagggtactcatccgagacgcaacatgtgagggcaccctacgaaggaagatttgtctgggcagacctgcgccaaaggttgttttgcttcgaatacctaagcaaagggagccttgccgattatctgaccgggggtatttggcacctgaatttctgagcagcaatgcaatcacattcaaggcggacatatacagtctaggtgttataatcactgagattctgacggggcataaggaatgcaccagtgttgacaaggtgcttgaaagctggacggacatgtttcagacattaggaagccatccgctactagaacaagtagaagtatgcgctgagatagcgataaattgcatgaacgatgacccgagcaacaggcctaccatacaggatattatctccagtatcgatgaaacggacgctcgaagtgtcacaagttcttcaccaggagggcaggttattaccatggccggcagcgaaagcagcagcagtaggagcaggtcgccatgcgcgtcgtgcaggatgctgcgccagcagtgcacacaggagtgcgtgttcgcgccctacttccccgccgaggaacctcacaagttcgccatcgtccacaaggttttcggtggcagcaatgtcttcaagttactgcaggagctgcctgcccaccagagaggggatgcggtgagcagtatggtttatgaggccaacgttcgcaccagggaccctgtctatggctgcgtgggcgccatctccgtgctccagcaacagatctcccagctccagatgcagttctccatggcccgtgctgagatcttaacattgcagcaacagatggatgtcaatgatagcctacccagtcaaaatagctttgacagatatggcaatggtgatctgaaacctgactccccgcccgaaattctttcatcggaggatgaggttgaggaagtttcttccccaatgtctccatagagatttggatttttccattataaagaataggcttcacaaaattgccactggtctcgcatttcatagactcagatagtcagatggacccatcgttcataaactaagtgacaattataatcaaagagatgatctttcgagtggcaaaaatcctaatttctcgtgtccctgtggggatccattaaacttacatatgacgatgttttttatataatagtcaatgataaaaataaat

SEQ ID NO: 13042 - DNA, 1753 bp, Zea Mays
gtctgctgttttgatctgctcttgggaaacgagtacatggcattagaaaattaaagctgcagctagctgcattatacgtgctcgagggaatcaaaagttgagcctctcccatctcaatcaaatctataggggagtagctcttgctcttggcttcgctcgctaacaatcagtgaactgaacaccttccgcctcccggtctcctccctgcccggtgctgaagaaccctgccatccccggaactggatcgatctgccgccaactctgaaaatccatccgatccatctctgtcgtccaagtctactccccgatggacattatttaccaggacagcagttgtcttgccctagagcaggcgctacatgatgaaggcgtgggaccaatcgacctacctttcatgcttctcagggccatcacaaaagatttctctgatactcaactaattggcaggggtgggttcggagaggtttacaaggggcatcttttgcacttcagtggagtgtgcgctaccaaataatcaaggggatttgtgagggtgtgggttatcttcaccagcacaatattattcacatggacctcaaacctcaaaatatacttcttgacgataacatggtgccaaaaatcgcggattttggtctgtccaggcgcttaagtgaaaatcagagcaggatcattactaaaacaataattgggacgccggggtatttggcacctgaatttctgagcagcaatgcaatcacattcaaggcggacatatacagtctaggtgttataatcactgagattctgacggggcataaggaatgcaccagtgttgacaaggtgcttgaaagctggacggacatgtttcagacattaggaagccatccgctactagaacaagtagaagtatgcgctgagatagcgataaattgcatgaacgatgacccgagcaacaggcctaccatacaggatattatctccagtatcgatgaaacggacgctcgaagtgtcacaagttcttcaccaggagggcaggttattaccatggccggcagcgaaagcagcagcagtaggagcaggtcgccatgcgcgtcgtgcaggatgctgcgccagcagtgcacacaggagtgcgtgttcgcgccctacttccccgccgaggaacctcacaagttcgccatcgtccacaaggttttcggtggcagcaatgtcttcaagttactgcaggagctgcctgcccaccagagaggggatgcggtgagcagtatggtttatgaggccaacgttcgcaccagggaccctgtctatggctgcgtgggcgccatctccgtgctccagcaacagatctcccagctccagatgcagttctccatggcccgtgctgagatcttaacattgcagcaacagatggatgtcaatgatagcctacccagtcaaaatagctttgacagatatggcaatggtgatctgaaacctgactccccgcccgaaattctttcatcggaggatgaggttgaggaagtttcttccccaatgtctccatagagatttggatttttccattataaagaataggcttcacaaaattgccactggtctcgcatttcatagactcagatagtcagatggacccatcgttcataaactaagtgacaattataatcaaagagatgatctttcgagtggcaaaaatcctaatttctcgtgtccctgtggggatccattaaacttacatatgacgatgttttttatataatagtcaatgataaaaataaat

SEQ ID NO: 13043 - DNA, 1530 bp, Zea Mays
gtctgctgttttgatctgctcttgggaaacgagtacatggcattagaaaattaaagctgcagctagctgcattatacgtgctcgagggaatcaaaagttgagcctctcccatctcaatcaaatctataggggagtagctcttgctcttggcttcgctcgctaacaatcagtgaactgaacaccttccgcctcccggtctcctccctgcccggtgctgaagaaccctgccatccccggaactggatcgatctgccgccaactctgaaaatccatccgatccatctctgtcgtccaagtctactccccgatggacattatttaccaggacagcagttgtcttgccctagagcaggcgctacatgatgaaggcgtgggaccaatcgacctacctttcatgcttctcagggccatcacaaaagatttctctgatactcaactaattggcaggggtgggttcggagaggtttacaagggggtatttggcacctgaatttctgagcagcaatgcaatcacattcaaggcggacatatacagtctaggtgttataatcactgagattctgacggggcataaggaatgcaccagtgttgacaaggtgcttgaaagctggacggacatgtttcagacattaggaagccatccgctactagaacaagtagaagtatgcgctgagatagcgataaattgcatgaacgatgacccgagcaacaggcctaccatacaggatattatctccagtatcgatgaaacggacgctcgaagtgtcacaagttcttcaccaggagggcaggttattaccatggccggcagcgaaagcagcagcagtaggagcaggtcgccatgcgcgtcgtgcaggatgctgcgccagcagtgcacacaggagtgcgtgttcgcgccctacttccccgccgaggaacctcacaagttcgccatcgtccacaaggttttcggtggcagcaatgtcttcaagttactgcaggagctgcctgcccaccagagaggggatgcggtgagcagtatggtttatgaggccaacgttcgcaccagggaccctgtctatggctgcgtgggcgccatctccgtgctccagcaacagatctcccagctccagatgcagttctccatggcccgtgctgagatcttaacattgcagcaacagatggatgtcaatgatagcctacccagtcaaaatagctttgacagatatggcaatggtgatctgaaacctgactccccgcccgaaattctttcatcggaggatgaggttgaggaagtttcttccccaatgtctccatagagatttggatttttccattataaagaataggcttcacaaaattgccactggtctcgcatttcatagactcagatagtcagatggacccatcgttcataaactaagtgacaattataatcaaagagatgatctttcgagtggcaaaaatcctaatttctcgtgtccctgtggggatccattaaacttacatatgacgatgttttttatataatagtcaatgataaaaataaat

SEQ ID NO: 13044 - DNA, 3028 bp, Zea Mays
acgagtacatggcattagaaaattaaagctgcagctagctgcattatacgtgctcgagggaatcaaaagttgagcctctcccatctcaatcaaatctataggggagtagctcttgctcttggcttcgctcgctaacaatcagtgaactgaacaccttccgcctcccggtctcctccctgcccggtgctgaagaaccctgccatccccggaactggatcgatctgccgccaactctgaaaatccatccgatccatctctgtcgtccaagtctactccccgatggacattatttaccaggacagcagttgtcttgccctagagcaggcgctacatgatgaaggcgtgggaccaatcgacctacctttcatgcttctcagggccatcacaaaagatttctctgatactcaactaattggcaggggtgggttcggagaggtttacaagggagtgcttccaaatgggatggtcgtcgccgtgaagaagcttcttgacaagatcgatgtcctagaggcgaatttccaaagcgaggttgcttgtctcatagaggtcaagcacaggaacatagtccgatgtctagggtactcatccgagacgcaacatgtgagggcaccctacgaaggaagatttgtctgggcagacctgcgccaaaggttgttttgcttcgaatacctaagcaaagggagccttgccgattatctgaccggtaacatcgatcagtcgccacaaacatctcatcttttacatatagcaaatgttttgagcactactatatatacattttcctggcttgtgtcggtgttaaggtttgcatcgttctgttgtgccagtgactatatttgtagattttcattatttttgaatttttcaaagtacctcaaatcgagaagatacctaaaccaatttttttttattcaaagagtcataaaactaacttcttcagaatacccttttaacaaggcgaagaaagacatcgtatacattgaaagtctactaaccactaggtttatcagtgtaaaacatcttccaatagataagtgttttcctcttcaactactcaaacgtttcttaaagcattcatccacacttttccaatctacatttcttagtttcttataaaggatgggacacctaaatatcacattggattgcaccagacttacaaccaaataatgatgtgcattgttcgatttcttattgggcatctccaaagcaaaataattcttttatgaaagttgccttttagatctgagacttgctcaataatttcatatttttgagctttcccaaaccatgataaaaaaagagaattatatgatctgcaattatgcatgctgaagaattatatcaataagatgtgggactacactagtaatatacccctcttctttagcccattttattagaactacttgttctacccctcttctttagcctgttttattagaactacaaacatatctgcaacaatgttaaagagcaaaggagacaattgatcttcatgttgaaggtcttttctggtttggaaaaaaaacgcccgacatcattattgacatttcttgcatgctggcaagcccatattattaatttctgcagattgccacaccccacattttgaccataccaaattttagcacagaaaaatgtgctttatttgcacgtaatgcaaccagcaaagttgggaattcctacctttgtgttagactggcatataactagaattaattgttgtactttatactcttcacaggggcatcttttgcacttcagtggagtgtgcgctaccaaataatcaaggggatttgtgagggtgtgggttatcttcaccagcacaatattattcacatggacctcaaacctcaaaatatacttcttgacgataacatggtgccaaaaatcgcggattttggtctgtccaggcgcttaagtgaaaatcagagcaggatcattactaaaacaataattgggacgccggggtatttggcacctgaatttctgagcagcaatgcaatcacattcaaggcggacatatacagtctaggtgttataatcactgagattctgacggggcataaggaatgcaccagtgttgacaaggtgcttgaaagctggacggacatgtttcagacattaggaagccatccgctactagaacaagtagaagtatgcgctgagatagcgataaattgcatgaacgatgacccgagcaacaggcctaccatacaggatattatctccagtatcgatgaaacggacgctcgaagtgtcacaagttcttcaccaggagggcaggttattaccatggccggcagcgaaagcagcagcagtaggagcaggtcgccatgcgcgtcgtgcaggatgctgcgccagcagtgcacacaggagtgcgtgttcgcgccctacttccccgccgaggaacctcacaagttcgccatcgtccacaaggttttcggtggcagcaatgtcttcaagttactgcaggagctgcctgcccaccagagaggggatgcggtgagcagtatggtttatgaggccaacgttcgcaccagggaccctgtctatggctgcgtgggcgccatctccgtgctccagcaacagatctcccagctccagatgcagttctccatggcccgtgctgagatcttaacattgcagcaacagatggatgtcaatgatagcctacccagtcaaaatagctttgacagatatggcaatggtgatctgaaacctgactccccgcccgaaattctttcatcggaggatgaggttgaggaagtttcttccccaatgtctccatagagatttggatttttccattataaagaataggcttcacaaaattgccactggtctcgcatttcatagactcagatagtcagatggacccatcgttcataaactaagtgacaattataatcaaagagatgatctttcgagtggcaaaaatcctaatttctcgtgtccctgtggggatccattaaacttacatatgacgatgttttttatataatagtcaatgataaaaataaat

SEQ ID NO: 13045 - DNA, 1449 bp, Zea Mays
caaatgttttgagcactactatatatacattttcctggcttgtgtcggtgttaaggggcatcttttgcacttcagtggagtgtgcgctaccaaataatcaaggggatttgtgagggtgtgggttatcttcaccagcacaatattattcacatggacctcaaacctcaaaatatacttcttgacgataacatggtgccaaaaatcgcggattttggtctgtccaggcgcttaagtgaaaatcagagcaggatcattactaaaacaataattgggacgccgtaggctacctaattacctccgagacatcttttttgatttgtcaacagctcagttgaatacccgttatttgatttaccactcactacatcaatattttttattcttcacgcagggggtatttggcacctgaatttctgagcagcaatgcaatcacattcaaggcggacatatacagtctaggtgttataatcactgagattctgacggggcataaggaatgcaccagtgttgacaaggtgcttgaaagctggacggacatgtttcagacattaggaagccatccgctactagaacaagtagaagtatgcgctgagatagcgataaattgcatgaacgatgacccgagcaacaggcctaccatacaggatattatctccagtatcgatgaaacggacgctcgaagtgtcacaagttcttcaccaggagggcaggttattaccatggccggcagcgaaagcagcagcagtaggagcaggtcgccatgcgcgtcgtgcaggatgctgcgccagcagtgcacacaggagtgcgtgttcgcgccctacttccccgccgaggaacctcacaagttcgccatcgtccacaaggttttcggtggcagcaatgtcttcaagttactgcaggagctgcctgcccaccagagaggggatgcggtgagcagtatggtttatgaggccaacgttcgcaccagggaccctgtctatggctgcgtgggcgccatctccgtgctccagcaacagatctcccagctccagatgcagttctccatggcccgtgctgagatcttaacattgcagcaacagatggatgtcaatgatagcctacccagtcaaaatagctttgacagatatggcaatggtgatctgaaacctgactccccgcccgaaattctttcatcggaggatgaggttgaggaagtttcttccccaatgtctccatagagatttggatttttccattataaagaataggcttcacaaaattgccactggtctcgcatttcatagactcagatagtcagatggacccatcgttcataaactaagtgacaattataatcaaagagatgatctttcgagtggcaaaaatcctaatttctcgtgtccctgtggggatccattaaacttacatatgacgatgttttttatataatagtcaatgataaaaataaat

SEQ ID NO: 13046 - DNA, 653 bp, Zea Mays
accttaagccggcgagcgccaagtcggccatgaaattcaatccagcaacacaaaggggaaatagtagctaacacagcaagcgaaaaaagtggagattggagatcttacacgaagtaaaataaatcaagggcgtatggagtagaatctggaacaagcacagcacagcaaggagggaagcagctccgtcgggcagggaacggaggaataccggatggtgttgctgattgctggtgatagatgatttgttttttatgtagaagagaccgaaggtgccgtagactgctgagggtctactgctcgctgggaaaggaagcagcatgcaaaagagaaaggtgaacaagcggtgaacaagcggagtagactagtctatggattaggactgctctgaattattgttgggagctagtgtatcgattgggactgctctgaattatgcagttcgagtgaataaacacagacaaagaaagcttttggagctttccttggagtcccctattttttttagacatggttgtacgttgcaagaggagctgagcttgatatgaaagtagaagacgagatccccatgagttggaccaacaattcatctggccataaaaattgagagcttccagtacagaccaaaatcctaaaaaaaactatctctttcattt

SEQ ID NO: 13047 - DNA, 1828 bp, Zea Mays
ctccaacgtcgtacatgtctcctctccttctggtccctttctccctccaatgccagcgcatccctcttccccctcgtggctcgcggtcgccgctggcgttcctgctccgggccttccacatggtgatgggcgacctgagcacctccgacgacctcgccacgcgccaccacctcacccaccgtccacccatcacctttcctgtaaacctcggcgacctcctcctcaatctcatgatgttgtcctgcaagtctcccccgagccctctcctcaagccctaccacgcccagctaggccacaacagcgccaagatctaggccatgtctccaacttagcaacttattgcagcacaacacgagatctggatggtctgcatcgttgccaccgtggcgcgcaccgagcaggaggacgaggtgccagccctgaccgaccaggcggcccacatagaggtgcgcacacggaggtttactaggtcgacgactacgtctaggtgttcgtcgtggcgtgtactgacctcatcaaccggctccagggcctacgcgagaacctcacgaacgtgaggtctgaggtgtcttcagctaggccctgcagagcatccttgttttctcacgttgccatattcagatctctttgattgacacatgacatctgggttttgaggccaagtacatccttaatctcgtgttacttagccccaaacaagcaagtacaaccactatgacagaggctgttatgggagttctgaccagcaagcttggtgtggccttagcaaaaggggcagcagcctatggtgcatctctggatttcaaggaagcgtctactcaatgattttttaaatatctcctgcattcacatagcctcagcctcacatgtatgtggccttgaacagaattgatggataatcactattcaagcactctgctccacagtatcttgtcttggcaccttaacatatgacgacactaatgttcgttttctggagtggcctgatgatttggagggttttgttctaaaaggctatggtgagtctgtcattgctcaaggatgttgtccagtcaatggaagaaacaatcaatagctagagaaggccacactacaaaacatcattgagcgcagaaacacgacatggtgctaggtcacaaggtgatgaagacatccacactactgatgcatctataccaatacaagtaccaatttctggtcccattactcgcgctcgtgctcgtcaactcaaccatcaggtgattacactcttgagttcatgtccatcatatttagaccatggagacccgtgcactcttgttttgcttaggaatcagggagaagaccgaaagggaaaaggatttgaacatgctggattcggactgcagaagaacaccaacttgtgacggtcaccacggtcagatgcgggctcggattggaatgttcaagcacaacatggaaagcttatcaagtctactttcatatggatccggaattatagtcatatctgttctgaggccgccgtaatcattgttttcttaccgagacatttcctgccttttctgcctatggtgctgcgtcaccctattttggcccaatgggtcgtatatcaagttaggtccattagggacgcatcctagggttgcagcacgaccccaatacccttgtggtcgtcctcccatgtttataaaccccctagccgccaccaagaacagcgggttttgtttagatcaagtttagctctcgctacttgcttgcaagcgcgcgtgctagttcagccgcccgtcttcttgtcttcggaaccccaccatattggagtttgatttttaaacctacatttggatctggt

SEQ ID NO: 13048 - DNA, 1681 bp, Zea Mays
caacgtcgtacatgtctcctctccttctggtccctttctccctccaatgccagcgcatccctcttccccctcgtggctcgcggtcgccgctggcgttcctgctccgggccttccacatggtgatgggcgacctgagcacctccgacgacctcgccacgcgccaccacctcacccaccgtccacccatcacctttcctgtaaacctcggcgacctcctcctcaatctcatgatgttgtcctgcaagtctcccccgagccctctcctcaagccctaccacgcccagctaggccacaacagcgccaagatctaggccatgtctccaacttagcaacttattgcagcacaacacgagatctggatggtctgcatcgttgccaccgtggcgcgcaccgagcaggaggacgaggtgccagccctgaccgaccaggcggcccacatagagggcctacgcgagaacctcacgaacgtgaggtctgaggtgtcttcagctaggccctgcagagcatccttgttttctcacgttgccatattcaggccaagtacatccttaatctcgtgttacttagccccaaacaagcaagtacaaccactatgacagaggctgttatgggagttctgaccagcaagcttggtgtggccttagcaaaaggggcagcagcctatgaattgatggataatcactattcaagcactctgctccacagtatcttgtcttggcaccttaacatatgacgacactaattgaagaacaacaaattttgactgaagacgttgacgtggaatcttctgtgccaataggagcaaataaacaaacaggttcgttttctggagtggcctgatgatttggagggttttgttctaaaaggctatggtgagtctgtcattgctcaaggatgttgtccagtcaatggaagaaacaatcaatagctagagaaggccacactacaaaacatcattgagcgcagaaacacgacatggtgctaggtcacaaggtgatgaagacatccacactactgatgcatctataccaatacaagtaccaatttctggtcccattactcgcgctcgtgctcgtcaactcaaccatcaggtgattacactcttgagttcatgtccatcatatttagaccatggagacccgtgcactcttgttttgcttaggaatcagggagaagaccgaaagggaaaaggatttgaacatgctggattcggactgcagaagaacaccaacttgtgacggtcaccacggtcagatgcgggctcggattggaatgttcaagcacaacatggaaagcttatcaagtctactttcatatggatccggaattatagtcatatctgttctgaggccgccgtaatcattgttttcttaccgagacatttcctgccttttctgcctatggtgctgcgtcaccctattttggcccaatgggtcgtatatcaagttaggtccattagggacgcatcctagggttgcagcacgaccccaatacccttgtggtcgtcctcccatgtttataaaccccctagccgccaccaagaacagcgggttttgtttagatcaagtttagctctcgctacttgcttgcaagcgcgcgtgctagttcagccgcccgtcttcttgtcttcggaaccccaccatattggagtttgatttttaaacctacatttggatctggt

SEQ ID NO: 13049 - DNA, 1899 bp, Zea Mays
caacgtcgtacatgtctcctctccttctggtccctttctccctccaatgccagcgcatccctcttccccctcgtggctcgcggtcgccgctggcgttcctgctccgggccttccacatggtgatgggcgacctgagcacctccgacgacctcgccacgcgccaccacctcacccaccgtccacccatcacctttcctgtaaacctcggcgacctcctcctcaatctcatgatgttgtcctgcaagtctcccccgagccctctcctcaagccctaccacgcccagctaggccacaacagcgccaagatctaggccatgtctccaacttagcaacttattgcagcacaacacgagatctggatggtctgcatcgttgccaccgtggcgcgcaccgagcaggaggacgaggtgccagccctgaccgaccaggcggcccacatagaggtgcgcacacggaggtttactaggtcgacgactacgtctaggtgttcgtcgtggcgtgtactgacctcatcaaccggctccagggcctacgcgagaacctcacgaacgtgaggtctgaggtgtcttcagctaggccctgcagagcatccttgttttctcacgttgccatattcagatctctttgattgacacatgacatctgggttttgaggccaagtacatccttaatctcgtgttacttagccccaaacaagcaagtacaaccactatgacagaggctgttatgggagttctgaccagcaagcttggtgtggccttagcaaaaggggcagcagcctatggtgcatctctggatttcaaggaagcgtctactcaatgattttttaaatatctcctgcattcacatagcctcagcctcacatgtatgtggccttgaacagaattgatggataatcactattcaagcactctgctccacagtatcttgtcttggcaccttaacatatgacgacactaattgaagaacaacaaattttgactgaagacgttgacgtggaatcttctgtgccaataggagcaaataaacaaacaggttcgttttctggagtggcctgatgatttggagggttttgttctaaaaggctatggtgagtctgtcattgctcaaggatgttgtccagtcaatggaagaaacaatcaatagctagagaaggccacactacaaaacatcattgagcgcagaaacacgacatggtgctaggtcacaaggtgatgaagacatccacactactgatgcatctataccaatacaagtaccaatttctggtcccattactcgcgctcgtgctcgtcaactcaaccatcaggtgattacactcttgagttcatgtccatcatatttagaccatggagacccgtgcactcttgttttgcttaggaatcagggagaagaccgaaagggaaaaggatttgaacatgctggattcggactgcagaagaacaccaacttgtgacggtcaccacggtcagatgcgggctcggattggaatgttcaagcacaacatggaaagcttatcaagtctactttcatatggatccggaattatagtcatatctgttctgaggccgccgtaatcattgttttcttaccgagacatttcctgccttttctgcctatggtgctgcgtcaccctattttggcccaatgggtcgtatatcaagttaggtccattagggacgcatcctagggttgcagcacgaccccaatacccttgtggtcgtcctcccatgtttataaaccccctagccgccaccaagaacagcgggttttgtttagatcaagtttagctctcgctacttgcttgcaagcgcgcgtgctagttcagccgcccgtcttcttgtcttcggaaccccaccatattggagtttgatttttaaacctacatttggatctggt

SEQ ID NO: 13050 - DNA, 1940 bp, Zea Mays
ttctccctccaatgccagcgcatccctcttccccctcgtggctcgcggtcgccgctggcgttcctgctccgggccttccacatggtgatgggcgacctgagcacctccgacgacctcgccacgcgccaccacctcacccaccgtccacccatcacctttcctgtaaacctcggcgacctcctcctcaatctcatgatgttgtcctgcaagtctcccccgagccctctcctcaagccctaccacgcccagctaggccacaacagcgccaagatctaggccatgtctccaacttagcaacttattgcagcacaacacgagatctggatggtctgcatcgttgccaccgtggcgcgcaccgagcaggaggacgaggtgccagccctgaccgaccaggcggcccacatagaggtgcgcacacggaggtttactaggtcgacgactacgtctaggtgttcgtcgtggcgtgtactgacctcatcaaccggctccagggcctacgcgagaacctcacgaacgtgaggtctgaggtgtcttcagctaggccctgcagagcatccttgttttctcacgttgccatattcaggtatccatgttcttcagttcacaatttgttcaatgttggttctgaaattcagattcttcacctgaaaacaagatctctttgattgacacatgacatctgggttttgaggccaagtacatccttaatctcgtgttacttagccccaaacaagcaagtacaaccactatgacagaggctgttatgggagttctgaccagcaagcttggtgtggccttagcaaaaggggcagcagcctatggtgcatctctggatttcaaggaagcgtctactcaatgattttttaaatatctcctgcattcacatagcctcagcctcacatgtatgtggccttgaacagaattgatggataatcactattcaagcactctgctccacagtatcttgtcttggcaccttaacatatgacgacactaatgtgatgaagaacaacaaattttgactgaagacgttgacgtggaatcttctgtgccaataggagcaaataaacaaacaggttcgttttctggagtggcctgatgatttggagggttttgttctaaaaggctatggtgagtctgtcattgctcaaggatgttgtccagtcaatggaagaaacaatcaatagctagagaaggccacactacaaaacatcattgagcgcagaaacacgacatggtgctaggtcacaaggtgatgaagacatccacactactgatgcatctataccaatacaagtaccaatttctggtcccattactcgcgctcgtgctcgtcaactcaaccatcaggtgattacactcttgagttcatgtccatcatatttagaccatggagacccgtgcactcttgttttgcttaggaatcagggagaagaccgaaagggaaaaggatttgaacatgctggattcggactgcagaagaacaccaacttgtgacggtcaccacggtcagatgcgggctcggattggaatgttcaagcacaacatggaaagcttatcaagtctactttcatatggatccggaattatagtcatatctgttctgaggccgccgtaatcattgttttcttaccgagacatttcctgccttttctgcctatggtgctgcgtcaccctattttggcccaatgggtcgtatatcaagttaggtccattagggacgcatcctagggttgcagcacgaccccaatacccttgtggtcgtcctcccatgtttataaaccccctagccgccaccaagaacagcgggttttgtttagatcaagtttagctctcgctacttgcttgcaagcgcgcgtgctagttcagccgcccgtcttcttgtcttcggaaccccaccatattggagtttgatttttaaacctacatttggatctggt

SEQ ID NO: 13051 - DNA, 1723 bp, Zea Mays
ctccaatgccagcgcatccctcttccccctcgtggctcgcggtcgccgctggcgttcctgctccgggccttccacatggtgatgggcgacctgagcacctccgacgacctcgccacgcgccaccacctcacccaccgtccacccatcacctttcctgtaaacctcggcgacctcctcctcaatctcatgatgttgtcctgcaagtctcccccgagccctctcctcaagccctaccacgcccagctaggccacaacagcgccaagatctaggccatgtctccaacttagcaacttattgcagcacaacacgagatctggatggtctgcatcgttgccaccgtggcgcgcaccgagcaggaggacgaggtgccagccctgaccgaccaggcggcccacatagaggtgcgcacacggaggtttactaggtcgacgactacgtctaggtgttcgtcgtggcgtgtactgacctcatcaaccggctccagggcctacgcgagaacctcacgaacgtgaggtctgagattcttcacctgaaaacaagatctctttgattgacacatgacatctgggttttgaggccaagtacatccttaatctcgtgttacttagccccaaacaagcaagtacaaccactatgacagaggctgttatgggagttctgaccagcaagcttggtgtggccttagcaaaaggggcagcagcctatgaattgatggataatcactattcaagcactctgctccacagtatcttgtcttggcaccttaacatatgacgacactaattgaagaacaacaaattttgactgaagacgttgacgtggaatcttctgtgccaataggagcaaataaacaaacaggttcgttttctggagtggcctgatgatttggagggttttgttctaaaaggctatggtgagtctgtcattgctcaaggatgttgtccagtcaatggaagaaacaatcaatagctagagaaggccacactacaaaacatcattgagcgcagaaacacgacatggtgctaggtcacaaggtgatgaagacatccacactactgatgcatctataccaatacaagtaccaatttctggtcccattactcgcgctcgtgctcgtcaactcaaccatcaggtgattacactcttgagttcatgtccatcatatttagaccatggagacccgtgcactcttgttttgcttaggaatcagggagaagaccgaaagggaaaaggatttgaacatgctggattcggactgcagaagaacaccaacttgtgacggtcaccacggtcagatgcgggctcggattggaatgttcaagcacaacatggaaagcttatcaagtctactttcatatggatccggaattatagtcatatctgttctgaggccgccgtaatcattgttttcttaccgagacatttcctgccttttctgcctatggtgctgcgtcaccctattttggcccaatgggtcgtatatcaagttaggtccattagggacgcatcctagggttgcagcacgaccccaatacccttgtggtcgtcctcccatgtttataaaccccctagccgccaccaagaacagcgggttttgtttagatcaagtttagctctcgctacttgcttgcaagcgcgcgtgctagttcagccgcccgtcttcttgtcttcggaaccccaccatattggagtttgatttttaaacctacatttggatctggt

SEQ ID NO: 13052 - DNA, 1981 bp, Zea Mays
ctccaatgccagcgcatccctcttccccctcgtggctcgcggtcgccgctggcgttcctgctccgggccttccacatggtgatgggcgacctgagcacctccgacgacctcgccacgcgccaccacctcacccaccgtccacccatcacctttcctgtaaacctcggcgacctcctcctcaatctcatgatgttgtcctgcaagtctcccccgagccctctcctcaagccctaccacgcccagctaggccacaacagcgccaagatctaggccatgtctccaacttagcaacttattgcagcacaacacgagatctggatggtctgcatcgttgccaccgtggcgcgcaccgagcaggaggacgaggtgccagccctgaccgaccaggcggcccacatagaggtgcgcacacggaggtttactaggtcgacgactacgtctaggtgttcgtcgtggcgtgtactgacctcatcaaccggctccagggcctacgcgagaacctcacgaacgtgaggtctgagggtcttgcagcatcagtgcagtaaccactctgcttctgtcaagtgttttaggtgtcttcagctaggccctgcagagcatccttgttttctcacgttgccatattcaggtatccatgttcttcagttcacaatttgttcaatgttggttctgaaattcagattcttcacctgaaaacaagatctctttgattgacacatgacatctgggttttgaggccaagtacatccttaatctcgtgttacttagccccaaacaagcaagtacaaccactatgacagaggctgttatgggagttctgaccagcaagcttggtgtggccttagcaaaaggggcagcagcctatggtgcatctctggatttcaaggaagcgtctactcaatgattttttaaatatctcctgcattcacatagcctcagcctcacatgtatgtggccttgaacagaattgatggataatcactattcaagcactctgctccacagtatcttgtcttggcaccttaacatatgacgacactaattgaagaacaacaaattttgactgaagacgttgacgtggaatcttctgtgccaataggagcaaataaacaaacaggttcgttttctggagtggcctgatgatttggagggttttgttctaaaaggctatggtgagtctgtcattgctcaaggatgttgtccagtcaatggaagaaacaatcaatagctagagaaggccacactacaaaacatcattgagcgcagaaacacgacatggtgctaggtcacaaggtgatgaagacatccacactactgatgcatctataccaatacaagtaccaatttctggtcccattactcgcgctcgtgctcgtcaactcaaccatcaggtgattacactcttgagttcatgtccatcatatttagaccatggagacccgtgcactcttgttttgcttaggaatcagggagaagaccgaaagggaaaaggatttgaacatgctggattcggactgcagaagaacaccaacttgtgacggtcaccacggtcagatgcgggctcggattggaatgttcaagcacaacatggaaagcttatcaagtctactttcatatggatccggaattatagtcatatctgttctgaggccgccgtaatcattgttttcttaccgagacatttcctgccttttctgcctatggtgctgcgtcaccctattttggcccaatgggtcgtatatcaagttaggtccattagggacgcatcctagggttgcagcacgaccccaatacccttgtggtcgtcctcccatgtttataaaccccctagccgccaccaagaacagcgggttttgtttagatcaagtttagctctcgctacttgcttgcaagcgcgcgtgctagttcagccgcccgtcttcttgtcttcggaaccccaccatattggagtttgatttttaaacctacatttggatctggt

SEQ ID NO: 13053 - DNA, 1733 bp, Zea Mays
ctccaatgccagcgcatccctcttccccctcgtggctcgcggtcgccgctggcgttcctgctccgggccttccacatggtgatgggcgacctgagcacctccgacgacctcgccacgcgccaccacctcacccaccgtccacccatcacctttcctgtaaacctcggcgacctcctcctcaatctcatgatgttgtcctgcaagtctcccccgagccctctcctcaagccctaccacgcccagctaggccacaacagcgccaagatctaggccatgtctccaacttagcaacttattgcagcacaacacgagatctggatggtctgcatcgttgccaccgtggcgcgcaccgagcaggaggacgaggtgccagccctgaccgaccaggcggcccacatagaggtgcgcacacggaggtttactaggtcgacgactacgtctaggtgttcgtcgtggcgtgtactgacctcatcaaccggctccagggcctacgcgagaacctcacgaacgtgaggtctgagtgttttaggtgtcttcagctaggccctgcagagcatccttgttttctcacgttgccatattcagccccaaacaagcaagtacaaccactatgacagaggctgttatgggagttctgaccagcaagcttggtgtggccttagcaaaaggggcagcagcctatggtgcatctctggatttcaaggaagcgtctactcaatgattttttaaatatctcctgcattcacatagcctcagcctcacatgtatgtggccttgaacagaattgatggataatcactattcaagcactctgctccacagtatcttgtcttggcaccttaacatatgacgacactaattgaagaacaacaaattttgactgaagacgttgacgtggaatcttctgtgccaataggagcaaataaacaaacaggttcgttttctggagtggcctgatgatttggagggttttgttctaaaaggctatggccacactacaaaacatcattgagcgcagaaacacgacatggtgctaggtcacaaggtgatgaagacatccacactactgatgcatctataccaatacaagtaccaatttctggtcccattactcgcgctcgtgctcgtcaactcaaccatcaggtgattacactcttgagttcatgtccatcatatttagaccatggagacccgtgcactcttgttttgcttaggaatcagggagaagaccgaaagggaaaaggatttgaacatgctggattcggactgcagaagaacaccaacttgtgacggtcaccacggtcagatgcgggctcggattggaatgttcaagcacaacatggaaagcttatcaagtctactttcatatggatccggaattatagtcatatctgttctgaggccgccgtaatcattgttttcttaccgagacatttcctgccttttctgcctatggtgctgcgtcaccctattttggcccaatgggtcgtatatcaagttaggtccattagggacgcatcctagggttgcagcacgaccccaatacccttgtggtcgtcctcccatgtttataaaccccctagccgccaccaagaacagcgggttttgtttagatcaagtttagctctcgctacttgcttgcaagcgcgcgtgctagttcagccgcccgtcttcttgtcttcggaaccccaccatattggagtttgatttttaaacctacatttggatctggt

SEQ ID NO: 13054 - DNA, 1793 bp, Zea Mays
ctccaatgccagcgcatccctcttccccctcgtggctcgcggtcgccgctggcgttcctgctccgggccttccacatggtgatgggcgacctgagcacctccgacgacctcgccacgcgccaccacctcacccaccgtccacccatcacctttcctgtaaacctcggcgacctcctcctcaatctcatgatgttgtcctgcaagtctcccccgagccctctcctcaagccctaccacgcccagctaggccacaacagcgccaagatctaggccatgtctccaacttagcaacttattgcagcacaacacgagatctggatggtctgcatcgttgccaccgtggcgcgcaccgagcaggaggacgaggtgccagccctgaccgaccaggcggcccacatagaggtgcgcacacggaggtttactaggtcgacgactacgtctaggtgttcgtcgtggcgtgtactgacctcatcaaccggctccagggcctacgcgagaacctcacgaacgtgaggtctgaggtgtcttcagctaggccctgcagagcatccttgttttctcacgttgccatattcagatctctttgattgacacatgacatctgggttttgaggccaagtacatccttaatctcgtgttacttagccccaaacaagcaagtacaaccactatgacagaggctgttatgggagttctgaccagcaagcttggtgtggccttagcaaaaggggcagcagcctatggtgcatctctggatttcaaggaagcgtctactcaatgattttttaaatatctcctgcattcacatagcctcagcctcacatgtatgtggccttgaacagaattgatggataatcactattcaagcactctgctccacagtatcttgtcttggcaccttaacatatgacgacactaattgaagaacaacaaattttgactgaagacgttgacgtggaatcttctgtgccaataggagcaaataaacaaacaggttcgttttctggagtggcctgatgatttggagggttttgttctaaaaggctatggccacactacaaaacatcattgagcgcagaaacacgacatggtgctaggtcacaaggtgatgaagacatccacactactgatgcatctataccaatacaagtaccaatttctggtcccattactcgcgctcgtgctcgtcaactcaaccatcaggtgattacactcttgagttcatgtccatcatatttagaccatggagacccgtgcactcttgttttgcttaggaatcagggagaagaccgaaagggaaaaggatttgaacatgctggattcggactgcagaagaacaccaacttgtgacggtcaccacggtcagatgcgggctcggattggaatgttcaagcacaacatggaaagcttatcaagtctactttcatatggatccggaattatagtcatatctgttctgaggccgccgtaatcattgttttcttaccgagacatttcctgccttttctgcctatggtgctgcgtcaccctattttggcccaatgggtcgtatatcaagttaggtccattagggacgcatcctagggttgcagcacgaccccaatacccttgtggtcgtcctcccatgtttataaaccccctagccgccaccaagaacagcgggttttgtttagatcaagtttagctctcgctacttgcttgcaagcgcgcgtgctagttcagccgcccgtcttcttgtcttcggaaccccaccatattggagtttgatttttaaacctacatttggatctggt

SEQ ID NO: 13055 - DNA, 2162 bp, Zea Mays
atcgattatgtctgtgcccagattgaaaccatgcgtcggtagatctagaagggcggttttggtgttgcttcatttaatcagttaggtttaatgttcattgatgatatgctattccattattttttctaccttattaggaggccaccccgcttgttgacctattacttattgaaaacagtcatgtgtttcgatggttagcttatgaagtttgtaaaatacaagaacatgctacaccttgggccacctggtgaagtttggaccgacaccacgctcagaggaaaatattaattatcatgtgcaagcgcaaatgttgcacgtacctgaaactgctaatgaaacctgttaaaaattattttgtttgaagtaggaacttatacggtgtgttcatatgtcctatttatacatcttcacaaataggcaacgttttatgcacttcttttagctacaaccagtaggttttaaattttgacactctcattatacattagatgtgaactgaactatggtatgtgtcgatgtcttgcattcttgcctcattgaatttgcaaccattttttgatcattcatagtatggcgcttctactcatatggtgcatcacctacagtttgtttaaaactaccttattgttgttaaagaaatcttgtcattattgtttcttgcttatttctctactactggtagagtgcagtgttgcttgttactgtcagcacccaaaggacaagatgctaattaatcatagtagcatcagtgctggacccatattatgaagatatttttgttcgtcctttttttacatggagctgcaagaactacaactcttcatggtgtcttcagctaggccctgcagagcatccttgttttctcacgttgccatattcagatctctttgattgacacatgacatctgggttttgaggccaagtacatccttaatctcgtgttacttagccccaaacaagcaagtacaaccactatgacagaggctgttatgggagttctgaccagcaagcttggtgtggccttagcaaaaggggcagcagcctatggtgcatctctggatttcaaggaagcgtctactcaatgattttttaaatatctcctgcattcacatagcctcagcctcacatgtatgtggccttgaacagaattgatggataatcactattcaagcactctgctccacagtatcttgtcttggcaccttaacatatgacgacactaattgaagaacaacaaattttgactgaagacgttgacgtggaatcttctgtgccaataggagcaaataaacaaacaggttcgttttctggagtggcctgatgatttggagggttttgttctaaaaggctatggtgagtctgtcattgctcaaggatgttgtccagtcaatggaagaaacaatcaatagctagagaaggccacactacaaaacatcattgagcgcagaaacacgacatggtgctaggtcacaaggtgatgaagacatccacactactgatgcatctataccaatacaagtaccaatttctggtcccattactcgcgctcgtgctcgtcaactcaaccatcaggtgattacactcttgagttcatgtccatcatatttagaccatggagacccgtgcactcttgttttgcttaggaatcagggagaagaccgaaagggaaaaggatttgaacatgctggattcggactgcagaagaacaccaacttgtgacggtcaccacggtcagatgcgggctcggattggaatgttcaagcacaacatggaaagcttatcaagtctactttcatatggatccggaattatagtcatatctgttctgaggccgccgtaatcattgttttcttaccgagacatttcctgccttttctgcctatggtgctgcgtcaccctattttggcccaatgggtcgtatatcaagttaggtccattagggacgcatcctagggttgcagcacgaccccaatacccttgtggtcgtcctcccatgtttataaaccccctagccgccaccaagaacagcgggttttgtttagatcaagtttagctctcgctacttgcttgcaagcgcgcgtgctagttcagccgcccgtcttcttgtcttcggaaccccaccatattggagtttgatttttaaacctacatttggatctggt

SEQ ID NO: 13056 - DNA, 2126 bp, Zea Mays
atcgattatgtctgtgcccagattgaaaccatgcgtcggtagatctagaagggcggttttggtgttgcttcatttaatcagttaggtttaatgttcattgatgatatgctattccattattttttctaccttattaggaggccaccccgcttgttgacctattacttattgaaaacagtcatgtgtttcgatggttagcttatgaagtttgtaaaatacaagaacatgctacaccttgggccacctggtgaagtttggaccgacaccacgctcagaggaaaatattaattatcatgtgcaagcgcaaatgttgcacgtacctgaaactgctaatgaaacctgttaaaaattattttgtttgaagtaggaacttatacggtgtgttcatatgtcctatttatacatcttcacaaataggcaacgttttatgcacttcttttagctacaaccagtaggttttaaattttgacactctcattatacattagatgtgaactgaactatggtatgtgtcgatgtcttgcattcttgcctcattgaatttgcaaccattttttgatcattcatagtatggcgcttctactcatatggtgcatcacctacagtttgtttaaaactaccttattgttgttaaagaaatcttgtcattattgtttcttgcttatttctctactactggtagagtgcagtgttgcttgttactgtcagcacccaaaggacaagatgctaattaatcatagtagcatcagtgctggacccatattatgaagatatttttgttcgtcctttttttacatggagctgcaagaactacaactcttcatggtgtcttcagctaggccctgcagagcatccttgttttctcacgttgccatattcaggccaagtacatccttaatctcgtgttacttagccccaaacaagcaagtacaaccactatgacagaggctgttatgggagttctgaccagcaagcttggtgtggccttagcaaaaggggcagcagcctatggtgcatctctggatttcaaggaagcgtctactcaatgattttttaaatatctcctgcattcacatagcctcagcctcacatgtatgtggccttgaacagaattgatggataatcactattcaagcactctgctccacagtatcttgtcttggcaccttaacatatgacgacactaattgaagaacaacaaattttgactgaagacgttgacgtggaatcttctgtgccaataggagcaaataaacaaacaggttcgttttctggagtggcctgatgatttggagggttttgttctaaaaggctatggtgagtctgtcattgctcaaggatgttgtccagtcaatggaagaaacaatcaatagctagagaaggccacactacaaaacatcattgagcgcagaaacacgacatggtgctaggtcacaaggtgatgaagacatccacactactgatgcatctataccaatacaagtaccaatttctggtcccattactcgcgctcgtgctcgtcaactcaaccatcaggtgattacactcttgagttcatgtccatcatatttagaccatggagacccgtgcactcttgttttgcttaggaatcagggagaagaccgaaagggaaaaggatttgaacatgctggattcggactgcagaagaacaccaacttgtgacggtcaccacggtcagatgcgggctcggattggaatgttcaagcacaacatggaaagcttatcaagtctactttcatatggatccggaattatagtcatatctgttctgaggccgccgtaatcattgttttcttaccgagacatttcctgccttttctgcctatggtgctgcgtcaccctattttggcccaatgggtcgtatatcaagttaggtccattagggacgcatcctagggttgcagcacgaccccaatacccttgtggtcgtcctcccatgtttataaaccccctagccgccaccaagaacagcgggttttgtttagatcaagtttagctctcgctacttgcttgcaagcgcgcgtgctagttcagccgcccgtcttcttgtcttcggaaccccaccatattggagtttgatttttaaacctacatttggatctggt

SEQ ID NO: 13057 - DNA, 4059 bp, Zea Mays
ctcgtaaattaagactgagggagatagagcaccagttagctacctatactggtatacgcggacccaaatccaataggaccacaaaatgcatcccgcgtcaggcctatacaaaccaatacacggtcgtatgtatatattgcagttacttacaacaaatgtagtagtattacagcggcacgtccttttacattcttcttcgaggaataaaagaaaactagcctttacacttcacttctaaaaccaattttaattaacctacaacattaaccaaacacccaacaacacgactccagcagatctacgttcttcttccaatcaaagctagcattggccgggtgattatacacataagcaagagcagcgtagtccatgactcttacgtccttttagcattttttgaatacataagttttctctacacatacatatgcaccatctatctagatttttaaatacataattgtctaaacacagatatacaccatctacatatatgatagaacctatcgacagaaaacaaaaaacagacctaccatttacagcattaggtaatgaaggggatgatgacgcctaaaagtgtgtgaattagacaacctaaaaaaatacttaaaactaataacttgaattttttatatagttataaactatgaaataaataaaatatatatacatgcaattgtcattttaactatgtgtgttcatatccctaccgcaaccgcaaaggagtcacgcaatctatgtatcaatcatatcacttagcctagcaatctaaactagaaaaataaacacacaaactagttaaataataaataaagcgtggaagcatgattaagatagagacgcaaaccgacatcaaacatcaacgactccgattttttttaatgaggtatcaagaagcgcggaagctttccctagtcgtcattgaagtgcctcgcaaggatgcttgcgtaaagacaaagctctcgatcggataactctgtgaataagacctagacattcgccacacataagtgagtcttcagaatggcctctctcggactactccccaccgttttcactatcaagttttttatcgtaacacggtgatcctcgttccttactatatgatggtggccacaccataaacacgattgatatgatctcacaagactacaagcttctttgaatacaaatattgggggggtgcaagcactcaagacttcgaggtatgcaaatatcactaaacactaggcttacctatatgtgtgttcatatccctaccgcaaccgcaaaggagtggttacacaacctatgtatcaatcatatcacttagcctagcgatctaaactagaaaaataaacacacaaactagttaaataataagtaaagcgtggaagcatgattaagatagagacgcaagacaagatcaacgactccaatatttttttaatgaggtatcaagaagcgcggaagctttccctagtcgtcattgaagtgcctcgcaaggatgcttgtgtaaagactaagctctcgatcggataactctgtgaatagacctagaccttcgccacacataagtgagtcttcagaatggcctctctcggacttactccccaccgttctcactatcaagttttttatcgtaacattgtgatccatgttctttcctatatgatggtggccacaccacaaacacgattgatatgatctcacaagactacaagcttctttgaatagaaatatgggggcgcaagcacccaggattttgaggtatgcaaatatcactaaacactaggcttgaactaagaaaaagcacataattggcagtctatctaacgtaagcatttcataaagcagttatgctaatcatcgagcttgagctataagagatgagtcttttttgagtccacaccccccttatttggccggttaaggtcatgtttatagccccccaaggtgagagatatatgttggaacatcaaaaactatcactgcacaccgtcgaatcgcctcgcctgacatgtgccagtccaaccattgtgttagggtccaccaactcaatggcaactactccctccgtttcgttttagttgtcgctggatagtacaaaattgaactatccagcgacaactaaaaagaaatggaggaggtatatatcaaacgtagccattgtcaatcgttgatgcacccctatgtagcgtatagtctgacaatccttgtcaaaccagttcgacacccttaaaacaaacctctctagaaccttattggagaccgttagactccatctccggtgatctgatgcctctacacatgctcggtctttcactcctgactcctctaagcatggatagtgagaccgtttgatccgacgccacgttccattgttggtccaacacttgatacaatgctcctctgagcacgagaagtaaaatcctttatactacaccattgttggttcaacgctcctgctgatgccaactagcgtttacttggagcctgtttgattcatggataattataccacactttatctaaggttagtcgctagaattgaagaactaatcttagacacaaaagttaaacagcgaaccaaacatgccatcgatcatatagaccgaggctcctcagggtctaacgccccacaggattggatgctctatagaatcctcttttactttgtttcttcattaccttcgcccgatttggctctatattatgtattggacttttgtagcctttttcaagtcttcaatgttgcttctaaagtcttgcttgagaggttgatcattcggatcatcactttacttacctgatttcaagtctactttacatcctttaaactactccctccgtttctttttatttgtcgctggatagtactccgtttctttttatttgtcgctggatagtgtaattttgtactatccagcgacaaataaaaagaaacggagggagtatatcaaaaacactagtaatcaaacatcaaaatcatactgccgaggattcattttcctaccattaataccatctagtgagcatgaccagttgacccacgataaactgagaatctcgtcgagataattttactcgagagcaaaaagtcacctacagcaagttatacgtggccttgtttttgctatccagcctataggctaatggtgtacctctccccctggtcgagttcttcgacgcggcattttttgtttaataatgcaagcaactttaaaataatataatgaaatattaaaacaagattcatcagatatacaatgaaatatattttaatagtgcattatttgatatttagatattaatatatatatttttcataaacttggtaaacaaatagaaaagtttaacttatggcaaaactaaaacggcttatacaattcgattcaaaatgaagagacagagtatatagtgtttagaacaagctaattagtttaaaaataaagtaattatcctgtcataaacatcttaactcagaaacgaagggagtattatttaataatacttcagccggtcccggcccttttggagaagagatcgggacaagcttgtgaaagtttaactacggataacaactaagttttaagatacacagatctctgttcgaatcttatgtacttgctagatttttataaatgtagccagataaaataatggttgaagtacgcatccaaaacatcgggcacttttgaccggacggagtactcgacaacttcgatcttcacgtggaactgggctcacttttgtaatataaaacatggccgtggcagtttcattcaaaaacagtaggttcaaatggaaatgaagaacttttaaatatccagcacagttgtggttttttattgtccacacggctctctccttttctctacttccctaataatttttgtggtcctcaccttctttctcttgaaactaacatagcttctgcagatatcactgtcacctgcaggacacccattttttcatctgagccttaacaaccattctttcaaaccatacaccaaagccactgtgttggggctgctgtaaggagatggtgtaggagtattggccaagaggcaggcccag

SEQ ID NO: 13058 - DNA, 400 bp, Zea Mays
ctggctgtatcttgtccaaaacatgagtatttgtgagttagcggttctattgtttgataataaaaaatgcacgaatatagacagccaatcaagagatggaacacataccactcatttgaaaaattcgtggacgcctacacgcgtatacctcatggatgaaccgacgacaagcaagccctagcagatttggtacctgcatgcaagaacagtaggtccatgaataaaacacttgcaccgcttttacaaaaagacaacttgtaccccagtgcactactatagaataggatgtgcacaaagtgacaccaagggtacagtaagtagatcctttccacgccattcggaatggacgagatagctaaaaccaaaaggtagtctagattattgctgcaaaacgtgtaca

SEQ ID NO: 13059 - DNA, 2434 bp, Zea Mays
ctgaccaatatagcttaaataagtataatgcggcagtttgttcttgctgtccagcatgttcgtgcactccatattttgatattgatgtaaatcctgcaaagtagacagaacactcgaatcacagccaagtccttttcaagtccacagttgcatgtttaatgtagtgaagcagcaccaaggtttgatcaacagagtagagatgatcgttattcctatcaggtgttttgttaataaaatgggaaggagttgctttcaaaactcggtccggcagggtaaggccacccaggttccccgtgggggcaaggctccgcggggatccaacctgttcggagcgggttcggggacggtttctctgccccgaaaattaatggggcggagacggagaagaaactacccccacagggctgattggggaccaataagaaaccctaatgtgtatgtgtattatgtgatttgtgagagtgtcagataagttgaaataattgtgacttgtgagttatgatttgtaatataaggttgttacttgttagttgttttagacttttttattttgttgtattttgataattaatatatttgttgtgtaaaaaccctaaccctaattagggttgggagtgcatatatagttgggccaagcccattacacagaagggtatacagataattacacggggactgaccataacctaacacgggattctaacatttgtaattgttatcatacagtgaatatttttttgttacagtattctccatgggggcccaaatggggaacaggcatccgcggggacggggatgaggttgtccccgttaggctaaacagggcccggggaataggtttaggggaacggggcagggacggggaactggtccctagccccaccctatcccattgccgtccccgccaagccgtggtaccagtcccgaccgagaaacccccgaaccctttgctcccatcactaacgggtcgggtcaagctgcccacacaggtgacaggtccaagggtgacgcactgacgcacatccaagccgcaacccgagagcagagtgaggaacaacaaggggatttttttagtgcagtgccaggggtcgaacccgtgacctggtgcaagggacctcacgtcctcaccatcttcaccactggggtattacccggtctgcaagtaggagttgcattcactagccaagatattagatcttaacttacattataacaatttcaccaacaatcactccctcctccatctccatatttgcagctagtggccaatttatatttctacagaatattcgggacattaaattcttggaagtccaaaaaattatctgattttatcatttggaatcctcagtccagaaataccaagagagcatgcaaccatgagatcatgtacaatgactacacaggtcgagattccaggtgactgacatgtccctggaatttttttttcgaaaaatgcaggagagctgcgcatctttatattaagaagaagggtgtatatggtatcataaatgctctggcattacaatcccaaatgacctttagaaatatttagcactaatatcagcacattgagatatgaaaaagtaggaggctaagcagtaagatgatgtgcatctatatgttaagcataaaaaaatgtatgagtggtctaatcattaatcaaatatcaatatcatcagcaattaaaggcatattggggtgatggataggcatcaacacaaacatagagataaaaaggcagccggctttttgtgtataatagtaacaactgaaccatggagtacaggggatcaggctccagggactcaaggctaccttccaataaatctgagaatgacagttgtaccaaaagttcaattacaatgcagtttaataatccaaccatgcatatataccaattctagtaatctagtttaatccctgaaaaataaattaacagaaaccacaatacaaattggatgcagtttgacaagttaaatgctccatctccaattcaacatttcgcaatgaatatataccaattaaaatttggatgagtcttggggcccttttggattgcaagatttttcaaaaaaaaaatgttcacatgatttcaataggaaggaagttctcccatgttgcttgttcgaaaagaagactgaggatgcccaatttgcaagaaatggcttctacagttctactgacctcgattccataggaatgtaacattgtgttagatatcttggaaagattaacatagttgtagatatatcttattgcaaattcccattgtttttttgttccataggattcaataacctattattagaaactataatccagcattcaaagttcaactcgtggtaagaatagctgagcacatgacaaagaatgataaaaaaataatctatgaatttcacactgcaaaaaaaactatatgaaacctgattga

SEQ ID NO: 13060 - DNA, 962 bp, Zea Mays
cagcaagagaatgtggcccttgtcggcaaccttctgcatcctcaaacatccagcatgattcttcacttgaaagagactaacagggaggaagcaagaaccaaagcagtcaggaaggcaggcaggctaaggatgacacgaacaaatatagacagaagggcaagccatacatctggaaaaaccattttagcatgggaagtcactctctctgtctctgtcgatacatttggggtggaagccacggcaccgacattccattgtgaaaggaattgtttcagaaagatcaattgcacaggatcgactgttttcccaccaaaaacagcatagatagcaaggctttgaggcaagaaaccactagatagcccctcatacagttgttcaggcaggtaaggtccgcacatctgtccattcccgctcatatacatgcagccttcaaaatgttggtgttgcaagtatgtgccctgtgccccattttgaccagatgaatggctaatcccagattgtggataaatcacaccattgttaccagtggaacaggtgtattcttgcattgcagcaaacacaccagtgtgttgtgtttgatcaccacaatcggaaggcatgtgatgccactcggagcacctgataaatcacacaggaaagcattaaaaactaccttttaatagaaatacaaggaaggataaaaggcggaagcgacaggattgtcagtgaagttttgtactccctccattcttttttatttgtcgcggtttagttaaaaaatgaactagcgggcgacaaatattcgagaacggaggtagtaccactcaatcaagtcccccagtgaatcatcacatattggcacgcaacagccgaggggttcaccatccgatgactcggctgccaacaactttacgcgcttccttccagtgacagcgtaagagcagccaaagcctgacaccattggttcagcatccaggccctga

SEQ ID NO: 13061 - DNA, 660 bp, Zea Mays
gtgaacttgggcaccgagggccaagcaaatgcgtagtataggaaacaggaattggggatcgtgacatataggcagtgccgtggccggtgaattcgcacagggccacatacgttgtacgtgctagaaatcacgaattgggggttgtggcagtgtgcaattggagttgaaaaacagatgcaaatacctgctcttctgctgctgccagccgcccggggcgccgaactcgagctggagaccgtcgcctgtcctgtgcgcaaatgagcaacgtcggccggcaggccgcagccgtatcagtacggcacgagcacggcctctaggatttgcccgcgcggacgcgtcggtccaattcgaccccaatacgcgacctgtccgcgctgatttgcctgcccgccgctagcactgattcgctgcgctgaccctcgatttgcaagcgccggcgtccagcgctagccgctatggatctggtggagtgacaggaggcggcgggggcggcgacggcgacgacggccgagcaggggattccgatttccgcgacaggaggagcggaggacaaggaccgctgagtgaggagggtgcgatggggagtggcgaaggggcgacgcgaggagggccgccggagctagcacctttgatgggctggcggttgaagctattgggctt

SEQ ID NO: 13062 - DNA, 3352 bp, Zea Mays
aaataacttactccctccgtctcaaaatatagttctttctagctctattctttttcctcctgtgtcaacgttcgaataaatgataatgaatatacatatatatatacatacaaaactacattcatataagtcgattaataaatgtatgtttagtctaaaacgaactatattttggaacgcacggagtacctcattatggaacatcagctgttatgtgtaagatgagattgactagtttattttgcaggaatttcgaaatgactcggtatcatttaccattagaggtcaatgaagcatgtccctgtcctagggcctgtgtatgtacagcaacgttgcctgctcctccctataacagcctcaagaattattgcccctagctatatgcatgtttccttccatgaacgtcatgcgagtgatgtagacactgccacccatcctgcgtcataagccaagtctgtaacagccaggatcctactatgattatgcatcaaatctgagaaaaacgggatctcaaatgacacctttagttgtaccacataccaccgttggacagggacattgctcctccctagtcttctccagtgagaaaatttgaaaaacgatcccttccctccaccatgctcatatcatactgtgtgtgctgctgctactagcttgcttgtataaatagatgcctaaagctgcataaacctagcacctccagctccaaagtccagctattatagtttatagcgagatacattttagagaacatcaaatgaacatccttgaatcttccactcgtagtggctgccaagtggtgctcaacgagattgaacaccaaggggctctcatgagggacctatatgaccttatcctaccaacacttgatccctgtagtaggcaggagaagcttgttcagcaaatctttcaagatatatccagttcctcaggtaaggtcctctcctttctcgaacttggtgataacagtaagaagcaggccaatcttatcaaacatagaagaaaacgtggtaagaatagcggcgtggagagccacatgctgggggaggaagctaaagaaattggaaataaaagaaggaagaatgcacaacacacaggttcaattgtgacacaagcaccgcacttcgatggatataaatggaggaagtatgggcagaagtggatctccaaagcaaagcattctaggtatgtaataaaacatatgtgttgacgtatttcatatattgtaaactgaattcgggtcctcgtgtgtgtgtggatgttatggtcactagatcggtgagggattggagaggggtatcgatgggcaggaacgtcggccaggggcctttgcccacggccaagcaagaggagggtttgtcccttctaattcttgcctgctttatttctcatccattgattacataaataggccagctggccgtccctatctagctagagatccttagctcctaaaaactctcaacaaactactaactgataaccttcctagataatctcaactaatctcctaaataatctcaactaatcttctaatcttatctctaactatccttatctaatcccccttgagggcccatggctgctgctaccgcagcccctccgtgggcctccttaggccctgacagtggctggctgattagctttgtgcacatatatactagctcaaaactgcagtcattctcatctatgtggatggataatattttgcacatttttgccttttgcgtataataacaaatataaaaatatacatataatgaggtcatgcttaatcaggagctactatagatgtgccaatagtaaagaccaagggtgccttgcaaccaagacagttcaacagaaggaatcagatggaagcgggacagtgagcttgttcgacgttgaatattacggccaccacatttgcaagaaggatgtcgtcaaccatccgtgtgttgttgacacagcacactattacagtgtgccgattgccaatcagaaccaaagcagtagcagcccaacgtttgttcacaatgatgtctatggaatccaggatgaaagctttgaaaacctgttcatggtgccgagcataccagagtatctgacagatttcacagacattgaaatggcgggggcacttgaggttacctccgagatgatctctgaaaatatatgggcgtacgagatgatctctgaaaatatatgtagacagccattgattgcaccgtgaggtgtgacaagaaagagacacgagtatgttatgtgtgtactgtagagagtataatatgtgagacaagaaaagaaaatggacgtgcagagagacagaaattatgtctcaaaagttgtaaatgctgtcccgcatggtagaatgttggtgtgccaatgtctagactttcactttgagttgcaattgtaaccatctcacttccagcagcctctgtaaggcacatcctgcaaagtcttcatagcaggtaaagtgtcctggaatagtagcttataataataatttgttggcatttgacggagagcactagaaacatggggaaacagtaataattagcatgacaaatggcatgccagtcaagaaaacctcgatcttcagtcacaatttctcacattgatatgacacctagcaagctttgctacaccctccatagcgagttagcaacacaggctgctatccggccagttcgtgacttgatccatctgtagctgtactgtactgagccaactctaaactccccccagaaataaataaataaatatctgactgaatataaactggtggttcggaggaaacataaaagcatccaaattccaaaccaacatgaacgaatgaacatctggctgaatatgattggtgaaccggaggaaacatacacatcctcgtcgatttggaatctactcagaattggatggttctgctatacgtggccagaagtatcctgcaaactagaggccccaggtggtctcactgagaggtgatgacgagaggttcacgccgcactggagcgtatggtactgctatgccggtggaatgcggcgcttctgttggcctctggcctctgctgtggccggccgatgtgtgtgtgtgtgtggaacggagaaaacgatggccactctcggtacggttttgccggacagctcagcgcccccggttttttgagactttggcaggaaacccaaaaggaagagacaaaaaagggttgacctggggcttggtggaactgcatctgtcccagtacggtgatcgatcgcccacgaagccacggccgccgtcgccggagccggagccgaagccgaaaaagccctcgatgttttttgttgttgttggtttggactttggaggatggacctggcatctgatctg

SEQ ID NO: 13063 - DNA, 2141 bp, Zea Mays
cttccctccaccatgctcatatcatactgtgtgtgctgctgctactagcttgcttgtataaatagatgcctaaagctgcataaacctagcacctccagctccaaagtccagctattatagtttatagcgagatacattttagagaacatcaaatgaacatccttgaatcttccactcgtagtggctgccaagtggtgctcaacgagattgaacaccaaggggctctcatgagggacctatatgaccttatcctaccaacacttgatccctgtagtaggcaggagaagcttgttcagcaaatctttcaagatatatccagttcctcaggtaaggtcctctcctttctcgaacttggtgataacagtaagaagcaggccaatcttatcaaacatagaagaaaacgtggtaagaatagcggcgtggagagccacatgctgggggaggaagctaaagaaattggaaataaaagaaggaagaatgcacaacacacaggttcaattgtgacacaagcaccgcacttcgatggatataaatggaggaagtatgggcagaagtggatctccaaagcaaagcattctagatgtgccaatagtaaagaccaagggtgccttgcaaccaagacagttcaacagaaggaatcagatggaagcgggacagtgagcttgttcgacgttgaatattacggccaccacatttgcaagaaggatgtcgtcaaccatccgtgtgttgttgacacagcacactattacagtgtgccgattgccaatcagaaccaaagcagtagcagcccaacgtttgttcacaatgatgtctatggaatccaggatgaaagctttgaaaacctgttcatggtgccgagcataccagagtatctgacagatttcacagacattgaaatggcgggggcacttgaggttacctccgagatgatctctgaaaatatatgggcgtacgagatgatctctgaaaatatatgtagacagccattgattgcaccgtgaggtgtgacaagaaagagacacgagtatgttatgtgtgtactgtagagagtataatatgtgagacaagaaaagaaaatggacgtgcagagagacagaaattatgtctcaaaagttgtaaatgctgtcccgcatggtagaatgttggtgtgccaatgtctagactttcactttgagttgcaattgtaaccatctcacttccagcagcctctgtaaggcacatcctgcaaagtcttcatagcaggtaaagtgtcctggaatagtagcttataataataatttgttggcatttgacggagagcactagaaacatggggaaacagtaataattagcatgacaaatggcatgccagtcaagaaaacctcgatcttcagtcacaatttctcacattgatatgacacctagcaagctttgctacaccctccatagcgagttagcaacacaggctgctatccggccagttcgtgacttgatccatctgtagctgtactgtactgagccaactctaaactccccccagaaataaataaataaatatctgactgaatataaactggtggttcggaggaaacataaaagcatccaaattccaaaccaacatgaacgaatgaacatctggctgaatatgattggtgaaccggaggaaacatacacatcctcgtcgatttggaatctactcagaattggatggttctgctatacgtggccagaagtatcctgcaaactagaggccccaggtggtctcactgagaggtgatgacgagaggttcacgccgcactggagcgtatggtactgctatgccggtggaatgcggcgcttctgttggcctctggcctctgctgtggccggccgatgtgtgtgtgtgtgtggaacggagaaaacgatggccactctcggtacggttttgccggacagctcagcgcccccggttttttgagactttggcaggaaacccaaaaggaagagacaaaaaagggttgacctggggcttggtggaactgcatctgtcccagtacggtgatcgatcgcccacgaagccacggccgccgtcgccggagccggagccgaagccgaaaaagccctcgatgttttttgttgttgttggtttggactttggaggatggacctggcatctgatctg

SEQ ID NO: 13064 - DNA, 2101 bp, Zea Mays
cttgtataaatagatgcctaaagctgcataaacctagcacctccagctccaaagtccagctattatagtttatagcgagatacattttagagaacatcaaatgaacatccttgaatcttccactcgtagtggctgccaagtggtgctcaacgagattgaacaccaaggggctctcatgagggacctatatgaccttatcctaccaacacttgatccctgtagtaggcaggagaagcttgttcagcaaatctttcaagatatatccagttcctcaggtaaggtcctctcctttctcgaacttggtgataacagtaagaagcaggccaatcttatcaaacatagaagaaaacgtggtaagaatagcggcgtggagagccacatgctgggggaggaagctaaagaaattggaaataaaagaaggaagaatgcacaacacacaggttcaattgtgacacaagcaccgcacttcgatggatataaatggaggaagtatgggcagaagtggatctccaaagcaaagcattctaggagctactatagatgtgccaatagtaaagaccaagggtgccttgcaaccaagacagttcaacagaaggaatcagatggaagcgggacagtgagcttgttcgacgttgaatattacggccaccacatttgcaagaaggatgtcgtcaaccatccgtgtgttgttgacacagcacactattacagtgtgccgattgccaatcagaaccaaagcagtagcagcccaacgtttgttcacaatgatgtctatggaatccaggatgaaagctttgaaaacctgttcatggtgccgagcataccagagtatctgacagatttcacagacattgaaatggcgggggcacttgaggttacctccgagatgatctctgaaaatatatgggcgtacgagatgatctctgaaaatatatgtagacagccattgattgcaccgtgaggtgtgacaagaaagagacacgagtatgttatgtgtgtactgtagagagtataatatgtgagacaagaaaagaaaatggacgtgcagagagacagaaattatgtctcaaaagttgtaaatgctgtcccgcatggtagaatgttggtgtgccaatgtctagactttcactttgagttgcaattgtaaccatctcacttccagcagcctctgtaaggcacatcctgcaaagtcttcatagcaggtaaagtgtcctggaatagtagcttataataataatttgttggcatttgacggagagcactagaaacatggggaaacagtaataattagcatgacaaatggcatgccagtcaagaaaacctcgatcttcagtcacaatttctcacattgatatgacacctagcaagctttgctacaccctccatagcgagttagcaacacaggctgctatccggccagttcgtgacttgatccatctgtagctgtactgtactgagccaactctaaactccccccagaaataaataaataaatatctgactgaatataaactggtggttcggaggaaacataaaagcatccaaattccaaaccaacatgaacgaatgaacatctggctgaatatgattggtgaaccggaggaaacatacacatcctcgtcgatttggaatctactcagaattggatggttctgctatacgtggccagaagtatcctgcaaactagaggccccaggtggtctcactgagaggtgatgacgagaggttcacgccgcactggagcgtatggtactgctatgccggtggaatgcggcgcttctgttggcctctggcctctgctgtggccggccgatgtgtgtgtgtgtgtggaacggagaaaacgatggccactctcggtacggttttgccggacagctcagcgcccccggttttttgagactttggcaggaaacccaaaaggaagagacaaaaaagggttgacctggggcttggtggaactgcatctgtcccagtacggtgatcgatcgcccacgaagccacggccgccgtcgccggagccggagccgaagccgaaaaagccctcgatgttttttgttgttgttggtttggactttggaggatggacctggcatctgatctg

SEQ ID NO: 13065 - DNA, 8244 bp, Zea Mays
ataatcccatccccatccatcggagtctccgttcctggcttcctgcagccgctgcacgactccctgccgtcggtctctcacctcgtcgttggcctccctcctctcggctccctcttcgccgccgtagcaggggtgccgccctccttgccgccagagcaggagcacctccctcctcgccgccgtagtaggggcgccgccctcctcaccgctagagcagtagcgcctccctcctcgccgtcatatcaggttcatggttgtttgtttcctattcatcgggtagactgcacatggtttggaccaataccatacatcatcaaacctgagaacaacattcaatgtcttgtatcctcaatttgttgacagtcagtggcttatctgttcaatgtgtagcattttaatttgtttgtttcagatttagcgaaggatagactatctaaattcgtccttgtaggtgaaataatacccgagacttattgggatagccacagcgacagtgcctatggatggagataaatcatttgggaccatcgatgaggaaaatagaaggtttgaactagcattggtaccaccgccgattccatctactaattcatatccaagagtagagccatcaattccatttatagagcagccacctcctttagtggattgggattcaatagcaattcaagaagaaagagaggatgaaggacacatagaactttgtgacgaagcacaagtttatgaacttttaggtttcagacatgaagatgagatggaggaagaaattaatatgcaaaatgatgctgtcccgaattctagtgctgatggagaaagtggttatggaattccaccgatacaaggtgatgaaggtgcacttattccggttgttgataatattccggagatgtcaatgactgagcatgatatgaataatccatctatggaggtaggaaccagatatcctaatatgaaggattttagattggctgttagacaatatgccataaataaagaattcgagttgggtattgaggcgaccaacaagtccaaatacagagggtactgcaagggtgatggatgtccatggtctattgttgggttcaagaaggagggtgaagtgtctgttgtggtcacagtgttgaatgatgtacacacgtgtacatctagcagtaggagaaggacaactacaccttcgtgtaagtgggttgcctccaaggcagtttctatactcagaattttgttaagagatattcgggtgacagcagtggacacatgtggccagcagctagggcatacgacaaacatgtttatgagagccacatggctatagtttatgcggcgctctctagtgctaagagctggttggaaacacatcaagtttgttgggggcaacaaacacaagtcatggacaagtttttttataaagaaagccaaggaaaaatagtaccaaagaatggtttcctaaagagtctacgccggagagagcagaaactacaagagaacaactaatgcaagagagtcctggaataatgacaagaagacgtcttggaattttgatgggagaggtgacaacacatgaggcttcttcttcgtaggctttagagactacgacaacagctccaagaaagatgactccaagaaaggcgaagagaaagttgtgaaattgactttttaaagacacttagagaaagatgttagtgcagcaataaactgttagtgaaattgtcttttacatatgcagatgtcttggaactagtagttattttttgtcacagacattatagttatacattgtcaggttcgtagaatgatagcaggaccactatgaatatatgctgccattgtttcaagactgtaagccattgttttctatggggtcattctttctcctttgaaatgataatttgaaaggatattgtacattgtcaggttcattctttctccttttacagaggcatgaggccaagtacttttattctgctgggtacagaggcatgaggccaagtagttttagcattagcattgctcttgggtcatttttctctttatatcggacagtactctgctggatacagaggcttctcagattgcttgcaagagatctgcctcatgttcaggttgctcgcagggttctcaccgctgcttgatttggcgtgcagggatctgctcttattctgtgaacaaaccggacagtactctctgaagaaacgaaccaacagatgcaaattgggaagggggcaatacagtcagattattaggtgaggaaaaggaaataattagaaaacaggttagaatactattttagagagcaataacacttataaatactattatagagaaggttatatttagagtaccataagaaagaaacatgttaataagagtactataatagcaaaaaactctagggaggattaagaaacattcagacaatagacaatttacctattcttctgtaccggcggggttaacatttggtaacaccgtagcaggcatccgccgatcctcggctccgatcaatggcgtccaccaacgcaatcgatttccaactcacccaggcccgggcgctgctgtccgaattcgacaaccggctccgcgagattgattccaagtgggagacccgcgtcggcgtcctcgaaacgaaagttgcggactctgctcgaaatctggagacgatctccaaggagatccgcgacggggtggtggcgcagttggcggcggccgaggcgggtgtggatttccggatccgcctgcttgagacggggaccatcattcgcgtcgctgcgctcgagtcgactgcccacgccttcgagctgtggcgtcctcacgtcgacttgtcgatcgacagtctcttctcctccattgacgcggtttgtaccgaggtcgagaaattggggatccaccggttcccaggaccgcgtcccagcgatggcgcagcagcaccggggaccgcgacgcaaccggaaccctcttctcatcggccacgttcatcgcctccgcccgaggtccatgacggcgacgatgacgatgaagaaattgacgatgacgatgacgacgacgacgacgacgacgacgacgacgacgacgacgacgacgacgacgacgacgaggtttgggtttgtttccagcttcacgcgggtctcttggggttgtgtgcgttggcaggttctggatttcttgattcgcggcacccaatttcttggggattaatttctcccgttctgatagaaggcgatggctcatcgactgggtcggtcgtaggctggttttcgtttgaacacgtcctcgatttgattgaccattgggtcgggtttttgattttacggggaaacccagaaaagaaggaaggaaggggaaaccgcaatgccagttattgaatatcgcggagtggtgccatggcaatttcgagtgtccgttttttgtcccgttctggctgattcttgccctctgaagtttttcgtcgctttattcaatcatccgtttacatttttatgtgtcataatttgggcttccttcagggatttgatccatttgcaggatgacttagtttttgtagataggtaaatttagcaaattcgaggtgtgaatcatgtgaagcatttttttctttttccgtttagaattccgcgagaaaactcggtacatgttgagcacattatttggattctttttttacgtgtttttgttgtaaatggacatatcatgataccagaggtcatgccatgacttgcatgtcttctggaaagtttttttagactatggccaatcattcgagtaggataaaataggtgaattactgggattatttcgttgtgctctccctgcttccatttggaaataaaataaaataataaattacctgatgattgcaactcacaaggattatgagggcttcacagacgaagagctggacaaattcgaaagcgccttcggatggggttctacattcttgagtgatcctcaagttctttgtatggactcgagtgatccacaaaacccccctcgtattggccggcaaaattatgagccgctcaccgcacaggagtttttttcactgcgccacaattggcaacagctgctcgatggcaagaagacatacctccgcccaccaaagaacaaccgtgttgccaagcacagttatgctaactgcacctttgtaaccccagaacctcttgagaaggcactacaatgtcaggagccgctatctgattttggtcggaaatatgcagaaaattctatagttcagcaaaagtttaagattcttagtgaacattatgcgcacgtcagacaaatgcgaatggatggatcatctttttacagagctttccttttctcttacttggaaaaccttgggaaaatgcaagctagtcatgctgaggtcactcgcttaatggaatgtgtggcaaggtccagagagaaattttgtcgtttacattggaatgatgcgtacttctcaaatcctgaagcatttttctcaagtgttgtttctgagttcgagcaattggtcaattcagttgccaatgggctaaatgctgatgagctttacaagagaagcctacatgagattacatcatccaggattctttgtttgtttagattgctgacagaggttcatatccgtacacatcatgcggactacccagaattcagtcaggaaacagaagcccttatggttagtgtttctggctgctgtacagtccttttcagaaattatgcttgattcatttcaagtagtagattattttcctcttatgctgctttaacaattatattttggtaacgatatcctcacttttccaagttattctctcagcagaaatacacaagtcctaaaaataaaatgtgggcaactttttttttgtggtaaatatggtagaaccaagctaacgaatactattttcccatttacaaatagctctctttattctgcatttgtggctttggtaacagttttgcttagcatcggtgcgtccctttgaagctggagctaacattctacaaatgagtgctctatcaagtgcacttggcatcccattgcacctggcatgtacggatgtaaccacgagtgatgatgaaattgtgacagtaaagtgctttgacttgtttcctcaatcagaatcaggagcaagcacaacatcaggagctacgagttcaatcagaagttactctctgtcaagcacaactgataaacacccagagcaaggaagggatgataacaactcaaccatgccggctggaaacttgttttcgtctgatcgcatgcctttagttatcttactgagtaggaagggtcaatatggcattctttatcgcaagtgaacaagttctgactatacggcagcctctggtggacagttctaaccggaactgtttgggttataacatggaaacctattgacaacctactctagtgtgggtgtttgattgtgcatctgcttccaaaatgtatctggttacatttttgcccccgacaaaaaatactccatttgctagatgtgctgatgcatgcagtttatgaaacaaatttggacttggcataaaatctgaggctgggagcagtgggacagatctgttactttttcggtttatttttcttatggatgtttgtaccattgctgaagcatggatggaagattcatatttggtaagaacatatgaaggactagttgttttctgatacagcaggacgtggtttggatcattcaagttcaaggaccaataacaccaaaatttcagaatgaaggcattttttgagagtccttgttactgcaggctctcctgaggacactaaaagttggatgcattctagaaggagcttcaaattattgataatgatgtggactttgtatttttattgtgaaaaatctttgaacacacttcttgtggagaactaggattagcattgacagcagactcaatcaaatgaaaatatagtatgcgagcggtcatttttctgggataaaaaactcatgtgaatggagtactcattcagtcttgcgtatttttgcagcttgcatggcacaaatagggctgttgagtaaaaaatttaaagccttttatgggagagattaaattggaaatacatatttgcttcaagtggaaggttgtggacatacagcgccacctacttgacatgatgaatggttcgtgacattcaaacacagacagacaagtctggttctacctccttaactttattggctggtcatcttcgcgtcacaagggcaggagagaacaataatttcgtcgagtggtgggtcaaaatcaacaaatgggtgccttcaaccttaaaaaagggtctaattccttgataatcctaggctcctggatgatttggaaacaaagaaattagattgttttcaattggaccacacgagtatcctgaggattcttgtccagattgaggaggctcatctgtggtgtcttgcaggagccaaagagctagcccgcgcaactgtagcaccgctacctcttaagtatgtctccttagaccttgttcggttacattaaatcttctggcagtactcatgcagtgcatttgcatcggaggggattgaaagagattaaatcttcttctattcaattttgactagcaagggatttaactccctccaatccggttcaatccactcctaaccgaacaagcccttaattggattacaacatgtactcatgcagtgcatttgcattcagttgtatgccagatatgctacagtggtgcctgacacctgcatgttttagcttctgtggcaggcgaaagccttgcttgacaacgttgtaacccttctcggatctggcatttaacaagcacttgagcagcagcagaagcactgccgttctttacaaaactcctatccaagatgtattctggcaagagtgacatattaggcagctaaggatatgagggagcactggtgttcactaagtcgaggcattaagcgcaaggcgattttgcattgttctggtagagccaagtgatatgctgtaaaaatccttgcactttagtactccaaatgggccaaagtacttcaaagggagcttcacacatggttgggaatttaccatgaccaacctgaaatcgatttggataaccatgcttatcagtctgtatcttcattttgttctgaactcaactcagttcattcttgagatccaaatttagctgcccatagcatcagaactatcggaaagaagtggaggcatagtcctaaagttttttttaaaagagaaacaggagggtagcaagcccctagtgcataatcctataaagttggaaccagagacttataacatgctacatggtttgcggcacaatgaaggttgatatgtgataaattctactaggttatatttgaggcaaacaagatgcatagagctttgaggagtttctagtttcaagtgcaaaatgcggaagcccaagatgctgcaatacaatctcctccacagcgcaaaaagcaattggcttgttgagaaagggaagaacaaagtttacaaaggggcaatccaggtaccagaagaacttcttaagaaactaggagctttatcccctaagtcggaatcttcaagtacagatctctttgaacaatttgcacagatcacctaagcattgatagagcatggacaacaactgaaaaagaaaaaaaaggctagaaaaaccagaaaagcgccagtcgccaatcagatggtctcagcacctcttattgctctctcactaaggaaaatatgaaagccagatggtctgaacacatcttatcgctctctcacttaggaaaatatggaaatcatcaaagccgtgaggaaggaacgctgataattcaacatcatccaaggttctatcagtccagcaagctatctgaacctttctgatccaaggttttccagagttcagacttctgtttgtttattgacaatagcttagctttggtagtaaggacatgtcgcgtgccggcctctgttgttgtaagtggtgctcaatgctaaagcccttagcaagtttttcttgtggttcttttctagacgaagcttttttagccttgtttagtgtgtttctccttagcaagttgagttttagatggttggaggtgagctagatgtgtttgttgtggttatttttttcttttcttgagctagctgtggtggttaacctctacttgtaaggtttttgggcccgtttttcccttaaaagttgggccatgactctccttttctcttctaataaaattagctgcaaaacttttgctgtcatttcgaaaaaaacacaca

SEQ ID NO: 13066 - DNA, 7458 bp, Zea Mays
ataatcccatccccatccatcggagtctccgttcctggcttcctgcagccgctgcacgactccctgccgtcggtctctcacctcgtcgttggcctccctcctctcggctccctcttcgccgccgtagcaggggtgccgccctccttgccgccagagcaggagcacctccctcctcgccgccgtagtaggggcgccgccctcctcaccgctagagcagtagcgcctccctcctcgccgtcatatcaggttcatggttgtttgtttcctattcatcgggtagactgcacatggtttggaccaataccatacatcatcaaacctgagaacaacattcaatgtcttgtatcctcaatttgttgacagtcagtggcttatctgttcaatgtgtagcattttaatttgtttgtttcagatttagcgaaggatagactatctaaattcgtccttgtaggtgaaataatacccgagacttattgggatagccacagcgacagtgcctatggatggagataaatcatttgggaccatcgatgaggaaaatagaaggtttgaactagcattggtaccaccgccgattccatctactaattcatatccaagagtagagccatcaattccatttatagagcagccacctcctttagtggattgggattcaatagcaattcaagaagaaagagaggatgaaggacacatagaactttgtgacgaagcacaagtttatgaacttttaggtttcagacatgaagatgagatggaggaagaaattaatatgcaaaatgatgctgtcccgaattctagtgctgatggagaaagtggttatggaattccaccgatacaaggtgatgaaggtgcacttattccggttgttgataatattccggagatgtcaatgactgagcatgatatgaataatccatctatggaggtaggaaccagatatcctaatatgaaggattttagattggctgttagacaatatgccataaataaagaattcgagttgggtattgaggcgaccaacaagtccaaatacagagggtactgcaagggtgatggatgtccatggtctattgttgggttcaagaaggagggtgaagtgtctgttgtggtcacagtgttgaatgatgtacacacgtgtacatctagcagtaggagaaggacaactacaccttcgtgtaagtgggttgcctccaaggcagtttctatactcagaattttgttaagagatattcgggtgacagcagtggacacatgtggccagcagctagggcatacgacaaacatgtttatgagagccacatggctatagtttatgcggcgctctctagtgctaagagctggttggaaacacatcaagtttgttgggggcaacaaacacaagtcatggacaagtttttttataaagaaagccaaggaaaaatagtaccaaagaatggtttcctaaagagtctacgccggagagagcagaaactacaagagaacaactaatgcaagagagtcctggaataatgacaagaagacgtcttggaattttgatgggagaggtgacaacacatgaggcttcttcttcgtaggctttagagactacgacaacagctccaagaaagatgactccaagaaaggcgaagagaaagttgtgaaattgactttttaaagacacttagagaaagatgttagtgcagcaataaactgttagtgaaattgtcttttacatatgcagatgtcttggaactagtagttattttttgtcacagacattatagttatacattgtcaggttcgtagaatgatagcaggaccactatgaatatatgctgccattgtttcaagactgtaagccattgttttctatggggtcattctttctcctttgaaatgataatttgaaaggatattgtacattgtcaggttcattctttctccttttacagaggcatgaggccaagtacttttattctgctgggtacagaggcatgaggccaagtagttttagcattagcattgctcttgggtcatttttctctttatatcggacagtactctgctggatacagaggcttctcagattgcttgcaagagatctgcctcatgttcaggttgctcgcagggttctcaccgctgcttgatttggcgtgcagggatctgctcttattctgtgaacaaaccggacagtactctctgaagaaacgaaccaacagatgcaaattgggaagggggcaatacagtcagattattaggtgaggaaaaggaaataattagaaaacaggttagaatactattttagagagcaataacacttataaatactattatagagaaggttatatttagagtaccataagaaagaaacatgttaataagagtactataatagcaaaaaactctagggaggattaagaaacattcagacaatagacaatttacctattcttctgtaccggcggggttaacatttggtaacaccgtagcaggcatccgccgatcctcggctccgatcaatggcgtccaccaacgcaatcgatttccaactcacccaggcccgggcgctgctgtccgaattcgacaaccggctccgcgagattgattccaagtgggagacccgcgtcggcgtcctcgaaacgaaagttgcggactctgctcgaaatctggagacgatctccaaggagatccgcgacggggtggtggcgcagttggcggcggccgaggcgggtgtggatttccggatccgcctgcttgagacggggaccatcattcgcgtcgctgcgctcgagtcgactgcccacgccttcgagctgtggcgtcctcacgtcgacttgtcgatcgacagtctcttctcctccattgacgcggtttgtaccgaggtcgagaaattggggatccaccggttcccaggaccgcgtcccagcgatggcgcagcagcaccggggaccgcgacgcaaccggaaccctcttctcatcggccacgttcatcgcctccgcccgaggtccatgacggcgacgatgacgatgaagaaattgacgatgacgatgacgacgacgacgacgacgacgacgacgacgacgacgacgacgacgacgacgacgacgaggattatgagggcttcacagacgaagagctggacaaattcgaaagcgccttcggatggggttctacattcttgagtgatcctcaagttctttgtatggactcgagtgatccacaaaacccccctcgtattggccggcaaaattatgagccgctcaccgcacaggagtttttttcactgcgccacaattggcaacagctgctcgatggcaagaagacatacctccgcccaccaaagaacaaccgtgttgccaagcacagttatgctaactgcacctttgtaaccccagaacctcttgagaaggcactacaatgtcaggagccgctatctgattttggtcggaaatatgcagaaaattctatagttcagcaaaagtttaagattcttagtgaacattatgcgcacgtcagacaaatgcgaatggatggatcatctttttacagagctttccttttctcttacttggaaaaccttgggaaaatgcaagctagtcatgctgaggtcactcgcttaatggaatgtgtggcaaggtccagagagaaattttgtcgtttacattggaatgatgcgtacttctcaaatcctgaagcatttttctcaagtgttgtttctgagttcgagcaattggtcaattcagttgccaatgggctaaatgctgatgagctttacaagagaagcctacatgagattacatcatccaggaattgctgacagaggttcatatccgtacacatcatgcggactacccagaattcagtcaggaaacagaagcccttatggttagtgtttctggctgctgtacagtccttttcagaaattatgcttgattcatttcaagtagtagattattttcctcttatgctgctttaacaattatattttggtaacgatatcctcacttttccaagttattctctcagcagaaatacacaagtcctaaaaataaaatgtgggcaactttttttttgtggtaaatatggtagaaccaagctaacgaatactattttcccatttacaaatagctctctttattctgcatttgtggctttggtaacagttttgcttagcatcggtgcgtccctttgaagctggagctaacattctacaaatgagtgctctatcaagtgcacttggcatcccattgcacctggcatgtacggatgtaaccacgagtgatgatgaaattgtgacagtaaagtgctttgacttgtttcctcaatcagaatcaggagcaagcacaacatcaggagctacgagttcaatcagaagttactctctgtcaagcacaactgataaacacccagagcaaggaagggatgataacaactcaaccatgccggctggaaacttgttttcgtctgatcgcatgcctttagttatcttactgagtaggaagggtcaatatggcattctttatcgcaagtgaacaagttctgactatacggcagcctctggtggacagttctaaccggaactgtttgggttataacatggaaacctattgacaacctactctagtgtgggtgtttgattgtgcatctgcttccaaaatgtatctggttacatttttgcccccgacaaaaaatactccatttgctagatgtgctgatgcatgcagtttatgaaacaaatttggacttggcataaaatctgaggctgggagcagtgggacagatctgttactttttcggtttatttttcttatggatgtttgtaccattgctgaagcatggatggaagattcatatttggtaagaacatatgaaggactagttgttttctgatacagcaggacgtggtttggatcattcaagttcaaggaccaataacaccaaaatttcagaatgaaggcattttttgagagtccttgttactgcaggctctcctgaggacactaaaagttggatgcattctagaaggagcttcaaattattgataatgatgtggactttgtatttttattgtgaaaaatctttgaacacacttcttgtggagaactaggattagcattgacagcagactcaatcaaatgaaaatatagtatgcgagcggtcatttttctgggataaaaaactcatgtgaatggagtactcattcagtcttgcgtatttttgcagcttgcatggcacaaatagggctgttgagtaaaaaatttaaagccttttatgggagagattaaattggaaatacatatttgcttcaagtggaaggttgtggacatacagcgccacctacttgacatgatgaatggttcgtgacattcaaacacagacagacaagtctggttctacctccttaactttattggctggtcatcttcgcgtcacaagggcaggagagaacaataatttcgtcgagtggtgggtcaaaatcaacaaatgggtgccttcaaccttaaaaaagggtctaattccttgataatcctaggctcctggatgatttggaaacaaagaaattagattgttttcaattggaccacacgagtatcctgaggattcttgtccagattgaggaggctcatctgtggtgtcttgcaggagccaaagagctagcccgcgcaactgtagcaccgctacctcttaagtatgtctccttagaccttgttcggttacattaaatcttctggcagtactcatgcagtgcatttgcatcggaggggattgaaagagattaaatcttcttctattcaattttgactagcaagggatttaactccctccaatccggttcaatccactcctaaccgaacaagcccttaattggattacaacatgtactcatgcagtgcatttgcattcagttgtatgccagatatgctacagtggtgcctgacacctgcatgttttagcttctgtggcaggcgaaagccttgcttgacaacgttgtaacccttctcggatctggcatttaacaagcacttgagcagcagcagaagcactgccgttctttacaaaactcctatccaagatgtattctggcaagagtgacatattaggcagctaaggatatgagggagcactggtgttcactaagtcgaggcattaagcgcaaggcgattttgcattgttctggtagagccaagtgatatgctgtaaaaatccttgcactttagtactccaaatgggccaaagtacttcaaagggagcttcacacatggttgggaatttaccatgaccaacctgaaatcgatttggataaccatgcttatcagtctgtatcttcattttgttctgaactcaactcagttcattcttgagatccaaatttagctgcccatagcatcagaactatcggaaagaagtggaggcatagtcctaaagttttttttaaaagagaaacaggagggtagcaagcccctagtgcataatcctataaagttggaaccagagacttataacatgctacatggtttgcggcacaatgaaggttgatatgtgataaattctactaggttatatttgaggcaaacaagatgcatagagctttgaggagtttctagtttcaagtgcaaaatgcggaagcccaagatgctgcaatacaatctcctccacagcgcaaaaagcaattggcttgttgagaaagggaagaacaaagtttacaaaggggcaatccaggtaccagaagaacttcttaagaaactaggagctttatcccctaagtcggaatcttcaagtacagatctctttgaacaatttgcacagatcacctaagcattgatagagcatggacaacaactgaaaaagaaaaaaaaggctagaaaaaccagaaaagcgccagtcgccaatcagatggtctcagcacctcttattgctctctcactaaggaaaatatgaaagccagatggtctgaacacatcttatcgctctctcacttaggaaaatatggaaatcatcaaagccgtgaggaaggaacgctgataattcaacatcatccaaggttctatcagtccagcaagctatctgaacctttctgatccaaggttttccagagttcagacttctgtttgtttattgacaatagcttagctttggtagtaaggacatgtcgcgtgccggcctctgttgttgtaagtggtgctcaatgctaaagcccttagcaagtttttcttgtggttcttttctagacgaagcttttttagccttgtttagtgtgtttctccttagcaagttgagttttagatggttggaggtgagctagatgtgtttgttgtggttatttttttcttttcttgagctagctgtggtggttaacctctacttgtaaggtttttgggcccgtttttcccttaaaagttgggccatgactctccttttctcttctaataaaattagctgcaaaacttttgctgtcatttcgaaaaaaacacaca

SEQ ID NO: 13067 - DNA, 4772 bp, Zea Mays
tctctattcttctgtaccggcggggttaacatttggtaacaccgtagcaggcatccgccgatcctcggctccgatcaatggcgtccaccaacgcaatcgatttccaactcacccaggcccgggcgctgctgtccgaattcgacaaccggctccgcgagattgattccaagtgggagacccgcgtcggcgtcctcgaaacgaaagttgcggactctgctcgaaatctggagacgatctccaaggagatccgcgacggggtggtggcgcagttggcggcggccgaggcgggtgtggatttccggatccgcctgcttgagacggggaccatcattcgcgtcgctgcgctcgagtcgactgcccacgccttcgagctgtggcgtcctcacgtcgacttgtcgatcgacagtctcttctcctccattgacgcggtttgtaccgaggtcgagaaattggggatccaccggttcccaggaccgcgtcccagcgatggcgcagcagcaccggggaccgcgacgcaaccggaaccctcttctcatcggccacgttcatcgcctccgcccgaggtccatgacggcgacgatgacgatgaagaaattgacgatgacgatgacgacgacgacgacgacgacgacgacgacgacgacgacgacgacgacgacgacgacgaggattatgagggcttcacagacgaagagctggacaaattcgaaagcgccttcggatggggttctacattcttgagtgatcctcaagttctttgtatggactcgagtgatccacaaaacccccctcgtattggccggcaaaattatgagccgctcaccgcacaggagtttttttcactgcgccacaattggcaacagctgctcgatggcaagaagacatacctccgcccaccaaagaacaaccgtgttgccaagcacagttatgctaactgcacctttgtaaccccagaacctcttgagaaggcactacaatgtcaggagccgctatctgattttggtcggaaatatgcagaaaattctatagttcagcaaaagtttaagattcttagtgaacattatgcgcacgtcagacaaatgcgaatggatggatcatctttttacagagctttccttttctcttacttggaaaaccttgggaaaatgcaagctagtcatgctgaggtcactcgcttaatggaatgtgtggcaaggtccagagagaaattttgtcgtttacattggaatgatgcgtacttctcaaatcctgaagcatttttctcaagtgttgtttctgagttcgagcaattggtcaattcagttgccaatgggctaaatgctgatgagctttacaagagaagcctacatgagattacatcatccaggattctttgtttgtttagattgctgacagaggttcatatccgtacacatcatgcggactacccagaattcagtcaggaaacagaagcccttatgttttgcttagcatcggtgcgtccctttgaagctggagctaacattctacaaatgagtgctctatcaagtgcacttggcatcccattgcacctggcatgtacggatgtaaccacgagtgatgatgaaattgtgacagtaaagtgctttgacttgtttcctcaatcagaatcaggagcaagcacaacatcaggagctacgagttcaatcagaagttactctctgtcaagcacaactgataaacacccagagcaaggaagggatgataacaactcaaccatgccggctggaaacttgttttcgtctgatcgcatgcctttagttatcttactgagtaggaagggtcaatatggcattctttatcgcaagtgaacaagttctgactatacggcagcctctggtggacagttctaaccggaactgtttgggttataacatggaaacctattgacaacctactctagtgtgggtgtttgattgtgcatctgcttccaaaatgtatctggttacatttttgcccccgacaaaaaatactccatttgctagatgtgctgatgcatgcagtttatgaaacaaatttggacttggcataaaatctgaggctgggagcagtgggacagatctgttactttttcggtttatttttcttatggatgtttgtaccattgctgaagcatggatggaagattcatatttggtaagaacatatgaaggactagttgttttctgatacagcaggacgtggtttggatcattcaagttcaaggaccaataacaccaaaatttcagaatgaaggcattttttgagagtccttgttactgcaggctctcctgaggacactaaaagttggatgcattctagaaggagcttcaaattattgataatgatgtggactttgtatttttattgtgaaaaatctttgaacacacttcttgtggagaactaggattagcattgacagcagactcaatcaaatgaaaatatagtatgcgagcggtcatttttctgggataaaaaactcatgtgaatggagtactcattcagtcttgcgtatttttgcagcttgcatggcacaaatagggctgttgagtaaaaaatttaaagccttttatgggagagattaaattggaaatacatatttgcttcaagtggaaggttgtggacatacagcgccacctacttgacatgatgaatggttcgtgacattcaaacacagacagacaagtctggttctacctccttaactttattggctggtcatcttcgcgtcacaagggcaggagagaacaataatttcgtcgagtggtgggtcaaaatcaacaaatgggtgccttcaaccttaaaaaagggtctaattccttgataatcctaggctcctggatgatttggaaacaaagaaattagattgttttcaattggaccacacgagtatcctgaggattcttgtccagattgaggaggctcatctgtggtgtcttgcaggagccaaagagctagcccgcgcaactgtagcaccgctacctcttaagtatgtctccttagaccttgttcggttacattaaatcttctggcagtactcatgcagtgcatttgcatcggaggggattgaaagagattaaatcttcttctattcaattttgactagcaagggatttaactccctccaatccggttcaatccactcctaaccgaacaagcccttaattggattacaacatgtactcatgcagtgcatttgcattcagttgtatgccagatatgctacagtggtgcctgacacctgcatgttttagcttctgtggcaggcgaaagccttgcttgacaacgttgtaacccttctcggatctggcatttaacaagcacttgagcagcagcagaagcactgccgttctttacaaaactcctatccaagatgtattctggcaagagtgacatattaggcagctaaggatatgagggagcactggtgttcactaagtcgaggcattaagcgcaaggcgattttgcattgttctggtagagccaagtgatatgctgtaaaaatccttgcactttagtactccaaatgggccaaagtacttcaaagggagcttcacacatggttgggaatttaccatgaccaacctgaaatcgatttggataaccatgcttatcagtctgtatcttcattttgttctgaactcaactcagttcattcttgagatccaaatttagctgcccatagcatcagaactatcggaaagaagtggaggcatagtcctaaagttttttttaaaagagaaacaggagggtagcaagcccctagtgcataatcctataaagttggaaccagagacttataacatgctacatggtttgcggcacaatgaaggttgatatgtgataaattctactaggttatatttgaggcaaacaagatgcatagagctttgaggagtttctagtttcaagtgcaaaatgcggaagcccaagatgctgcaatacaatctcctccacagcgcaaaaagcaattggcttgttgagaaagggaagaacaaagtttacaaaggggcaatccaggtaccagaagaacttcttaagaaactaggagctttatcccctaagtcggaatcttcaagtacagatctctttgaacaatttgcacagatcacctaagcattgatagagcatggacaacaactgaaaaagaaaaaaaaggctagaaaaaccagaaaagcgccagtcgccaatcagatggtctcagcacctcttattgctctctcactaaggaaaatatgaaagccagatggtctgaacacatcttatcgctctctcacttaggaaaatatggaaatcatcaaagccgtgaggaaggaacgctgataattcaacatcatccaaggttctatcagtccagcaagctatctgaacctttctgatccaaggttttccagagttcagacttctgtttgtttattgacaatagcttagctttggtagtaaggacatgtcgcgtgccggcctctgttgttgtaagtggtgctcaatgctaaagcccttagcaagtttttcttgtggttcttttctagacgaagcttttttagccttgtttagtgtgtttctccttagcaagttgagttttagatggttggaggtgagctagatgtgtttgttgtggttatttttttcttttcttgagctagctgtggtggttaacctctacttgtaaggtttttgggcccgtttttcccttaaaagttgggccatgactctccttttctcttctaataaaattagctgcaaaacttttgctgtcatttcgaaaaaaacacaca

SEQ ID NO: 13068 - DNA, 3191 bp, Zea Mays
agaaaacaggttagaatactattttagagagcaataacacttataaatactattatagagaaggttatatttagagtaccataagaaagaaacatgttaataagagtactataatagcaaaaaactctagggaggattaagaaacattcagacaatagacaatttacctattcttctgtaccggcggggttaacatttggtaacaccgtagcaggcatccgccgatcctcggctccgatcaatggcgtccaccaacgcaatcgatttccaactcacccaggcccgggcgctgctgtccgaattcgacaaccggctccgcgagattgattccaagtgggagacccgcgtcggcgtcctcgaaacgaaagttgcggactctgctcgaaatctggagacgatctccaaggagatccgcgacggggtggtggcgcagttggcggcggccgaggcgggtgtggatttccggatccgcctgcttgagacggggaccatcattcgcgtcgctgcgctcgagtcgactgcccacgccttcgagctgtggcgtcctcacgtcgacttgtcgatcgacagtctcttctcctccattgacgcggtttgtaccgaggtcgagaaattggggatccaccggttcccaggaccgcgtcccagcgatggcgcagcagcaccggggaccgcgacgcaaccggaaccctcttctcatcggccacgttcatcgcctccgcccgaggtccatgacggcgacgatgacgatgaagaaattgacgatgacgatgacgacgacgacgacgacgacgacgacgacgacgacgacgacgacgacgacgacgacgaggtttgggtttgtttccagcttcacgcgggtctcttggggttgtgtgcgttggcaggttctggatttcttgattcgcggcacccaatttcttggggattaatttctcccgttctgatagaaggcgatggctcatcgactgggtcggtcgtaggctggttttcgtttgaacacgtcctcgatttgattgaccattgggtcgggtttttgattttacggggaaacccagaaaagaaggaaggaaggggaaaccgcaatgccagttattgaatatcgcggagtggtgccatggcaatttcgagtgtccgttttttgtcccgttctggctgattcttgccctctgaagtttttcgtcgctttattcaatcatccgtttacatttttatgtgtcataatttgggcttccttcagggatttgatccatttgcaggatgacttagtttttgtagataggtaaatttagcaaattcgaggtgtgaatcatgtgaagcatttttttctttttccgtttagaattccgcgagaaaactcggtacatgttgagcacattatttggattctttttttacgtgtttttgttgtaaatggacatatcatgataccagaggtcatgccatgacttgcatgtcttctggaaagtttttttagactatggccaatcattcgagtaggataaaataggtgaattactgggattatttcgttgtgctctccctgcttccatttggaaataaaataaaataataaattacctgatgattgcaactcacaaggattatgagggcttcacagacgaagagctggacaaattcgaaagcgccttcggatggggttctacattcttgagtgatcctcaagttctttgtatggactcgagtgatccacaaaacccccctcgtattggccggcaaaattatgagccgctcaccgcacaggagtttttttcactgcgccacaattggcaacagctgctcgatggcaagaagacatacctccgcccaccaaagaacaaccgtgttgccaagcacagttatgctaactgcacctttgtaaccccagaacctcttgagaaggcactacaatgtcaggagccgctatctgattttggtcggaaatatgcagaaaattctatagttcagcaaaagtttaagattcttagtgaacattatgcgcacgtcagacaaatgcgaatggatggatcatctttttacagagctttccttttctcttacttggaaaaccttgggaaaatgcaagctagtcatgctgaggtcactcgcttaatggaatgtgtggcaaggtccagagagaaattttgtcgtttacattggaatgatgcgtacttctcaaatcctgaagcatttttctcaagtgttgtttctgagttcgagcaattggtcaattcagttgccaatgggctaaatgctgatgagctttacaagagaagcctacatgagattacatcatccaggagtgaggatacaaatttttttgggatgtgttgtttatttgttctctatgtaacattttctttggttagttctttgtttgtttagattgctgacagaggttcatatccgtacacatcatgcggactacccagaattcagtcaggaaacagaagcccttatggctggtcccttctaagttcaagcgaggaagaacggtgtaggaggctttggttgatggtcgttgggtcagagatatcaggggtgttctggatgctcaagttctcatggagtaccttcaactctgggatgtcatggaaacggttagtctggcgccaggggttagtgaccagcacctctggaccccatcatcctatggacaatactcttcaagatcggcttaccggaggttctttatatgctccgtcgcttttgaacccgcccataggatttggaagtcctgggcccctctgaagtgcaagtttttcctttggttagcgagtctcaatagatgttggacagtggtccgtttggcgagaagagggctggaacatcctgactgttgtgtgctctgtaatcaagaagaggaaacaattcaacacctgctggctggctgcatcttctctaggcaagtctggttccaggttctttccgcctgcaatcttcaacacctgtgccccttccctggggaggacaacttccaagtctggtggcagcaggcggagcaaaacgtaccaaagcagcggcgaaaggttttcaactcggtggtctgcttggttgcttggtggttgtggaagcatcgaaattgctgtgtgttcgatggtggggctgctgatatcgctaaagtggtgcgggagatttgtgaagatgccacttactggcgccttgctggagcccctagggttgtgggctga

SEQ ID NO: 13069 - DNA, 2083 bp, Zea Mays
caccgtcgcctcccaaaccgtttacgtacaagcagaaggcggtgtggcgctggcagaggcggcgcggcgcgggaagaggcagaggcggcgcgacgggaccgaaactctcttatttgccgtcgcggctttcacggccgttctccggtgacgaggcgccgagacaggagccctcatcttcgtcgccacggtcaccgtcgcctcccgaaccgttcacgtacaacttcggcgcgggaagtaccggaggcggaggaggcgatggtgcagcagcagcgctccccgcgccgagacaggagccctcttcttcgccgccacggtcaccgtcgcctcccaaaccgtttacgtacaagcagaaggcggtgtggcgctggcgctggaagaggcagagggggcgcggcgcgggaagaggcagaggcggcgcgacgggaccgaaactctcttatttgccgtcgccgctttcacggccgttctccggtgacgaggttgatgatgaaaagccggacgaatttgaaaaagaaaacggatggggttctctgttcatgagtgaccctcaagttctttctatgcacgatccacaaaatctccctcgttatattggccggcaaaaatgtgatccgatcagcacacaggagttttttgcactgcgccacgattggctacagctgctagatggcaagaagacatacctccgtggtactgccgactccaattatgccgactctaacttcgtaaccccaaaacctcttacggtcgcagtattatgtcaggagtcactatcatatttggttcttagaggtgcaagaaaacctatcacccagcaaaagttcaagatacttaatgaacattatgtgtgcttcagaccaatgcgaacggatgggtcacagttttacagagcgttccttttctcttacttggaaaatcttgggaaaatgcaaggtagtcaagctgaggtgactcgcttaatggaatgcgtggcaaggtccaaagtgaatttctgtcgtttagaatggaataaagcatacttctcaaatccaaaagcatttttctcaagtgttgtttctgaatttgagcacttggtcaattcagttgcaaatgggctgaatgctgatgagctttacaagataagcgtacaggagaattcgtcatccaggattctttgtttgcttagattgctgacagaagttcatatccgtacacatgaagtggactacaacagagaactgagtcagaatcggaaagaaaaaataaaagcacttttgcactgcaaaaaatctgtgcgtccctttgacgctgatgccgaccttttagaaatgaaggctctatcacaagctcttggcattcccttgcacctagcagctgtggacgataaccccctgcccgacagaactgtgcaagtaaagtggattgacttcattcctcgaccaggacctctcggttcaatcagagaatactacctaggacctctcggttcaatcagacaatactacctacccagtgcaactgataaacatccagtcttgccagctgaaaactttcttttgtctggtcgcatgcctctagtcaccatattaaggactgtccgtgctactgccattctttatcgcaagtgaacagattctgagtatgcagcaggcagcagcctctggttgatggttgtaacaggcagtttatgaaataatttggacttggcatagtatgagaggcactgtttcttacagtaggaagaataccttaaggtgggagcagtggaatatatcagttagatttttttttgcttatggatgtagttccctgttgcttaagcagttggatggatgattgacattcgctaagagcatatgaaggactagttctttcctgatacagagatatgtggtttggagcatccatcttcaaggaacaatataataccgagatttgcagcatgaagggtgagtccctattattgcaggccttcatttggtcaatgattggtaatgcttgctaaaagtaactttaaatcgataatgatgcggtatttgtaaaattcttcgaagatactttttgtggagaactaggattaacattgatagaagaatccatcaaa

SEQ ID NO: 13070 - DNA, 462 bp, Zea Mays
atgcatgacacacacgtagctaggacatctctgctacgacgacgactgcatgctgctgatggccacgtacgctgccatccaacgagcgagctacctccactatggttccatcgatcagttgatcttggtgcagtcgacggtggggctgatgggcacgccgacggagacgccgcacttggaggggatgttggcggcgttggccatgctgacgccgccgccgagccggcccgtcatgctcttgaggcagttgcaggtggcctgccggtccgccgtcgacgacgcgcggctgttgagcgagcgcaccccgctgcagcacgccgcggagggagagaaagagttgctagctggtgttagtgaggtgaagaagagattattcgtctgtatgctagctagctgtgatggatgggagcaaggtggtgccatgggtggggtggtataaatagggccggccttgcattggta

SEQ ID NO: 13071 - DNA, 307 bp, Zea Mays
ccaatactagcttatttcagtttatttatagtattaaagtgatattttacctttatatctttttatcaattatcataaactaacttatataatctaagaggtttgggtttgggatggcaatatcaacatgtaactcttgcatattcatatttcgagctacccataccaagatacagaacgtaaacaaaagcaaaatgtactaaaaaaactatcttgctgatgagagtcgtcatcgaatccggacgaagccctcccggcgacggcaaagaagtaccctgcacggcaccaccgtgtcgccgaccttgac

SEQ ID NO: 13072 - DNA, 1705 bp, Zea Mays
ttaagggtgcctttggttgggcttccaaacttacttttacttcaagaaaagcccaaataccaaccaaagggataaacttttgctaacgtacttccaaaaaagtagcttttctctagttcaattgtcacagtagcccttgacgtgctttttttggctgtgggggcgagcttttccacaaaattacccgcaatgccattataatcgtaccgattcgttattctcgtcgctggttttgaagaaatcaaattgatccccaggcggcgaccctatcctccccaggcggcggccgtatcctccccagcggctccccaggcggtggtcgtatcctccccagcggctccccaggcctgctcccagacggcagacggtcctccccagcggttgcccaacagctccccaggcgagtctccagcgtctaaccagtcggtggccgggcctccccagcggctcccaggcggtgcccgattcctcccaggcagcagccatctacctcctctcagatggctgacaacatggcaactttggccaaacaagcaaacaagggtctattgtatcttgccgaactgtcccagcaagcagctgttattggtgaaatgggtgaggagtacaatcagagatacttgcacaaaggagagtacagggaaaccccagaaactggaatacaatgggttacgaattgcatgggtcgtccaaggtacttttataagatgtttcgcatgagcacaaatgttttcatggcactacatgacttgctcgtctctagttacggcttaacatcaactaataatgtatcgtcgatggagtcactagcaatgtttttgtggatcgttggaggaccacagtcattttcacaagctgaaaatcgttttacccgatcactatggacagtgcacaccaaatttcatgaagtactaaaatgtttgcgcaagttatcgaaagataatattaaaccaagagatcctactttcaaaactgagcatgatagaatcaaggaggaacgtttctggccctatttccaaggagctatcggagctattgacggttcacatgttcctatcacagtgccagcagatgaagtggttaactatacatgtcgacatgggtatacatctcaaaatgtgttagctatttgtgattttgacatgagatttatctttgtcgttgctgggtggccgggttctgcacatgacacacggatcttgaatcatgctttagcaaatttcccttcatttccggtgcctccaaaaggtaagtattatctcgtcgactctggttatccaaaccgacaaggatatctagcccctttcaaaggaagcacataccatatactagaatttcgacttcgtaatggacgtcctcctcaagggaaatatgagatgttcaatttcttacattcatctcttcgaaatgttattgagagggcttttggagtcttgaagcagaagtggcgtattttgaaaggcattccaagtttttctacacgtacacagaaacatataattatagcttgcatggcgttgcataattttattcgtgacagcaattcagaagataggttgtttgatagatgtgatgccgatgaggagtacttggtacaacagagtttcacgtcacaagcacaaggagatgacaatccagagggagagaatgagaatacaatgaataccattcgtaataagatagctgatgctttgagtagtgcgag

SEQ ID NO: 13073 - DNA, 2768 bp, Zea Mays
ctctttcgctcgctgcctctagcagtctcttgcacaagcaccccaaccagccagccagccagccattactcggaagcttgcttgctgctgctggctgctgaaggcgcagcagagctagcaaaggctttcccatccaaaggcggggcgggggagcgactctctcaggcaaaaataaaagcttgatgtgaagccgcttgctctgcgattgctggttgcggcgggctgcagcgttgtctgaggtgcgtggtcaagtcgaggcgaagatgagcaaggaggacgtgctcaagacttgcgtgctgaaagtgaatatccactgcgatgggtgcgagaagaaggtcaagaagatcctccacaagatcgatggtaacaaacaaacattcttctaagtcaaattgcttcattctttttcttttcttttcttttttaaaaaagaaagaccccgagctttgctctcttgtgttgtgctcacacagttcactgcgttggatcctagtaaatgcttggttctgttctgctcagatttgctgcttctgtgttcttctattctgaaaagcatttgccccctcctaatcttatcttaagtaggagtagaaatgaaaaagtgctgcgctgatctgcaggcgtgtaccagagcagcatagatgcggagcaggggaaggtgacggtgtccggcctcatggatccggccaccgtcatcaagaagctcaacaaggcgggcaagccggcgcagctgtggggcgccaagcctggcgtggtgagccagctccagaagctgcagcttggcggcggcggcggtggcggcggtggcaaggacaagcagcccaagggtggcgacggcgggggcaagggtcagcagcctaagggtggcgacggcggcgggaagggccagcagaccaagggcggcggcggcggaggaggaggaggaggcaagggcgggaaagatgcgaacatggtgctgccgcagccgacaccacagcagatgcagcagctgatgcagatgaagggcatgaagctgcctcctgagctcctcatgggcatgggcggcagcaagatgccgccgttcccgtcgcccgcgcctgcacccggcccgccgccgccggcggccaaggaccccaagcccgccaagttcagctaccccgaggacgacgagttcggggacgaaggcagcgagttcgacgacgagttcgatgacttcgacgatgaggacgacttcgaggacgacggcttcgacgatgacgacctgtacggtgaccccaagatgatggcgaagcccgtggccatgccgccggccgccggcaagaaaggcgggaacggtggcaagaagggcggtggcggtgggaacgagatccccgtgcaggtgaaggggaacgcgcacaacggcggcggcaagaaggactcgggcgcgaagcagaaccagggaggcgggaagaacggcggcggcggcggcggctcgcaggcgccgcagaacggcaagggcggcgggaacgggaaccagcagggcaagaagggcggcggcggcggcggtggtgggccgcctgccggttctggcgccccgatgatgggcagcatggcaatgccagcgccgcggccgccgctgccgcagcagcaacagccgggcccgggcatgatgatgaggccgccgaacatgatgggcggcgccggtttccccggtggtggcatggggccgggcatgggccagatgggcggcgcgccgatgggccaccctcaccacccgcacccgcacccgcaccagcacatgggtgcgggtggcaatggcatgcagatgcagcctggcggtggcggtggcggtgccgtgcatggcatgccagccggcgccatgccgggacatgctgctgggttctaccaaggcggcggtggtgcagccggcggcggcatgccgtccgggccagagatgctgcaggcggccgggaaccccatggccatggcggcgcagcagcagcagtacatggcgatgatgcagcaacagcagatgatgaatggtcacggcgccggcggcgccggcgggtacccggcgatggggtacgggtacggccggccggcgatgcagtacccaccgccgccgccgtactactaccacccgatgccgcagcggcacccgcacgacaacatgttcagcgacgagaaccccaacagctgcacggtgatgtgatcatgtccctgtcatgcatgcgaggaggcaaaggtcgctgcggcctgtcgaagctttttctcctgctgcctgctattcttccggaggagggagagaccgatcatgggtcagcgtcaccatggttggaacaaagtccccggattggattggattggatctcagtatacatgagacatgcatgagaagcccccccctaccccttttttcttctttttttttctttttcactactactactagtatttctcttttttttctagcttgtttttcacctttactttctttggacaaagagggggaaaaagaagcaacttccttgaaggcgaaggtaggtatagtagtaattatcaatagtggtgggcataagacatgatggtggtggtggttcatggggtttatagtaaggagtagctcaagaagggtggctctcatggctccccccttcttgttgctccacaatgtgatgatggtatggaggtggcatggtagaaaagcttggtgaatctcaatgtgctttcgagtgccgtgtctgtccctagtggaatggaatgtctctggtgtccccccgttcattttttttaatctttatggctttctg

SEQ ID NO: 13074 - DNA, 1202 bp, Zea Mays
taaaaaacaatctataatatcttgtagttgtagtttatatattttatatgatatggaaatattgtgaaaagatacagtagactagacatagcttaacaatattgcgtacgtgatcgaaacggacgtgtcgtcatcgtcgtgtgtccccatcccgtcccgtcccgttggctgcactggctcgcacaagtctcttcctctacctgcctacgaacattatccaacaaacaaaacaaaacaaaacaaaaaaccagtaatatgctagagcatggagtggtgccgtgttccgtccgtctccacgatcattggcgacggaaacaaaataaaataaataaaaaggaccccgaaagatattcctgcggcgacgaacgagcgaggagtcgtgccgctcgacgcttgtggcaagaaatccacgcgacgacgtggcacgcacgataaaggagagtactagcatatatttatcccgtcgccatcggtcgccaaatttttctgatccccaggccctccctgtcactgccagcctgccacgtgggcgtgtcggacggtggaggaacaagtaataaattaaaccagtagatcttcttaaaactccaagtccagctaaaatatgcatactgttacaaaacattttgtacatatgatctaatccatccatgtgtcatagtgacagttattttctaagagacacactccttagaaactcttgtatatatacttcactacactacaataaagaactgtccctgtctttctcctgttgccactgagtactacacaatagattgcaacatatacataaagcgtttggctccggagccaaatgtgatagaaaagctcacgtccgagagattttagaaaattaaataatttaacattttaaacaaaataatttaacatttaaacataattttctatttctagaatcacgctccaccccgtccgtcctatatagaatcaatctaaacaaccattctttctatctccgtcgcctaccccgtcactatcggccgccacattttcctgatccgcgggcggcgctctctatcgcctatgggtgccaactgccaagtgagcgtgtcggacgcagtggagcaacaagtaaaaaaaaaaaaactagcagattttaaaaccaaggccccgattaataaaatatattcagccatgtagtgggtgacacggcagttttcgagaacaggcaagcggat

SEQ ID NO: 13075 - DNA, 712 bp, Zea Mays
gttaaatccaaaccaaataatctacgaagctggtggagagggcttttcctactcagaaaccgatgggcgcccacagcatctggatatgggataagacaacgacccacagatttccgggttttttttttttttttgctgctggtgttggtgtgcgtgacccgtggactgggtgagtgagtggcagggagaatctagccccatgtggtggtgtggcctttctgaattcttctggtttagcttctccctccctccccggccgggtcgtggcgtcgtgctcttgaagcttaatcagtggtccaggtgcgctgcagaggaatcaagcaggggtgatcaaggcaaggactgtcttcttcggctgctggcccccccatctactaagtgcttggacgacttggcatcttcgaggacgttgccatagtgccactgcagattgttcttccttggaatctgtttcgtcaacccgtgtggttatataagatactcagttcagttggttctggaataagaatgcatcctagatattttcaaatttcaggacagaacaagggatagtgtcagagacatgcgcatcatagctttattccaggaccagtttgattcctgcatatgtagaactatctggtagacgtatttggtctttaggcaattgtatcttgtatgtgtgaattttgtgtttggttagtacgataagccatgtctaggattacaagat

SEQ ID NO: 13076 - DNA, 6517 bp, Zea Mays
ctcactcctcgccgcgcgccgcctcgctccccaccgccgcgccgcagtagggttcgcaagcccgcagcagagcgcgtaccgcaccctgccccccccccccccccccgctctgtccaccccacgccggcctctcgctgccgctcgccgcaccgcacgagaggcgagatcggcggctcccagattcgtacccgggccacagtccctcctcgccctgcgtgtcggcgccgcctccacacgcccgcgcttcaccagccccgacggaatctctcccggaggcgcgcgattcgccgcggggatggtacggtagggccgcagtcgctagggtttccgcgcccggtgccgccatggacgccgagccccgccgggagggttccgatcgggcgcccgccgccgactcctccgcggcgccggacggtgacgaggcgatggcccgtggcgtcgctgctgcggagaagcctacagcggccagtgaggcgggggctggtggagacgtcgcggcggcggagcgtgggcgtgacggggagacgccggctggagatccgggggtggtggctgacgaaggcggtgctgtgggcgaccagtgtcctgcggcgcctcaagcgagcgaggtggacgagggtggcgccgcgggcaaggagcggtctgatggtggtctggcgaatggggcagttgagggcagcagcattgcgggggaagtgccagatgtggctcctgtggtatctgaagcacggatggacgaggacgggggttgctccacaggcaatgagtactctgaaatgaagatggaggtggatggcggctgcgtagcagaacgagagggcgatggtcaggaacaggaacaagagtgcactgcagctgctgtggaaagcgaggttaagacgggggaaggtgacggcggagtggtgaatcaagggactacggcacatgctgggggtcttcaggttaaagaggaggtgggggaaggcttggtgggccgctacattggacgtagcgctccagggcgcacgaggattcttattgggaaggttgtgtcctatgatagcacagctggggtctacagcctggtgtttgaggacggacacgctgaggagctggggcttcctcagctccaggagcttctcatgtcggatgataatggtgcattaggcatgaaggtgagctgccggaagaggaagctagacttgctggtttcatcagggagcgccttggaggtcaaagagccaccaagtactaggcagagggttgatggatgcgagatgtctgccaggcctgatgagctgcagcatagtgcgtctggctcggatatgtctgaggatgttgagtcttcgagcaattcatcagatttcactagagaagaaacatctgagccatgccctcctgtacaggctgtggagttgcctccgtcgtcaggcgacattcctgtgccagaagagtccataagttctctcctctctgtttataacttcttgcggtcgttcagtgtgcagctgttcctgagtccatttggactggacgattttgttgcggccattaattgcagcgtgcagaataacttgttggatgctgtgcacgtctcgctactgcgggctctgaggcggcatcttgaatctagatctgcagaaggatctcgatcggcttcaaattgcctgaagtacctggattggacattactagacgcattgacttggccaaatttcttactagagtacctgtatgtgatgtgttgcattaaaaatctaggggggaagagctttggtagaagccttctagtcgccgaatactataaacttcctgttaccatgaagttgagggtgctgcaaatactctgtgatgatgtcattgaatcagaagaactcaaaactgaactggaaaatcgagtaggctacaatgaggagatggagtatgagatagaatctagtgcatttttggaggctggttcaagatcagtctcaactagagcagcaaaggcctcagcttgcaaaaacacgaatgatttccataatcttctcgaaagtgctccaaatgtaacaaatcccgaaactgctccagcagtcctgtctcaggatggcaatagtgatgattgccgaatatgtgggatggatggaactttggtatgctgtgatggctgcccgtgggcatatcattcaagatgtattggtcaaaacaaagctttccttcctcagggtgactggttctgtccagaatgtatggttaacaagcttggcccaacttcctcaagaattgagcgtggtgcaagaggagctcaaatgtttggcattgatatgtgtgggagactattcttaggaacttgcaactatttgctggtgatcgaaacagcttcagatgcagagtcttatgcaagatattacaatcagtatgatgttgccaaggtcctccaaagccttgctgtctcagatgcatatgtggacatatgcaagcaaataaaggactactggaaacatttacttggtataattcataacgagagatcaacaacaggtaaagaagttggtgcgaaagtagcacttcctcaaacaaacgcgcagcagaaatttgtggctaatcagagcgcaatgtgctcagtcgaatgcctggaggaacaaaaatgcaagtcaagcttaggtgttgtcactgagaaaaatgctgaagttttcaagcaaactgtgtcagctcagaacaacatacataatgcacacagaaatggagcttttggaccatctgtggtatcctcagtttctcatcagaatggatccattgtaacaggtgggtctaacatagcacaggcgcagccagctcagagtattttccatccagacccatccaccgtttctgtgacgtcaggatcattttgtccatcttctctaggtaaacaccaccttcagatgtttccggaaagatctggaaacatgagtggtgtcaaggcagcaaaattgtcttcttttaaaccacaagcttacatgaacctctacaatcatggcaatattgcagcatctgctgctgccaatatagctgttattacatccgatgacagtaaagtttcagcatcccaactgactgcgaaacaccggaagaaaatggctgcagacaatgctctacaattgaaagcattttcttcagcagccacacaatttctttggccgagtaccgaaaagaagcttatggaagtcccaagagatagatgtggttggtgccttgcttgtagaagttcagcaattggaactaaaaaggcttgttttcttaacatggccacttcaaatgctgttaaatgctctgctcgaattcttagtgtaatgcgtgtaataaaaaattctgatagccactttcctagtattgttgcttatttagccaacatggaggaaagtttgcgtggcctcttggttggttcactacaagatatgcagcagaaagaaaggtggcatcagcaactacaagaagcttcgaactgcagaactgtaatacccctcttgcttgagttggaaagcaatatccgtggagtagcattttctgcaagttggttgaagccaatagacgattggcctttggaatctcctggtccatcaacgggcgcatctcgtcctgcacaataccaaaaacgtggggttggtggaaggcgtggcagaagacgttcggttgcatctgaatctggtactgctactgctactgatgaggacaacagctggacttggtggactggaggaaatatttcaaaacgtactttgcagaggggggctcttctacattcaaccagaagaaaagctgctcgccaaggtggtaaacagtggatagcaggtttatcttaccatgaaggttccaaatttccaaggcgatctcggcagtttgtctggagaggatgtgttggaataagccagacttcatctcaacttgctttacaggttagatatcttgatgcccacatcagatggaaggatttcatccctccagatcatattccctcagatggaaaaagttatgatgctgatttttctgctctcagaaatgctgtagtctgtgataaaaaaataattgataataagataagatacgcacttaagtttcgcaaccaaaagcatcttcctgtgcgtgtgacaaaaaatatcttggaatcagaaggtgatcaggatgaaaatagcaaattgtggttttctgaaaaccatgtgccattgtacatgctgcgagaatttgagctgcacgctggggataactccttgcctactccaggaatttcagactctaactgttttaccaatttgtacccacgacgagtaaaagcatatgctggagatgtcttttcctatctttttcacaagggagaagtctatccctgcacctcatgcaagaaggatgtcatctacagggatattgttaaatgcaacacttgtcaaggtaattgtcataaagagtgtacatcaagttctgttgttagcaaaggaagcagtgctacttccagtttgatatgcaagttatgccttcagaagcggaatcttatgcttactagctacaatacaaatgcaagctatatccagcctcaacaaaagggtaatggccaacaaccagtgaccgctctcagagttaagtttaaggttagttcttcccattctgcacagccatctgcgaaggtggaagctcagtcgagtatgaatgtgaaagcccggccagttgtaaacgtgaaaacacaaccatttgcaaaggtggaagctcagccaattatgaatgagaaagtccagccaactgcgaagatggaggtgcagccactcgcgaagatggtaactcagaacatcactggtgtccaagctctgccaaagacaaaagctaaaaagtcaaagtcagaaaaagaaaagaaacctaaaaaagttcaagcgatcacatattttggtctcgtatggaagaaaaataagactgacaaggatgatggaagtgagttcagggcaaatgatgtaatccttaaaagcaaggatagtataggttcatcaataagaccaacatgctgtctctgtgacaaagcttattctccggatttcttgtatgtacgctgtgagaggtgccggaattggtttcatggtgatgccttgcaacttgaagaagaaaggattggtgagttggttgcataccggtgctgtaggtgccgaagaagagccataccacattgtcctcattctgatggttatacaaagcctgaaccagaattaagtgaacaaacagttgctgcatcatctcagtcaactatgctatctagtgaggacacttatgctttagcagatcaggacccactgcttgcttcttacgggatagttgaaccgattggtgatgatacaatggatgttggtttgtcaatgaacatgtcaagctttgcccctggaagtaaccagaaactgtctataagaagagcacaagcaaaaagtactgaatacattgaccaaggtggaagacctgtgagtgagtataatatccaaaatcaacctccagggattggaaacatcaatctcagccacacgaatgaaatttctttttcagaggtagacagtgttgatgcttcagagctattggggtgggatttaccccaaggagctgcatatgctacacctcttgatttcactgctaatcaccagtcgaatgacacttgctgtggcagctttggaatggacgagtatgagccccagacttatttctcgttcaccgagttacttgaagctgatgatacacagcttgacaatgcctttgggatgtctgctggtctgcaaggtgattgcaatggcacaggaagctttgttcaacaaggagatggtttgtctttcatggtagaagatggagcttcaaatatgaacttcccaacaaatgatcccacccccgatgaggtagcgtgcagcaagtgcatgcatactcagccaccacctgatctcaaatgtgctgtctgtgacctgcacatacacaggcagtgctcaccgtgggatcaaggtgaagaacctgttgacagcagcaattggagctgtggtggttgccgggagtggcgatgattgacttctgaacttcattgcatctgttaatagtgccagctgccggctgttatcacaaggtgggaggtacatcgcgaagtgcgacgtggatctgtaggaaaaatctccaccaagctgttacgcagtgctaattgttgttcggatgctggggttggttatttgaccaaagtttaaccatcatacagttacaatagcaatgactcctgcgatatttacactgtacatactaaagaatgggtcgacgaagaccttttgtcattctttaggctgcttgtgtgtgtgttggtggggggggggggggggggggcgtagagataagggaggatgttgttatcaccatgtgtgtggttctgaaaaccatattcatgaagctgtgttaccttgaattctcgtgctgtctttcagatagaagtgtcttggtcagaggccatttctacgcatatgcatctttgttcgatatattttctccagctttgaaatcattatctcaatatgtgagaaattct

SEQ ID NO: 13077 - DNA, 6301 bp, Zea Mays
ctcgccctgcgtgtcggcgccgcctccacacgcccgcgcttcaccagccccgacggaatctctcccggaggcgcgcgattcgccgcggggatggtacggtagggccgcagtcgctagggtttccgcgcccggtgccgccatggacgccgagccccgccgggagggttccgatcgggcgcccgccgccgactcctccgcggcgccggacggtgacgaggcgatggcccgtggcgtcgctgctgcggagaagcctacagcggccagtgaggcgggggctggtggagacgtcgcggcggcggagcgtgggcgtgacggggagacgccggctggagatccgggggtggtggctgacgaaggcggtgctgtgggcgaccagtgtcctgcggcgcctcaagcgagcgaggtggacgagggtggcgccgcgggcaaggagcggtctgatggtggtctggcgaatggggcagttgagggcagcagcattgcgggggaagtgccagatgtggctcctgtggtatctgaagcacggatggacgaggacgggggttgctccacaggcaatgagtactctgaaatgaagatggaggtggatggcggctgcgtagcagaacgagagggcgatggtcaggaacaggaacaagagtgcactgcagctgctgtggaaagcgaggttaagacgggggaaggtgacggcggagtggtgaatcaagggactacggcacatgctgggggtcttcaggttaaagaggaggtgggggaaggcttggtgggccgctacattggacgtagcgctccagggcgcacgaggattcttattgggaaggttgtgtcctatgatagcacagctggggtctacagcctggtgtttgaggacggacacgctgaggagctggggcttcctcagctccaggagcttctcatgtcggatgataatggtgcattaggcatgaaggtgagctgccggaagaggaagctagacttgctggtttcatcagggagcgccttggaggtcaaagagccaccaagtactaggcagagggttgatggatgcgagatgtctgccaggcctgatgagctgcagcatagtgcgtctggctcggatatgtctgaggatgttgagtcttcgagcaattcatcagatttcactagagaagaaacatctgagccatgccctcctgtacaggctgtggagttgcctccgtcgtcaggcgacattcctgtgccagaagagtccataagttctctcctctctgtttataacttcttgcggtcgttcagtgtgcagctgttcctgagtccatttggactggacgattttgttgcggccattaattgcagcgtgcagaataacttgttggatgctgtgcacgtctcgctactgcgggctctgaggcggcatcttgaatctagatctgcagaaggatctcgatcggcttcaaattgcctgaagtacctggattggacattactagacgcattgacttggccaaatttcttactagagtacctgtatgtgatgtgttgcattaaaaatctaggggggaagagctttggtagaagccttctagtcgccgaatactataaacttcctgttaccatgaagttgagggtgctgcaaatactctgtgatgatgtcattgaatcagaagaactcaaaactgaactggaaaatcgagtaggctacaatgaggagatggagtatgagatagaatctagtgcatttttggaggctggttcaagatcagtctcaactagagcagcaaaggcctcagcttgcaaaaacacgaatgatttccataatcttctcgaaagtgctccaaatgtaacaaatcccgaaactgctccagcagtcctgtctcaggatggcaatagtgatgattgccgaatatgtgggatggatggaactttggtatgctgtgatggctgcccgtgggcatatcattcaagatgtattggtcaaaacaaagctttccttcctcagggtgactggttctgtccagaatgtatggttaacaagcttggcccaacttcctcaagaattgagcgtggtgcaagaggagctcaaatgtttggcattgatatgtgtgggagactattcttaggaacttgcaactatttgctggtgatcgaaacagcttcagatgcagagtcttatgcaagatattacaatcagtatgatgttgccaaggtcctccaaagccttgctgtctcagatgcatatgtggacatatgcaagcaaataaaggactactggaaacatttacttggtataattcataacgagagatcaacaacaggtaaagaagttggtgcgaaagtagcacttcctcaaacaaacgcgcagcagaaatttgtggctaatcagagcgcaatgtgctcagtcgaatgcctggaggaacaaaaatgcaagtcaagcttaggtgttgtcactgagaaaaatgctgaagttttcaagcaaactgtgtcagctcagaacaacatacataatgcacacagaaatggagcttttggaccatctgtggtatcctcagtttctcatcagaatggatccattgtaacaggtgggtctaacatagcacaggcgcagccagctcagagtattttccatccagacccatccaccgtttctgtgacgtcaggatcattttgtccatcttctctaggtaaacaccaccttcagatgtttccggaaagatctggaaacatgagtggtgtcaaggcagcaaaattgtcttcttttaaaccacaagcttacatgaacctctacaatcatggcaatattgcagcatctgctgctgccaatatagctgttattacatccgatgacagtaaagtttcagcatcccaactgactgcgaaacaccggaagaaaatggctgcagacaatgctctacaattgaaagcattttcttcagcagccacacaatttctttggccgagtaccgaaaagaagcttatggaagtcccaagagatagatgtggttggtgccttgcttgtagaagttcagcaattggaactaaaaaggcttgttttcttaacatggccacttcaaatgctgttaaatgctctgctcgaattcttagtgtaatgcgtgtaataaaaaattctgatagccactttcctagtattgttgcttatttagccaacatggaggaaagtttgcgtggcctcttggttggttcactacaagatatgcagcagaaagaaaggtggcatcagcaactacaagaagcttcgaactgcagaactgtaatacccctcttgcttgagttggaaagcaatatccgtggagtagcattttctgcaagttggttgaagccaatagacgattggcctttggaatctcctggtccatcaacgggcgcatctcgtcctgcacaataccaaaaacgtggggttggtggaaggcgtggcagaagacgttcggttgcatctgaatctggtactgctactgctactgatgaggacaacagctggacttggtggactggaggaaatatttcaaaacgtactttgcagaggggggctcttctacattcaaccagaagaaaagctgctcgccaagtggatagcaggtttatcttaccatgaaggttccaaatttccaaggcgatctcggcagtttgtctggagaggatgtgttggaataagccagacttcatctcaacttgctttacaggttagatatcttgatgcccacatcagatggaaggatttcatccctccagatcatattccctcagatggaaaaagttatgatgctgatttttctgctctcagaaatgctgtagtctgtgataaaaaaataattgataataagataagatacgcacttaagtttcgcaaccaaaagcatcttcctgtgcgtgtgacaaaaaatatcttggaatcagaaggtgatcaggatgaaaatagcaaattgtggttttctgaaaaccatgtgccattgtacatgctgcgagaatttgagctgcacgctggggataactccttgcctactccaggaatttcagactctaactgttttaccaatttgtacccacgacgagtaaaagcatatgctggagatgtcttttcctatctttttcacaagggagaagtctatccctgcacctcatgcaagaaggatgtcatctacagggatattgttaaatgcaacacttgtcaaggtaattgtcataaagagtgtacatcaagttctgttgttagcaaaggaagcagtgctacttccagtttgatatgcaagttatgccttcagaagcggaatcttatgcttactagctacaatacaaatgcaagctatatccagcctcaacaaaagggtaatggccaacaaccagtgaccgctctcagagttaagtttaaggttagttcttcccattctgcacagccatctgcgaaggtggaagctcagtcgagtatgaatgtgaaagcccggccagttgtaaacgtgaaaacacaaccatttgcaaaggtggaagctcagccaattatgaatgagaaagtccagccaactgcgaagatggaggtgcagccactcgcgaagatggtaactcagaacatcactggtgtccaagctctgccaaagacaaaagctaaaaagtcaaagtcagaaaaagaaaagaaacctaaaaaagttcaagcgatcacatattttggtctcgtatggaagaaaaataagactgacaaggatgatggaagtgagttcagggcaaatgatgtaatccttaaaagcaaggatagtataggttcatcaataagaccaacatgctgtctctgtgacaaagcttattctccggatttcttgtatgtacgctgtgagaggtgccggaattggtttcatggtgatgccttgcaacttgaagaagaaaggattggtgagttggttgcataccggtgctgtaggtgccgaagaagagccataccacattgtcctcattctgatggttatacaaagcctgaaccagaattaagtgaacaaacagttgctgcatcatctcagtcaactatgctatctagtgaggacacttatgctttagcagatcaggacccactgcttgcttcttacgggatagttgaaccgattggtgatgatacaatggatgttggtttgtcaatgaacatgtcaagctttgcccctggaagtaaccagaaactgtctataagaagagcacaagcaaaaagtactgaatacattgaccaaggtggaagacctgtgagtgagtataatatccaaaatcaacctccagggattggaaacatcaatctcagccacacgaatgaaatttctttttcagaggtagacagtgttgatgcttcagagctattggggtgggatttaccccaaggagctgcatatgctacacctcttgatttcactgctaatcaccagtcgaatgacacttgctgtggcagctttggaatggacgagtatgagccccagacttatttctcgttcaccgagttacttgaagctgatgatacacagcttgacaatgcctttgggatgtctgctggtctgcaaggtgattgcaatggcacaggaagctttgttcaacaaggagatggtttgtctttcatggtagaagatggagcttcaaatatgaacttcccaacaaatgatcccacccccgatgaggtagcgtgcagcaagtgcatgcatactcagccaccacctgatctcaaatgtgctgtctgtgacctgcacatacacaggcagtgctcaccgtgggatcaaggtgaagaacctgttgacagcagcaattggagctgtggtggttgccgggagtggcgatgattgacttctgaacttcattgcatctgttaatagtgccagctgccggctgttatcacaaggtgggaggtacatcgcgaagtgcgacgtggatctgtaggaaaaatctccaccaagctgttacgcagtgctaattgttgttcggatgctggggttggttatttgaccaaagtttaaccatcatacagttacaatagcaatgactcctgcgatatttacactgtacatactaaagaatgggtcgacgaagaccttttgtcattctttaggctgcttgtgtgtgtgttggtggggggggggggggggggggcgtagagataagggaggatgttgttatcaccatgtgtgtggttctgaaaaccatattcatgaagctgtgttaccttgaattctcgtgctgtctttcagatagaagtgtcttggtcagaggccatttctacgcatatgcatctttgttcgatatattttctccagctttgaaatcattatctcaatatgtgagaaattct

SEQ ID NO: 13078 - DNA, 3057 bp, Zea Mays
caccagtccaccgcgccacaggctccaccctcccctctcggcccggctcgatggggtccggcgtgtcgtcgagcatggcgctggcgctggcgggcttctgcttcagcgtcctcttcatcgtcttcgtctgcacgcgcctcgcctgcgcgctcgtccgccggcgccggcgccaggcccgcgcccgcctcgcggccgccccgccgctcccgcactacgcccacggctacgccgaccccgaccctttcccgtcgttccgcgccgcccgccaccaccaccacgccccgggcctcgatcccgccgccttccccacccgcgcctacgccgccgcacaagcctccgactccgacgacggctcccagtgcgtcatctgtctggcggaatacgaagagggagacgagctccgcgtgctgcctccctgcagccacaccttccacacgggctgtatcagcctgtggctggcgcagaactcgacgtgcccggtctgtagagtctcgctgctcgtgcctgatactagtactacccctgaaagcgaacactctgcaccccatcctcctcctcctcctcatcatcatcatcatctgtccagcatagtgataataagcccaccaagctcccccgaaccgtcgagatcggacccgtgccgatgcctgttcgccagcggtggtgggcactcgtcaagggcggcagaggctcctcctcctcctcctcctcccagacacgagcccgaccaggtcgtatctggtccaccaccggcagcagatggggctagcggctacagctcgccgttgcctgaagttattcaccccgctcctgctcctgaaaccaacgggcagacagtacggaagcaggcgggcagcagatctactaccccgctaggcccctgcaaatagcggccgctcactctgtgtgggtgggtggggtgaacaggtggtgcgtggtaaaagcgaagtagagagaaacaagcgacttgaagaggcctgggttcgttcgtgtacatacgatcgagaaatcgtttcaggtcattcattcatccattcattcatccatgggcacatactgtggtattacggagtattacggtgtacgtgtagtgtgccgcaggagagacgacgcgacggcagcagtgcgttttccatatgcgacgggacgggagcattcgaggagatgatggcaatggcatggttttgtgtactgtacggtaacatttgtcgctgggaattaataataaaaaacccgtggctggctgatgcagcagcagctgtcttattatccagccacgcatgtgaaaatttcttctcgggcagcagcagcgtgatcagtcgccaccttgtcagcttgtatccctctgctgtaggctgtagtaccatgtggtctgaatccaatgcgacgacgacgacgacgccgcccagtcggtctctgatgaacctgagattacctacctgatcttgctactgccagggcgcgcgatcaacattccatttgacactggtaactgttggcggtggtgcacagtgctgactgacggacctgcctgtcatccagggtcagggtacatggagatgaggatcttggatggatgggggagaggggcctgcatctgcatcagagccagagggaggcgggcgaggaggggggaacaagcaaagcatgcggtgctgggctgccctgcccacgcagcgtcgtacgctcgtgtcggtcgccggcccagtcgaatggaatgaatgatgactctctcacccgtcccagatctagccgcgtcagcgcgcacggaaccgctccctttttttttcccccacacctccctcccttgctctcccgtgcgtgcactgacacacacaagttggttggtgagcggaattaagccagctcgtgacgcaatccaatccgaacacgctcttttgcctgggaaggataagcgcgtcgtgtttagtttacagtggtctcgtttggaagttcttcactctctatagactcgatagctgattctctactaatgtaatttcaagtgattctctagtaaagtgattctctagtaaaagtaaatttaattgataaaaaccgtttgataaataagatgtgaagtgcttgaacagttagtggggagtaggttgagacttgagagcggtggaaagctgatttttttggctctcactttctagtataaaatagaaactagattaactctactttcatcatagagtaatttagatttttaccggtttgactctggaggagtaattctgggagcggagctgtgagctctgcaaaacggctcctgtgtgcccaaatgatccagtccacagactcaggctcaggctctaggacgagtgatgagctctgcagccagtgacccctgtcggcggcggtagcttaaattggccaccatgtcgccacgatccatcggactcctctgtgcctggccaagttcaaggacggcgtcgtggtggacgacgtgctcaagggcatgaccgacctcgccgccgggatggacacggtcaagtctttcgagtggggccaggacgtgctgaaccaggagatgctgacgcagggcttcacgcacgtcttctcgctcaccttcgcctccgccgccgacctcgccgcctacatggcccacgacagccacaccgccttcgccgccaccttcatggccgccatcgacaaggtgctcgtcgtcgacttccccgtcgtcgtcgccaagcctccgccgccggcatgacccgctggccgctctcgcatccgccggccactgtacgcctccccttctcaggtcgcgcagcagatccacgtgtgcctgcggcggcggtgctggtagtagtactagtactgtctattgcctgttatttatgttctatctatctatctatctatctatctacgtcacgtacgtacctactattattgtttggttatcttcggaataaattttcggtcacttttatggtagcgtatatctagcggctagctgcttgcaatacaccctttccgatgtttatgatggattgtcagattcctaatcgacttttagttttcttgttactggctcctggttaaacaaca

SEQ ID NO: 13079 - DNA, 2764 bp, Zea Mays
aacaactggagcctgctaccgcttgccggcgcgggtggtgggctagctctcgccatcgccactaggtgcgtcatctgtctggcggaatacgaagagggagacgagctccgcgtgctgcctccctgcagccacaccttccacacgggctgtatcagcctgtggctggcgcagaactcgacgtgcccggtctgtagagtctcgctgctcgtgcctgatactagtactacccctgaaagcgaacactctgcaccccatcctcctcctcctcctcatcatcatcatcatctgtccagcatagtgataataagcccaccaagctcccccgaaccgtcgagatcggacccgtgccgatgcctgttcgccagcggtggtgggcactcgtcaagggcggcagaggctcctcctcctcctcctcctcccagacacgagcccgaccaggtcgtatctggtccaccaccggcagcagatggggctagcggctacagctcgccgttgcctgaagttattcaccccgctcctgctcctgaaaccaacgggcagacagtacggaagcaggcgggcagcagatctactaccccgctaggcccctgcaaatagcggccgctcactctgtgtgggtgggtggggtgaacaggtggtgcgtggtaaaagcgaagtagagagaaacaagcgacttgaagaggcctgggttcgttcgtgtacatacgatcgagaaatcgtttcaggtcattcattcatccattcattcatccatgggcacatactgtggtattacggagtattacggtgtacgtgtagtgtgccgcaggagagacgacgcgacggcagcagtgcgttttccatatgcgacgggacgggagcattcgaggagatgatggcaatggcatggttttgtgtactgtacggtaacatttgtcgctgggaattaataataaaaaacccgtggctggctgatgcagcagcagctgtcttattatccagccacgcatgtgaaaatttcttctcgggcagcagcagcgtgatcagtcgccaccttgtcagcttgtatccctctgctgtaggctgtagtaccatgtggtctgaatccaatgcgacgacgacgacgacgccgcccagtcggtctctgatgaacctgagattacctacctgatcttgctactgccagggcgcgcgatcaacattccatttgacactggtaactgttggcggtggtgcacagtgctgactgacggacctgcctgtcatccagggtcagggtacatggagatgaggatcttggatggatgggggagaggggcctgcatctgcatcagagccagagggaggcgggcgaggaggggggaacaagcaaagcatgcggtgctgggctgccctgcccacgcagcgtcgtacgctcgtgtcggtcgccggcccagtcgaatggaatgaatgatgactctctcacccgtcccagatctagccgcgtcagcgcgcacggaaccgctccctttttttttcccccacacctccctcccttgctctcccgtgcgtgcactgacacacacaagttggttggtgagcggaattaagccagctcgtgacgcaatccaatccgaacacgctcttttgcctgggaaggataagcgcgtcgtgtttagtttacagtggtctcgtttggaagttcttcactctctatagactcgatagctgattctctactaatgtaatttcaagtgattctctagtaaagtgattctctagtaaaagtaaatttaattgataaaaaccgtttgataaataagatgtgaagtgcttgaacagttagtggggagtaggttgagacttgagagcggtggaaagctgatttttttggctctcactttctagtataaaatagaaactagattaactctactttcatcatagagtaatttagatttttaccggtttgactctggaggagtaattctgggagcggagctgtgagctctgcaaaacggctcctgtgtgcccaaatgatccagtccacagactcaggctcaggctctaggacgagtgatgagctctgcagccagtgacccctgtcggcggcggtagcttaaattggccaccatgtcgccacgatccatcggactcctctgtgcctggccaagttcaaggacggcgtcgtggtggacgacgtgctcaagggcatgaccgacctcgccgccgggatggacacggtcaagtctttcgagtggggccaggacgtgctgaaccaggagatgctgacgcagggcttcacgcacgtcttctcgctcaccttcgcctccgccgccgacctcgccgcctacatggcccacgacagccacaccgccttcgccgccaccttcatggccgccatcgacaaggtgctcgtcgtcgacttccccgtcgtcgtcgccaagcctccgccgccggcatgacccgctggccgctctcgcatccgccggccactgtacgcctccccttctcaggtcgcgcagcagatccacgtgtgcctgcggcggcggtgctggtagtagtactagtactgtctattgcctgttatttatgttctatctatctatctatctatctatctacgtcacgtacgtacctactattattgtttggttatcttcggaataaattttcggtcacttttatggtagcgtatatctagcggctagctgcttgcaatacaccctttccgatgtttatgatggattgtcagattcctaatcgacttttagttttcttgttactggctcctggttaaacaaca

SEQ ID NO: 13080 - DNA, 2943 bp, Zea Mays
gtcctcttgatcgagctcgaaacgttcagacgaaacatgagcctgaaaagatcctgtcatggcgagtagatgtttgatgtttcatccccatagctcgcacgaatttgacttgtcttatttgtacctttggctccttacctttagctacactgaaaattcacatggacaacagaccatgggatggtgaactgtttcgctggccctggaacttaactgaaccacctctctgttggtaaactggcaggtgcgtcatctgtctggcggaatacgaagagggagacgagctccgcgtgctgcctccctgcagccacaccttccacacgggctgtatcagcctgtggctggcgcagaactcgacgtgcccggtctgtagagtctcgctgctcgtgcctgatactagtactacccctgaaagcgaacactctgcaccccatcctcctcctcctcctcatcatcatcatcatctgtccagcatagtgataataagcccaccaagctcccccgaaccgtcgagatcggacccgtgccgatgcctgttcgccagcggtggtgggcactcgtcaagggcggcagaggctcctcctcctcctcctcctcccagacacgagcccgaccaggtcgtatctggtccaccaccggcagcagatggggctagcggctacagctcgccgttgcctgaagttattcaccccgctcctgctcctgaaaccaacgggcagacagtacggaagcaggcgggcagcagatctactaccccgctaggcccctgcaaatagcggccgctcactctgtgtgggtgggtggggtgaacaggtggtgcgtggtaaaagcgaagtagagagaaacaagcgacttgaagaggcctgggttcgttcgtgtacatacgatcgagaaatcgtttcaggtcattcattcatccattcattcatccatgggcacatactgtggtattacggagtattacggtgtacgtgtagtgtgccgcaggagagacgacgcgacggcagcagtgcgttttccatatgcgacgggacgggagcattcgaggagatgatggcaatggcatggttttgtgtactgtacggtaacatttgtcgctgggaattaataataaaaaacccgtggctggctgatgcagcagcagctgtcttattatccagccacgcatgtgaaaatttcttctcgggcagcagcagcgtgatcagtcgccaccttgtcagcttgtatccctctgctgtaggctgtagtaccatgtggtctgaatccaatgcgacgacgacgacgacgccgcccagtcggtctctgatgaacctgagattacctacctgatcttgctactgccagggcgcgcgatcaacattccatttgacactggtaactgttggcggtggtgcacagtgctgactgacggacctgcctgtcatccagggtcagggtacatggagatgaggatcttggatggatgggggagaggggcctgcatctgcatcagagccagagggaggcgggcgaggaggggggaacaagcaaagcatgcggtgctgggctgccctgcccacgcagcgtcgtacgctcgtgtcggtcgccggcccagtcgaatggaatgaatgatgactctctcacccgtcccagatctagccgcgtcagcgcgcacggaaccgctccctttttttttcccccacacctccctcccttgctctcccgtgcgtgcactgacacacacaagttggttggtgagcggaattaagccagctcgtgacgcaatccaatccgaacacgctcttttgcctgggaaggataagcgcgtcgtgtttagtttacagtggtctcgtttggaagttcttcactctctatagactcgatagctgattctctactaatgtaatttcaagtgattctctagtaaagtgattctctagtaaaagtaaatttaattgataaaaaccgtttgataaataagatgtgaagtgcttgaacagttagtggggagtaggttgagacttgagagcggtggaaagctgatttttttggctctcactttctagtataaaatagaaactagattaactctactttcatcatagagtaatttagatttttaccggtttgactctggaggagtaattctgggagcggagctgtgagctctgcaaaacggctcctgtgtgcccaaatgatccagtccacagactcaggctcaggctctaggacgagtgatgagctctgcagccagtgacccctgtcggcggcggtagcttaaattggccaccatgtcgccacgatccatcggactcctctgtgcctggccaagttcaaggacggcgtcgtggtggacgacgtgctcaagggcatgaccgacctcgccgccgggatggacacggtcaagtctttcgagtggggccaggacgtgctgaaccaggagatgctgacgcagggcttcacgcacgtcttctcgctcaccttcgcctccgccgccgacctcgccgcctacatggcccacgacagccacaccgccttcgccgccaccttcatggccgccatcgacaaggtgctcgtcgtcgacttccccgtcgtcgtcgccaagcctccgccgccggcatgacccgctggccgctctcgcatccgccggccactgtacgcctccccttctcaggtcgcgcagcagatccacgtgtgcctgcggcggcggtgctggtagtagtactagtactgtctattgcctgttatttatgttctatctatctatctatctatctatctacgtcacgtacgtacctactattattgtttggttatcttcggaataaattttcggtcacttttatggtagcgtatatctagcggctagctgcttgcaatacaccctttccgatgtttatgatggattgtcagattcctaatcgacttttagttttcttgttactggctcctggttaaacaaca

SEQ ID NO: 13081 - DNA, 456 bp, Zea Mays
atgttcgtggaagtcagcacgatcttctcaagttcagaaactgctccatactcaaatgtgatctccgtcaagttggagccctcaacagagaggtgctttagagttgtgaatttctccacactgaaggtgaggatgcttggggtgcattcaacgtgttggagtttgatgcacagtagcctgggcagatcggcgaggagcttcagatcgtcctggttcaggcaggtgttacttagggtcaccttggcaagtttagctccaccccggtgttgactgaacaatggaagaagacggcccatctgcgtcgttccactgatggatagactctcaagaagcttaggagggtacttcagtagggactgaataccatccggtagttctttggcaggagtgccctcacatacagttgtgggaagagtgatcgatagagattggagggactcctgcaggtcactgatt

SEQ ID NO: 13082 - DNA, 1565 bp, Zea Mays
  misc_feature (1564)..(1565): n is a, c, g, or t
gacgcccaaaacattagcatatccgaacgccagattcgtacgtacctgacacgacgagcggaaacacacagccgtctagattcaggcagcagaaggatcgagagcaggttgctgctgtgccaatcaatggccacggcggcgctggcgctggcgctcctcgtcctcgcgctgccggcgtccctcgccgtgacgtctacgtacgtgcggccgccgccgagggccacgctgtcgtcgctgctcgaggacgacgccggcgccgacgggcagacgccgcagcaggtgcacatatcactggtagggccagacaaggtacgggtgtcatggatcaccgcggccgacgcgccggcgactgtcgactacggcacggacccaggccagtacccattctccgcgaccgggaacacgacagcctactcctacgtgctctaccagtctggcagcatccacgacgccgtcatcgggccgctgcagcccagcacaaactactactaccgctgcagcggcagctcctcgcgggagctctccttccggacgccgccggccgcgctgcccttccgcttcgttgtcgtcggggacctaggccagacggggtggacggagtccacgctcaagcacgtcgccgcggccgactacgacgcgctgctcctcccgggcgacctgtcgtacgccgacctcgtgcagccccggtgggactcgtacggccgcctcgtcgagccgctggcgagcgcgcggccctggatggtgacgcagggcaaccacgaggtcgagcgcctgccgttgctggagccgcgacccttcaaggcgtacaacgcgcggtggcgcatgccctacgactatgccgccgccgacagcgtcgccgccgcgccgccgtcggacgacaacctcttctactccttcgacgtggccggcggcgccgtgcacgtcctcatgctgggctcctacgccgactacgccgcagggagcgcgcagctccgctggctccgcgccgacctcgcggcgctccgccgccgcggcaccccgccggccttcgtgctggcgctcgtgcacgtgccgtggtacagcagcaacgaggcgcaccagggggaaggcgacgccatgcgggacgccatggaggcgcttctgtaccacggcgcgcgtgtcgacgcggtgttcgcgggccacgtccacgcgtacgagcggttccaccgcgtctacgccggcaaggaggacccctgcggccccgtctacgtcaccataggcgacggcggcaaccgggaggggctggccaacaagttcatcgacccccagccgtcgatctcggcgttccgtgaggccagcttcggccacggccgactcgaggtggtcaacgccacgcacgcgctctggacgtggcaccgcaacgacgacaaccaaccagtggttgctgaccaagtgtggatcaacagcctcgcggccaacccaacttgcaaccgaagcatcaagatgatgtagtaatgtgtctgtttactagtttggggttaatttattattgaaagcatatcatatgagactctattgtatatgatttacacagtagcggatccann

SEQ ID NO: 13083 - DNA, 948 bp, Zea Mays
gccagattcgtacgtacctgacacgacgagcggaaacacacgtaagaacaatgcgtacgttcatcattcagcgtacctcgtcggctgatgtgtatccatcgagctggccgctgggtgtggccggctggccgccgcctcgcctcgtgctgtgctgtgcttataaatgcctgcccgtgaggccgtgaccatccccgtccagggccagccattccaatttcccacatcctctttccatttccgcttgcagcagaaggatcgagagcaggttgctgctgtgccaatcaatggccacggcggcgctggcgctggcgctcctcgtcctcgcgctgccggcgtccctcgccgtgacgtctacgtacgtgcggccgccgccgagggccacgctgtcgtcgctgctcgaggacgacgccggcgccgacgggcagacgccgcagcagaaggacggagctgtgcctgtgctcggccggttctcaggtcaacctatcaaatccgcaggcaaataatacaaatcctggagatatatatctcggcaacatcatcagccatgcatggtcccatcatgcatctcgtggagtcaatagtcgaaagacctggattcacggagctaggaaatgaggctgtgttgaattgaatgtggtcgcaaaatactgttttttctctatagatagcattgactacagagtgaaattttagcaccgtttgtggagagtgaaaattttaaataagatatgagataaagaatcaaataggagagctagctgttgaaggtaacttttttgtttttaattaccactgtatattgtgttataataaatcatgggcactctttctaatgtactagtcactggcgcgcgccctgcgcgcgttagattttttttctaatttaattactgcagatgttatatgtttatatgaaatagagttatgtgagttgtgatcagagtcaat

SEQ ID NO: 13084 - DNA, 1238 bp, Zea Mays
gccagattcgtacgtacctgacacgacgagcggaaacacacgtaagaacaatgcgtacgttcatcattcagcgtacctcgtcggctgatgtgtatccatcgagctggccgctgggtgtggccggctggccgccgcctcgcctcgtgctgtgctgtgcttataaatgcctgcccgtgaggccgtgaccatccccgtccagggccagccattccaatttcccacatcctctttccatttccgcttgcagcagaaggatcgagagcaggttgctgctgtgccaatcaatggccacggcggcgctggcgctggcgctcctcgtcctcgcgctgccggcgtccctcgccgtgacgtctacgtacgtgcggccgccgccgagggccacgctgtcgtcgctgctcgaggacgacgccggcgccgacgggcagacgccgcagcagccgggacctttttctcttttttctgacggcaacctgacggatgtgaacgacctgaaagtatcaagttgaatgtgttgaccctagctgctacggaaaggttgccttcccagctattgaaggaatatcgaatggcggtaagaatttaagccgacgtggacacacgtatttcctcctttgctccccgctctttatctatagaatagtgtgtcatccagataaacgcactatgaactaggagaactccaatctcacccatgtgatgtgcgagagagtggaatgtgtttctcaagctttaataggtgtatacaagtgttggtggttgaggaataccaccaaagtctagacataccgtctatttataacccacgaaagaacttaatcgtgacagtggagaattattggatagagtagagaatttcgcagaccattatataagtcctttcagggtagagaaatagaggagtagcatgaatatggatagcctagctcccaaacaatacctcagatgacgatggacgtgatgatcatctcgtatagacatgaaaacacgcacgacgttgtgttgtgtgcatgaaatcatgacgcggcggagcggggattgacgaaggtggtggatgcatggttgctcgtgctttgcagtagtagcagtagtaaattgaaggcagctgttgactgttgagacggccgggcatgcaatgcatgaatgttggtcatgatttagttcatgtctcgggactgtaagcgacgagcgaagagatctgttgatgaagacaagcagggaacatctgagttgacagcaag

SEQ ID NO: 13085 - DNA, 1383 bp, Zea Mays
  misc_feature (1382)..(1383): n is a, c, g, or t
gtttttgttggccttccatctcggacgcgcacacgagattgtctgtctgttgcgggggcagcaaacatgcatcctggtcgtcactgccagatccatggtgcacatatcactggtagggccagacaaggtacgggtgtcatggatcaccgcggccgacgcgccggcgactgtcgactacggcacggacccaggccagtacccattctccgcgaccgggaacacgacagcctactcctacgtgctctaccagtctggcagcatccacgacgccgtcatcgggccgctgcagcccagcacaaactactactaccgctgcagcggcagctcctcgcgggagctctccttccggacgccgccggccgcgctgcccttccgcttcgttgtcgtcggggacctaggccagacggggtggacggagtccacgctcaagcacgtcgccgcggccgactacgacgcgctgctcctcccgggcgacctgtcgtacgccgacctcgtgcagccccggtgggactcgtacggccgcctcgtcgagccgctggcgagcgcgcggccctggatggtgacgcagggcaaccacgaggtcgagcgcctgccgttgctggagccgcgacccttcaaggcgtacaacgcgcggtggcgcatgccctacgactatgccgccgccgacagcgtcgccgccgcgccgccgtcggacgacaacctcttctactccttcgacgtggccggcggcgccgtgcacgtcctcatgctgggctcctacgccgactacgccgcagggagcgcgcagctccgctggctccgcgccgacctcgcggcgctccgccgccgcggcaccccgccggccttcgtgctggcgctcgtgcacgtgccgtggtacagcagcaacgaggcgcaccagggggaaggcgacgccatgcgggacgccatggaggcgcttctgtaccacggcgcgcgtgtcgacgcggtgttcgcgggccacgtccacgcgtacgagcggttccaccgcgtctacgccggcaaggaggacccctgcggccccgtctacgtcaccataggcgacggcggcaaccgggaggggctggccaacaagttcatcgacccccagccgtcgatctcggcgttccgtgaggccagcttcggccacggccgactcgaggtggtcaacgccacgcacgcgctctggacgtggcaccgcaacgacgacaaccaaccagtggttgctgaccaagtgtggatcaacagcctcgcggccaacccaacttgcaaccgaagcatcaagatgatgtagtaatgtgtctgtttactagtttggggttaatttattattgaaagcatatcatatgagactctattgtatatgatttacacagtagcggatccann

SEQ ID NO: 13086 - DNA, 1314 bp, Zea Mays
ctgggctacggcccgtccgctgcatggtctcccttccgagttccgtccacggttcaccccgcaacccgcgtggccgcgttcgatctgtctctgacgagcgacgactccgccgtccccgtgctaggtgccgaggcattcttcggtctctctgtcggcgacgagcacccaccagcagctgtggccactcaatgtcaatgggtgcgtgttcgaggaaatgtcaatggttactgaggagcagtccaatcatactgccaaatgaggctctggttggtttgctttcgttatcatatatgaaaatataaaacattttacctgttgaacatactttcatcaggagagacatgaataccgattgtttgaaagtttgcaccatacatttgtgaattcgtaagataagttagaagtctaaaatgtgaacagttattttatgctgggtgttaatcttcaaattgggcggacatttttttcgcatatttttgtatgtctatatcaattatgtgataatttcttaatagttctaaaattcttatatcaggttctaaagtatttactacctgaacttattctacatcctgttgtgaggccttgtttgaatactttagtattcattttaatccacatgtattgagatggattgatgtgtaaatgaaagtacccaaacaaagcctgagggatgtcccccaaccctgatttctggctttcagtgatagaggtcttacacatgaaattgtaccacaagcatggatcattcatagttctcattcttcctacttacaaaacattctagtactaacacaatccgcaaaatacatctggtttatttataaggtagtgctcaggagaatttaatgtagaataagttcatcgacttcctagaaagaagatcagaaggcccttattatcgtcaggtaggcaataagagctgggattttcagcgtctcctagcagcagtttctctctgtgcattgaagtagacggcagctacagggaggccaaggtcattttcctcagcgaactgccgggtgttgaaatgatctctgaaggatggcacagttacattttgcctaccctgctgcttgaagagcacaaaaatgaacctgtggataccaatgctaggtcttgggctctcgtagcttatgatctgtcgccctgaaatttggaagatgaatggttattaattcaaagaagaactagaacatggaataggctaagcctgaatcagcagaacctaccgaaggaggcatctgttgtcccaggtatatcagtcacgatcctgcaaatgtaaaggctgccttttagccacattactctgaa

SEQ ID NO: 13087 - DNA, 709 bp, Zea Mays
agatgtcgactgtcgactcgggtatgaggttcttgggagcatggtcgaggcgttcaaaaaatctttatggttttccccaagtgggggagccaagctagctagggtagtggaacctggtagttgctccaaccaatggcgagctcctataattgcaccattgatgggcagatggcgatgtttctcggttgctgtcataagctgctgcccgacacctcggctaaaaggagccgtccaaccgagccttttgtccccgaacacgcaggtgagatgagtggtaagtaaccaacctgagtgacagggaggatcatggcatcaagaatttagaggggaggaaggccacgatgcaggctgcagcggatctctccatggatcaaggtgtccgcgcatgattgagcacgaggcagagtccaagcacactacgtacgataacacttgtcgaaagctgctattatgggcgtttctgtgtgggatttgggcagtcaacgccacgagatttcctacgaaaactgactggctcaggggtttcatgcatacgctgcttcttttattattattattagtattattgttgttgttgttgttgttgttattattattgatattattgttgttgccgaccaagcagtagtaccaacttggaaggatgcttgttggattctccccagtacccacttgcacttgccatggagccggggaccgtggtgcaccg

SEQ ID NO: 13088 - DNA, 3604 bp, Zea Mays
agccttcacccctgctcgctgtgtcttctccacttcgccctgcgtacgctctcccgtctcactctctctccccctccacctcgttcgtggcgacgacagggcgaccgccgctgccaccgccgcctctccactgtgtgcccagtgctttgtccggccgttcgccggcgacgggcactcaccaccaggtgacaaaggaaaaggaagaggggcagcaaatcggtgcgctgctgttcatcaaatgctggggaggaaaccaacagatcaggggcctggtgaaatgctgcgcagcgagggtgactgactggccactccgcccgccgacccccgtttcgtgcttactggcatgctcgcagcataaaggaatcttctcggaattagccccccttcctgtggtcgtgacggccccaagtttcaagacatggaccatgtgccggctctagttcttgccgggtgctgcttcctggccctgctgcctggctgggcctgtggccttggctccatgtcgtccattgcggtgtcctatggggaggatggtccggtgttctgtggcctcaactccgacggctcccacctcgtcgcctgcttcggtgctgatgcatctgtcctgtacggcgcaccacccaacatccctttccttggcctcacggcaggggatgggttcgtgtgtggcctcctgctcgacaccaggcagccatactgctggggtagcaactcctatgtcaagagcggggtgccacagccgatggttgagggcgcaaggtactctgagctcagtgcgggggacaaccacctctgcgcactgagagctgctcaagatgggggtcgtggttccagtgctgctacatcgctgattgactgctggggatacaatatgaccgccacacatgctgttgatgaagccgtgtcgactgtttcagctggttcggtgttcaattgtggcttgtttgctcggaacaggacggtgttctgctggggcaggagcttggagatgcagcaggtggtgccatccagtgctatcggtgatggtgatgtgaacatagtgccgatggatgcaatgagcactgtggttggcgggcggttccatgcttgtggcatcaggagccttgaccaccaagtggcttgctggggcttcactcttcataacagtacatcgccaccaaaagggctgaagatgtatgctcttgtggctggggattacttcacttgtggagtgcctgctgagacttcgctgatgccgaggtgctggggcaacagtgggccattggcattacccatggccgtacctcctgggatttgtgtacctactgcatgcagccatgggtactatgaatatgtgaaccatggtgaagttggcagcatcaaggtgtgtaagcctgcaaactctagactctgcttgccctgtagtacaggttgcccggaaggcttgtatgagtcatctccttgcaatgcaacagctgaccgtgtttgccagtttgattgcttgaagtgtgtcacagatgagtgcctgtcattctgcttatcacagaagcggaccaagagccgcaagttgatggcttttcagatgcgcatctttgttgcagagattgtctttgctgtcgtcttggtactcagcgtgtcagtaaccacttgcctgtatgtccggcacaagcttcgacattgccaatgctcaaatagagagctgagactggctaagagcacagcatactctttccggaaggataacatgaagatccagcctgatatggaggacttgaagatcaggagagctcaggaattctcctatgaagagttagagcaagcaaccggtggcttctcagaggattcacaagtcggcaaaggcagcttctcatgtgtattcaagggcatactgagagatgggacagtggttgctgtgaagcgtgcaataaaagcatcagatgtgaagaagagctcaaaggagtttcacaacgaacttgacctcctatccaggctcaaccatgcacatttgctgaatttgcttggttactgcgaggatggcagtgagaggctcttggtttatgagttcatggctcatggatccctgtaccagcatctgcatggcaaggatccaaacttgaaaaagcgactaaactgggcaaggcgggtcaccattgctgtacaggctgctaggggaattgagtacttgcatggctatgcttgccctcctgtaattcaccgggacatcaagtcgtcaaacatattgattgatgaggatcacaatgcccgtgttgctgactttggtctgtctatattgggtcctgcagatagcggtaccccactgtctgagctgccagcagggactcttggctaccttgaccctgagtactaccgtctccactacttgactacaaaatctgatgtctacagcttcggggttgttctcctggagatactaagtggcaggaaagcgatcgacatgcagttcgaggaggggaacattgttgaatgggcagtacctctgatcaaagcaggggacatttttgccatccttgatccagtcttatctcctccctcagaccttgaggccctcaagaagattgcttctgtggcatgtaagtgtgtcagaatgcgaggtaaagatcggccttccatggataaggtgacgacagctctagagcacgcccttgcactgctgatgggcagcccctgcatcgagcagcccattctaccgaccgaggttgttcttggaagcagccgcatgcacaaggtgtcacagatgtcctctaaccactcctgctcagagaacgagcttgctgacggggaggaccaggggatcgggtacagggcaccttcctggataacttttcctagcgtgacctcatcacagaggaggaaatcatctgcatccgaagctgacatcgttggtcgaagggccacagacggcaggaacgtcgggagcagcataggtgacggactgcggtcactggaggaagaaatcgctccagcttcaccacaagagaacctgtacttgcagcacaacttctgaagaaattcaggagatgcaggaacctgagcagcgactttctgccattgttgagcagtattttaagttcggcctttcatgccctgttgaagtgttcatacgttctatataatagcagcctaaaaacagggagctaattagtactggaagaattctttttagcgtccagaagcattcatctgtagattcgtatggtcccttttattttcctggtacaatttatcttctggtggctgcagttgatggattatcgtgtatccttagcttgcaaaactgggtagtttccttaatccttcagatcatctctctggctcccgatgctgtttctgcatcctaaatggcagtagctttgggaaccaactgcatgtctgggtcgggtcaccatgttcagcattctttcgcttgtatccttgtggaaggtttcttcagttgcttgatttgtgattcgcagcaacaggctgtctgcccattcttctcttcagagacaggtgagatgtggttctcagaggtctacctcagcaatggctgctgtcatgttccatgatcctgtttagggtgctgttttgaacacaatgaaaggcaggttgttgctaaccatttaat

SEQ ID NO: 13089 - DNA, 314 bp, Zea Mays
attctttaataacacatcaaggaacaacaaaaaaacatttacaaacaattacttacattaaaaccatcgtatgtgtaaaaaacatacgttgtatctagatgcctcaattaaaacacatagattggtttaccacagtcataattaggtacctataactcaggagagacggtgcgtcctgccgtccttacaagacacgttcgagtatatatctccataaaaaaccattttatcacttctcacgccacatgtcttatatctatcaaaacaaagaatcataaggaaataagtctctttgcctaatactacaacctaaa

SEQ ID NO: 13090 - DNA, 1146 bp, Zea Mays
cctcaattctccacaccacacgacgaccaccacccagctcagctctcgcagcactaaaccccatccactcgctcctttatcatcgtctccctcccctccattctcagtctcaggctctcagctcagctgcgtcctcctgccacccatggcaaacgcttctctgcaatccttccttctcccgcacgaccattctttcgccggcgccggcggcagccgtgacggctccgcgtccgccgtgcacaagctctccaccaacaccagcggcagcatttccttcaggctctacaccaaaacctccccctcggtgacagcagcctcagccaccaattcgtcagctccgactccagttgccccggcatctgcaccagcggcaggggacgaagaagaagaagaaggcccctctctcgacctcctccgccgccagctcgccgcgggcgactaccggcaggcggacgagaccacgcgggcgctgatcatcgacctcgccggcgagcccgcgaggcgccgagggtacgtcttcttctccgaggtccagttcatcccggccgaggacctcgccgccatcgacgggctctggaaggagcacagcggcggcaggttcgggtacagcgtgcagcggcggctctgggagaagtcgcggcgcgacttcacccgcttcttcatccgggtcggctggatgaggaagctggacacggaggtggagcagtacaactacagggccttccccgacgagttcttgtgggagttgacggacgacacgcccgagggacacctgccgctcaccaacgccctcaggggcacgcagctcctggcgaacatcctcacccacccggccttccaggaggaggaccagggagacggagctgctgctgcagaagagagtgcaaacaccaaagatgataacaaagggagggagagacccaggtccatgagagatttcaagcctgattattctttttgattcaggctggcgaaggaaaccaaaaaaaaaggggcatgggagtttgtggtgcagagatgctggcatggtgtaattgatttaaaagatcatgtatccgtagttctgtttgggttacttttgtcttaaaacatgcatggaagcttgtgcaatatattacgaatatatataattggttcaggtgtctc

SEQ ID NO: 13091 - DNA, 1154 bp, Zea Mays
tcatatgcaggtccctgacattgaggattttatatacgaaaaggccaaaacattgacatcgtcaagtaaggcaacaacatctttggtcaaggtggagaaaaaggttggagtttcttcagttataaaagaaacccaaagtagtcatttgcgcagttggagctccagataactgggaggcagttcttggaggcattaaaagcatgaggttatctggtgaagcccccgtagatacgaagggctgtgaaaaagctggttctctccttccacccaaggaaagaagatttgcagttctgatatcaactatgatgtcaagccagacaaaagatgaagttacacatgctgctgtggaacgcctctctgaaaacggtttacttgatccggatgctatagtgaggactgatgagaccacgcttgcgaatcttatcaaacctgtcggattctatcagcgaaaggcgcagttcataaaagaagcttctaaaatttgtcttgagcgctttggaggggatattccggattctctgaatgaactgcttgctctgaggggagttggccctaaaatggctcatttggtgatgagcattgcttggaagaatactcaaggaatctgtgttgacactcatgtgcatcgcatttctaaccgacttgggtgggtttttcgggaagggacaagacagaaaactacgacaccagaacagacaagaatttctctagagaaatggctacccaaggatgagtgggaacctataaatccattactggttggatttgggcaaactatctgtactccactgaggcccaaatgcgataagtgtggcatcaacaacatttgcccttctgcttttaaggaatcatcaagcccaattccaaagcaaaagaaaacaaggtctccatagaactctgactgtgacttgtctggcaccgacgtgagataatattttgggttgtccgtcggtggtaaatattatggggtttccttttggtcagttattgttggatcaccttggtgccgtaccattggcatttggcaatggcaagtcatgtatatcattttgtataccggtaaattgttcaagacggtatgaagacacgcttgtctaccagttactgtaacaagcgaaattttcatgtgccaaatgacacatgattcatgaaag

SEQ ID NO: 13092 - DNA, 2047 bp, Zea Mays
tcatatgcaggtccctgacattgaggattttatatacgaaaaggccaaaacattgacatcgtcaagtaaggcaacaacatctttggtcaaggtggagaaaaaggttggagtttcttcagttataaaaggtatgcataaatcggaaggctacttgaagagataagttattgcatatacgtttaccatgctgcttttgttgttatgccatgtttcgtttttttttgcaagcctatacctattgacgtcagcaatgcttcatttaagttttgggctttgtgttactaacttactactaagatgaagtcactggattggaactttttttctgctagcatgtgatcaatcttgccacaaccacaagtgggatcttacatggtcaggatatgctgtggcattttcagtttcccatacataactatcatttgtaagctcattttttttaattatgtttgaaattagattgcatggaaaacagctatacacgtgcctaaatcttgacttgtggcttctgttgtaattctagcctaccccaacttgtttgggaccaaaagactttgttgttgttgctgttgtttggaattagattgcattgttcttggttcctctaattgtaatggtagccaaaaagccttagcgcagtggtaaaactgctgccctgtgactaggtggtcactggttcgagtcatgaaaaccgcctcttctcttgcaaatgcacgaaaagactgagtactataaacacaaactggtccgacccttccccggacccgcgcaagtgggagcacatgcaccgcgctgccctttttttaatgttagccaaaaagacgggctcattatagtcactgattaaaaacttatatgaatcttagttcttcattctgcacatctgtgcattttttcaacctaaattcttcactgttgcaccatgaaaaataagtgcattaggtccaggtttgttgacttcttattaagcattcatatctttcatttgattggtatctttcttatgtccatgtacgataagaaacccaaagtagtcatttgcgcagttggagctccagataactgggaggcagttcttggaggcattaaaagcatgaggttatctggtgaagcccccgtagatacgaagggctgtgaaaaagctggttctctccttccacccaaggaaagaagatttgcagttctgatatcaactatgatgtcaagccagacaaaagatgaagttacacatgctgctgtggaacgcctctctgaaaacggtttacttgatccggatgctatagtgaggactgatgagaccacgcttgcgaatcttatcaaacctgtcggattctatcagcgaaaggcgcagttcataaaagaagcttctaaaatttgtcttgagcgctttggaggggatattccggattctctgaatgaactgcttgctctgaggggagttggccctaaaatggctcatttggtgatgagcattgcttggaagaatactcaaggaatctgtgttgacactcatgtgcatcgcatttctaaccgacttgggtgggtttttcgggaagggacaagacagaaaactacgacaccagaacagacaagaatttctctagagaaatggctacccaaggatgagtgggaacctataaatccattactggttggatttgggcaaactatctgtactccactgaggcccaaatgcgataagtgtggcatcaacaacatttgcccttctgcttttaaggaatcatcaagcccaattccaaagcaaaagaaaacaaggtctccatagaactctgactgtgacttgtctggcaccgacgtgagataatattttgggttgtccgtcggtggtaaatattatggggtttccttttggtcagttattgttggatcaccttggtgccgtaccattggcatttggcaatggcaagtcatgtatatcattttgtataccggtaaattgttcaagacggtatgaagacacgcttgtctaccagttactgtaacaagcgaaattttcatgtgccaaatgacacatgattcatgaaag

SEQ ID NO: 13093 - DNA, 1117 bp, Zea Mays
tcatatgcaggtccctgacattgaggattttatatacgaaaaggccaaaacattgacatcgtcaagtaaggcaacaacatctttggtcaaggtggagaaaaaggttggagtttcttcagttataaaagataactgggaggcagttcttggaggcattaaaagcatgaggttatctggtgaagcccccgtagatacgaagggctgtgaaaaagctggttctctccttccacccaaggaaagaagatttgcagttctgatatcaactatgatgtcaagccagacaaaagatgaagttacacatgctgctgtggaacgcctctctgaaaacggtttacttgatccggatgctatagtgaggactgatgagaccacgcttgcgaatcttatcaaacctgtcggattctatcagcgaaaggcgcagttcataaaagaagcttctaaaatttgtcttgagcgctttggaggggatattccggattctctgaatgaactgcttgctctgaggggagttggccctaaaatggctcatttggtgatgagcattgcttggaagaatactcaaggaatctgtgttgacactcatgtgcatcgcatttctaaccgacttgggtgggtttttcgggaagggacaagacagaaaactacgacaccagaacagacaagaatttctctagagaaatggctacccaaggatgagtgggaacctataaatccattactggttggatttgggcaaactatctgtactccactgaggcccaaatgcgataagtgtggcatcaacaacatttgcccttctgcttttaaggaatcatcaagcccaattccaaagcaaaagaaaacaaggtctccatagaactctgactgtgacttgtctggcaccgacgtgagataatattttgggttgtccgtcggtggtaaatattatggggtttccttttggtcagttattgttggatcaccttggtgccgtaccattggcatttggcaatggcaagtcatgtatatcattttgtataccggtaaattgttcaagacggtatgaagacacgcttgtctaccagttactgtaacaagcgaaattttcatgtgccaaatgacacatgattcatgaaag

SEQ ID NO: 13094 - DNA, 1163 bp, Zea Mays
tcatatgcaggtccctgacattgaggattttatatacgaaaaggccaaaacattgacatcgtcaagtaaggcaacaacatctttggtcaaggtggagaaaaaggttggagtttcttcagttataaaagttggagctccagataactgggaggcagttcttggaggcattaaaagcatgaggttatctggtgaagcccccgtagatacgaagggctgtgaaaaagctggttctctccttccacccaaggaaagaagatttgcagttctgatatcaactatgatgtcaagccagacaaaagatgaagttacacatgctgctgtggaacgcctctctgaaaacggtttacttgatccggatgctatagtgaggactgatgagaccacgcttgcgaatcttatcaaacctgtcggattctatcagcgaaaggcgcagttcataaaagaagcttctaaaatttgtcttgagcgctttggaggggatattccggattctctgaatgaactgcttgctctgaggggagttggccctaaaatggctcatttggtgatgagcattgcttggaagaatactcaaggaatctgtgttgacactcatgtgcatcgcatttctaaccgacttgggtgggtttttcgggaagggacaagacaggtagcttagaaaactacgacaccagaacagacaagaatttctctagagaaatggctacccaaggatgagtgggaacctataaatccattactggttggatttgggcaaactatctgtactccactgaggcccaaatgcgataagtgtggcatcaacaacatttgcccttctgcttttaaggaatcatcaagcccaattccaaagcaaaagaaaacaaggtctccatagaactctgactgtgacttgtctggcaccgacgtgagataatattttgggttgtccgtcggtggtaaatattatggggtttccttttggtcagttattgttggatcaccttggtgccgtaccattggcatttggcaatggcaagtcatgtatatcattttgtataccggtaaattgttcaagacggtatgaagacacgcttgtctaccagttactgtaacaagcgaaattttcatgtgccaaatgacacatgattcatgaaagttatctgatcgggagcttgcgcgtg

SEQ ID NO: 13095 - DNA, 410 bp, Zea Mays
ctgaagttgttttagttggatttgggcaaactatctgtactccactgaggcccaaatgcgataagtgtggcatcaacaacatttgcccttctgcttttaaggaatcatcaagcccaattccaaagcaaaagaaaacaaggtctccatagaactctgactgtgacttgtctggcaccgacgtgagataatattttgggttgtccgtcggtggtaaatattatggggtttccttttggtcagttattgttggatcaccttggtgccgtaccattggcatttggcaatggcaagtcatgtatatcattttgtataccggtaaattgttcaagacggtatgaagacacgcttgtctaccagttactgtaacaagcgaaattttcatgtgccaaatgacacatgattcatgaaag

SEQ ID NO: 13096 - DNA, 337 bp, Zea Mays
gcgcaggtcatccccaagcgtgcggctcctcccgatctccgttgcctgctcccagtaggagcttgaagggagagattggtgtgcatgaagagattggatatgtgcttggaaatactggagctggctgtccatggattaagagcagtttgctaccaatatattaagagcagtttgctctaattacatattattacgtactatgaacttgcttttcttctcagcatggatatcatttcactacggatcaatattatataacctatgttttgatatcatatttttggttgctatatgttctgtgatttaaactgtggcaacaagaagtatacgaagttca

SEQ ID NO: 13097 - DNA, 2115 bp, Zea Mays
caggctgtgacagctgctcctgcacctcatcgcctccctcgccgccggaccggatgatgcattactagccaaccaaatcggtcgctgagccaggccccaggcccaggcacgccgctcttctcggcagtaacggaagccgagtcctctcccaccccggggcgggactcgccacttcccattcctgtgcgcctgcctcgcctcgcctcgcgtcgcactacccacccccaccagccaccaccaccaccaccaccaccaccaaccaaatggagcgcgcacgccgccacgccagccgcgcgctgctgcgccgcctgctcgcggcggccgcggcctcgcccgccgcgtccccggccacgtcgtcccgcggcatctccaccctgtcgccgccgccgccagccgcggggaagcagcagcgccgctgctgccctccaccccgcggcgcgcaccagcacgcgcaggcgcgggcggtgtcggtgtcggcgctgcagccgagcgacaccttcccgcggcggcacaactccgcgacgcccgccgagcaggaggccatggcgtccgcgtgcggcttcggcggcgtcgacgcgctggtcgacgccacggtcccgcccgccatccgcgcgccgccgatgcggttccccggcaggttcgacgccgggttcaccgagtcgcagatgctggaccacatgcggcgcctggcgtccatgaacagggacttcaagtccttcatcgggatgggctactacggcacccacgtccccgcggtggtgctgcgcaacctcatggagaacccggcctggtacacccagtacaccccgtaccaggccgagatcgcgcagggccgcctcgagtcgctgctcaactaccagaccatggtcgccgacctcaccggcctccccatgtccaacgcctccctcctcgacgaggccaccgccgccgccgaggccatggccatgtgcagcgccatcctcaggggcaagaagaggactttcctcatcgcctccaactgccacccgcagaccatcgacgtgtgccgcacccgctccgacggcttcggcatccgggtcgtcgtcgccgacgccaaggacctggactacggcggcggcgacgtctgcggcgtgctcgtgcagtaccccggcacggagggcgaggtgctcgactacgccgagttcgtccgggacgcgcacgcccacggcgtcaaggtcgtcatggccaccgacctgctcgcgctcaccgcgctgcgcccgcccggcgagatcggcgccgacatcgccgtcggctccgcgcagcgcttcggcgtgcccatgggatacggcggcccgcacgccgcgttcctcgccacgtcgcaggagtacaagcgcctcatgcccggccgtatcatcggagttagcgtcgactccaccggcaggcccgcgctccgcatggcgatgcagacccgggaacagcacatccgtcgcgacaaggccaccagcaacatctgcactgcccaggccttgctcgccaacatggctgccatgtacgctgtctaccatggcccagcggggctgaaggcgatcgctgaccgggttcatggcctggctggcaccttcgcccacggcctcaagaagctcgggacagtgacggtgcaggacctgcccttcttcgacacggtcagggtcacgtgctccgatgcacgtgcaatcgccaaggaagctgtcaagaacgagatgaaccttcgggtcgtcgatgccaacacgatcactgtagcatttgatgagacctccaccctggaggatgttgacaagctgttcaaggtgttcaacaacggcaaatcagccagtttcacagccgaatccatcgcaccagaggtctcaagctcaattcctagcagccttgctcgcgagagcccctacctaacgcatccagtcttcaacatgtaccacacagagcatgagcttcttcgttacctgcataagttgcagtccaaggatctctcgctatgccacagtatgatccctctgggttcttgcacaatgaagctaaacgctactgttgagatgatacctgttacatttcccaactttgcgaacctgcacccatttgcccccactgatcaggctgcagggaaatgtttgacgacttggg

SEQ ID NO: 13098 - DNA, 947 bp, Zea Mays
gagcaacagggttcataggtgcattacgcattgctttacagcaaagtgcaaaacagttttgtacatggtttcagtctttcagaatcacaaaacaaggtgaaacacagacacagtttgcagtaacaaattctaggtccttcaaatgttggtgggtttggctgatttaagcagctagcttaggcaaacaaaacagcaaaacagcaggcgttcctacttcatctcaacatagcaggcgttcaccttgtggcctaattactgaaaccaccaaaacagcaagcattccagtagtgagatgaaataggaacaccaattgaggcctaaaattcagctaacaacacgacacataatacttcaagcattccttttcctgatcggtgacaacttttgtggcctaattcttgatcctccttcaaatgtcggcgggtctggctgagatgaagtaggaacaccaattgaggcctaaatttacaaatatgctatgtgagttgatatttttcattgaaaatgcaaaataaatagtgagtcacataccctcgtgtacttagctcccttcctaggctcccaatcagctctaagtggcactccacatcccttaacattgtgaccataagtgtggcagttggagcatttcactgcagccctttttgaggctcttgcctcaacatgaggttctcctttcgctctaactcgctttttctttggtcttccaggctgggcataatcataccctcatatgtggctacatatttctccctagtgaagaataatgacatataattttctggcttatgtttgaactcgtggatagcagccacggcatgtaagcatggcactccagtaacatcccacctatagcatccacatttctgattgttgagatcaacaagatattgactgtctccactcgtgacttgccatatcccacgcccagcacagacagccctgca

SEQ ID NO: 13099 - DNA, 1505 bp, Zea Mays
atggatcttctctctgctgcgtacggcggtacctccgacgacgaggatgctgctgacccacccttctccacgtcggttgccactgggtccgccttctttgctccacctcccctgaagcggccatggtgggaatctcacagatacctccctccaacccattgcttaccgcaacagcccctgctcaagacagcggcaccgctggcatctccatccagcggcaggtacgtttccaagagggagcgtgctctcctgccttcatcgcaggcacatgtagaatccggatcaccgctgcctccgctgacgggagtggagtttgattgcacaggcttcgattccaggctggctccaccactggaaatggcggcactggtgccggagtgggctaccaaggagccctgcctcatggggatcgatgaggctggccgtggccctgtcctcggtcctatggtgtatggatgtgtgtactgcgcgtgctcttacaataacactcttgcgactctcaaattcgcagattcaaagacgttgaaggaagaacaaagagaggagctatttgaaagtttaaaggccaatagctctattgggtgggaagtggatgtcatatgcccaaaggatctatctgctaaaatgttaaaaaggtcgaaagttaatctgaatgaaatatcacataactctgccatgggtcttgttagaaaagttcttgacatgggagttctactggcagaagtatatgtagatacagtgggagatcctgaaaagtacagaaccaagctgacagaaaagtttccaggggtcaaatttgtggttgccaaaaaagctgatagcctttaccctgttgttagtggagcaagtatagctgcaaaggtcactagggacagagcgttgcgaaactgggtgtttgatgaaacagctctgagtctgcacatgagaactggatcaggatatccaggagaccctgatactaagcaatggttagaagatcacaagcatccggtatttggcttcccaactttggttcgtttcagttggggaacttgtaagcccttcttcaaggacgcagttgatgttacatgggagtctgatgaagttgatgaagaagggactgacaatggaggtgccaagcgacaagtcaagctttcaagcctaggcttcactggtttcaaaaggaaaaccgaggatatcgaatcaagcggaaaaggtcgttgcaaattcttccaggctcgcaaacttgagttggtcaggaagtttcagtgatgtgtcctaatttggtagtacgtacttatatttgtggtagctggagtgtttggtttagtttgttgtagagcctaatttgaaactggtctaaattggatgttgagattggaatgggaagataatgattttccccacattgctacttctgccatttcctacgtgccgcagtagttactggatgctactgcgagtttatttgctaaactcgctttactgtttctttgcaatattgacggacgtttatttggaggata

SEQ ID NO: 13100 - DNA, 1475 bp, Zea Mays
tccattttcacaaatttctcctgtggaaatggccagtggcggagcccttcggcagcccattggcccaggtctgctctgagcctctgagtgaccccgaacctaggcgacggccgacgaggcttccgcggtctgctcgggactccgcacccgtccgcgccgcatctgcctccaggcgattcggctcccggcctccgcgtccgcacagatcgcgccgcctcgccacgccgccgcctcccgactgcccatctgccgcggccgcgcccaccgcccgactgcccgtctgccgcagccgcgcccaccgcccatcgccctctgctcccggccacacctgagcggccgagcccgacaagcggccgcgacattgccacactcctccgcgacaaacagtaggacaccgcacgcatcacgacatcagggcttcgattccaggctggctccaccactggaaatggcggcactggtgccggagtgggctaccaaggagccctgcctcatggggatcgatgaggctggccgtggccctgtcctcggtcctatggtgtatggatgtgtgtactgcgcgtgctcttacaataacactcttgcgactctcaaattcgcagattcaaagacgttgaaggaagaacaaagagaggagctatttgaaagtttaaaggccaatagctctattgggtgggaagtggatgtcatatgcccaaaggatctatctgctaaaatgttaaaaaggtcgaaagttaatctgaatgaaatatcacataactctgccatgggtcttgttagaaaagttcttgacatgggagttctactggcagaagtatatgtagatacagtgggagatcctgaaaagtacagaaccaagctgacagaaaagtttccaggggtcaaatttgtggttgccaaaaaagctgatagcctttaccctgttgttagtggagcaagtatagctgcaaaggtcactagggacagagcgttgcgaaactgggtgtttgatgaaacagctctgagtctgcacatgagaactggatcaggatatccaggagggagtctgatgaagttgatgaagaagggactgacaatggaggtgccaagcgacaagtcaagctttcaagcctaggcttcactggtttcaaaaggaaaaccgaggatatcgaatcaagcggaaaaggtcgttgcaaattcttccaggctcgcaaacttgagttggtcaggaagtttcagtgatgtgtcctaatttggtagtacgtacttatatttgtggtagctggagtgtttggtttagtttgttgtagagcctaatttgaaactggtctaaattggatgttgagattggaatgggaagataatgattttccccacattgctacttctgccatttcctacgtgccgcagtagttactggatgctactgcgagtttatttgctaaactcgctttactgtttctttgcaatattgacggacgtttatttggaggata

SEQ ID NO: 13101 - DNA, 1450 bp, Zea Mays
aatttctcctgtggaaatggccagtggcggagcccttcggcagcccattggcccaggtctgctctgagcctctgagtgaccccgaacctaggcgacggccgacgaggcttccgcggtctgctcgggactccgcacccgtccgcgccgcatctgcctccaggcgattcggctcccggcctccgcgtccgcacagatcgcgccgcctcgccacgccgccgcctcccgactgcccatctgccgcggccgcgcccaccgcccgactgcccgtctgccgcagccgcgcccaccgcccatcgccctctgctcccggccacacctgagcggccgagcccgacaagcggccgcgacattgccacactcctccgcgacaaacagtaggacaccgcacgcatcacgacatcagggctggctccaccactggaaatggcggcactggtgccggagtgggctaccaaggagccctgcctcatggggatcgatgaggctggccgtggccctgtcctcggtcctatggtgtatggatgtgtgtactgcgcgtgctcttacaataacactcttgcgactctcaaattcgcagattcaaagacgttgaaggaagaacaaagagaggagctatttgaaagtttaaaggccaatagctctattgggtgggaagtggatgtcatatgcccaaaggatctatctgctaaaatgttaaaaaggtcgaaagttaatctgaatgaaatatcacataactctgccatgggtcttgttagaaaagttcttgacatgggagttctactggcagaagtatatgtagatacagtgggagatcctgaaaagtacagaaccaagctgacagaaaagtttccaggggtcaaatttgtggttgccaaaaaagctgatagcctttaccctgttgttagtggagcaagtatagctgcaaaggtcactagggacagagcgttgcgaaactgggtgtttgatgaaacagctctgagtctgcacatgagaactggatcaggatatccaggagggagtctgatgaagttgatgaagaagggactgacaatggaggtgccaagcgacaagtcaagctttcaagcctaggcttcactggtttcaaaaggaaaaccgaggatatcgaatcaagcggaaaaggtcgttgcaaattcttccaggctcgcaaacttgagttggtcaggaagtttcagtgatgtgtcctaatttggtagtacgtacttatatttgtggtagctggagtgtttggtttagtttgttgtagagcctaatttgaaactggtctaaattggatgttgagattggaatgggaagataatgattttccccacattgctacttctgccatttcctacgtgccgcagtagttactggatgctactgcgagtttatttgctaaactcgctttactgtttctttgcaatattgacggacgtttatttggaggata

SEQ ID NO: 13102 - DNA, 1534 bp, Zea Mays
cggcagcccattggcccaggtctgctctgagcctctgagtgaccccgaacctaggcgacggccgacgaggcttccgcggtctgctcgggactccgcacccgtccgcgccgcatctgcctccaggcgattcggctcccggcctccgcgtccgcacagatcgcgccgcctcgccacgccgccgcctcccgactgcccatctgccgcggccgcgcccaccgcccgactgcccgtctgccgcagccgcgcccaccgcccatcgccctctgctcccggccacacctgagcggccgagcccgacaagcggccgcgacattgccacactcctccgcgacaaacagtaggacaccgcacgcatcacgacatcagggctggctccaccactggaaatggcggcactggtgccggagtgggctaccaaggagccctgcctcatggggatcgatgaggctggccgtggccctgtcctcggtcctatggtgtatggatgtgtgtactgcgcgtgctcttacaataacactcttgcgactctcaaattcgcagattcaaagacgttgaaggaagaacaaagagaggagctatttgaaagtttaaaggccaatagctctattgggtgggaagtggatgtcatatgcccaaaggatctatctgctaaaatgttaaaaaggtcgaaagttaatctgaatgaaatatcacataactctgccatgggtcttgttagaaaagttcttgacatgggagttctactggcagaagtatatgtagatacagtgggagatcctgaaaagtacagaaccaagctgacagaaaagtttccaggggtcaaatttgtggttgccaaaaaagctgatagcctttaccctgttgttagtggagcaagtatagctgcaaaggtcactagggacagagcgttgcgaaactgggtgtttgatgaaacagctctgagtctgcacatgagaactggatcaggatatccaggagaccctgatactaagcaatggttagaagatcacaagcatccggtatttggcttcccaactttggttcgtttcagttggggaacttgtaagcccttcttcaaggacgcagttgatgttacatgggagtctgatgaagttgatgaagaagggactgacaatggaggtgccaagcgacaagtcaagctttcaagcctaggcttcactggtttcaaaaggaaaaccgaggatatcgaatcaagcggaaaaggtcgttgcaaattcttccaggctcgcaaacttgagttggtcaggaagtttcagtgatgtgtcctaatttggtagtacgtacttatatttgtggtagctggagtgtttggtttagtttgttgtagagcctaatttgaaactggtctaaattggatgttgagattggaatgggaagataatgattttccccacattgctacttctgccatttcctacgtgccgcagtagttactggatgctactgcgagtttatttgctaaactcgctttactgtttctttgcaatattgacggacgtttatttggaggata

SEQ ID NO: 13103 - DNA, 1401 bp, Zea Mays
ctctgagtgaccccgaacctaggcgacggccgacgaggcttccgcggtctgctcgggactccgcacccgtccgcgccgcatctgcctccaggcgattcggctcccggcctccgcgtccgcacagatcgcgccgcctcgccacgccgccgcctcccgactgcccatctgccgcggccgcgcccaccgcccgactgcccgtctgccgcagccgcgcccaccgcccatcgccctctgctcccggccacacctgagcggccgagcccgacaagcggccgcgacattgccacactcctccgcgacaaacagtaggacaccgcacgcatcacgacatcagggtcctatggtgtatggatgtgtgtactgcgcgtgctcttacaataacactcttgcgactctcaaattcgcagattcaaagacgttgaaggaagaacaaagagaggagctatttgaaagtttaaaggccaatagctctattgggtgggaagtggatgtcatatgcccaaaggatctatctgctaaaatgttaaaaaggtcgaaagttaatctgaatgaaatatcacataactctgccatgggtcttgttagaaaagttcttgacatgggagttctactggcagaagtatatgtagatacagtgggagatcctgaaaagtacagaaccaagctgacagaaaagtttccaggggtcaaatttgtggttgccaaaaaagctgatagcctttaccctgttgttagtggagcaagtatagctgcaaaggtcactagggacagagcgttgcgaaactgggtgtttgatgaaacagctctgagtctgcacatgagaactggatcaggatatccaggagaccctgatactaagcaatggttagaagatcacaagcatccggtatttggcttcccaactttggttcgtttcagttggggaacttgtaagcccttcttcaaggacgcagttgatgttacatgggagtctgatgaagttgatgaagaagggactgacaatggaggtgccaagcgacaagtcaagctttcaagcctaggcttcactggtttcaaaaggaaaaccgaggatatcgaatcaagcggaaaaggtcgttgcaaattcttccaggctcgcaaacttgagttggtcaggaagtttcagtgatgtgtcctaatttggtagtacgtacttatatttgtggtagctggagtgtttggtttagtttgttgtagagcctaatttgaaactggtctaaattggatgttgagattggaatgggaagataatgattttccccacattgctacttctgccatttcctacgtgccgcagtagttactggatgctactgcgagtttatttgctaaactcgctttactgtttctttgcaatattgacggacgtttatttggaggata

SEQ ID NO: 13104 - DNA, 1469 bp, Zea Mays
gcacccgtccgcgccgcatctgcctccaggcgattcggctcccggcctccgcgtccgcacagatcgcgccgcctcgccacgccgccgcctcccgactgcccatctgccgcggccgcgcccaccgcccgactgcccgtctgccgcagccgcgcccaccgcccatcgccctctgctcccggccacacctgagcggccgagcccgacaagcggccgcgacattgccacactcctccgcgacaaacagtaggacaccgcacgcatcacgacatcagggcttcgattccaggctggctccaccactggaaatggcggcactggtgccggagtgggctaccaaggagccctgcctcatggggatcgatgaggctggccgtggccctgtcctcggtcctatggtgtatggatgtgtgtactgcgcgtgctcttacaataacactcttgcgactctcaaattcgcagattcaaagacgttgaaggaagaacaaagagaggagctatttgaaagtttaaaggccaatagctctattgggtgggaagtggatgtcatatgcccaaaggatctatctgctaaaatgttaaaaaggtcgaaagttaatctgaatgaaatatcacataactctgccatgggtcttgttagaaaagttcttgacatgggagttctactggcagaagtatatgtagatacagtgggagatcctgaaaagtacagaaccaagctgacagaaaagtttccaggggtcaaatttgtggttgccaaaaaagctgatagcctttaccctgttgttagtggagcaagtatagctgcaaaggtcactagggacagagcgttgcgaaactgggtgtttgatgaaacagctctgagtctgcacatgagaactggatcaggatatccaggagggcatcagtggtgcagaccctgatactaagcaatggttagaagatcacaagcatccggtatttggcttcccaactttggttcgtttcagttggggaacttgtaagcccttcttcaaggacgcagttgatgttacatgggagtctgatgaagttgatgaagaagggactgacaatggaggtgccaagcgacaagtcaagctttcaagcctaggcttcactggtttcaaaaggaaaaccgaggatatcgaatcaagcggaaaaggtcgttgcaaattcttccaggctcgcaaacttgagttggtcaggaagtttcagtgatgtgtcctaatttggtagtacgtacttatatttgtggtagctggagtgtttggtttagtttgttgtagagcctaatttgaaactggtctaaattggatgttgagattggaatgggaagataatgattttccccacattgctacttctgccatttcctacgtgccgcagtagttactggatgctactgcgagtttatttgctaaactcgctttactgtttctttgcaatattgacggacgtttatttggaggata

SEQ ID NO: 13105 - DNA, 1506 bp, Zea Mays
cgcgacgtggcggcgcggcacgggccagccagacgccgcgcgcggcccccggggataggaaggactagtactagtactacactccatatatccggtctggtctggcgagcgcgaccaggcctcctccccgccgccgcacacgaccgtaccgtaccgtacccacccctcttctgatgctactagtatgtagtaggattaggatctcgtcgaacctcatgtccggcggcagcggcgacgacgggcagcagaggcaatgccggcggggcgtcgcggtcgcggccgacgtcgagctcggcgcggcgctggcgctggccgacatggctgcaggcagtggcgcgagcgccgtggtggcggcgcagaaccacgcggccgaggagatgaccgacgacgaggagacggcggcgagcacgaggctgagcctccggctcggccgcgtcggggtgggggtggtgcagtcgccgtcctgctccagcagctccggcgctgctgctgcccatccccggcacatcatgctcaccgaggccgagaaggaggcgaagcggctgcggcgggtgctcgccaaccgggagtcggcgcggcagaccatcctccggcgtcaggcggttcgagatgaactggcgaggaaagtcgcagacctgtcgtcacagaacgcgaccatgaaaaaggagaaggacgtggtgatgaaggagtatctctcgctgaaagagacgaacgagcaactgaaagcggcggagcaggcacaccaccaccaccacctccggctctcgtcgttattctaaatccgtagaatgggcacgtacatttcctttttgtataaagtatagtagcatcgttgtatgttaggccgaataacaaacaaacaaacaaacaggaggcctacacctagcatgttccaaaggaaatgcatcactctctctatctactatgcatcttccagttgttgccacatgtggatgcatccacatcactggtcgtaaaacgtcctaggggtttgtgccgtccacctagcgtcctagccaagttgggaactgtttccgcgcgctgtgtcttgctctgacatctgtatgcagagctccgcggtaaacataaaaaaatttacgtcgtagacaacgtgatggtgctttattgggagggtcgtgactcagtacagttgaggtcaataaacacttattaatagaaatattgtttgataatttttaaatagatctaaccttacctgaagatcacatggacaaggcctccaaaggactatgataagttaccgtcgtttatttgagagccacatcattattgtgaagttgatattcaccgctaggaccaagaactaaaagacaagttggcggtctaatccgtgttaaccttgagtttcatcttgaaaatcagagtcggtctatatataatagaacatacaccttggagacatattggctctattttttatgatccacctatatatgtaaagataatttcataatctaaccaatggcatcattttgacattaaaac

SEQ ID NO: 13106 - DNA, 2179 bp, Zea Mays
ctactcctagtctcctagctaccatggaaatatataattgtacaccaatggtacagtacatgtacaggcaggcctcactgacgaccatctagagtctctactgctagtgctactgctagtctgctacttgggaggctggctataaatggctggccatgacatatgcaatgcatgcctccctcagctccctctacacagcaaacggcacaccactcacctcgctgccgatctttcttcccttcccttccttccacctcggctagctagctagttattaccttagcatcccaccacatcacaccaaggtcacgcggcggccggcaagaatggcgacgcaccacctggcccagggccacccgcaggcgtggccgtgggggatggccatgtacaccaacctgcactaccaccaccaccagcagcagcagtactacgagagggagcacctgttcgagaagccactcacgccgagcgacgtgggcaagctaaaccgcctggtgatccccaagcagcacgcggagaggcacttccccctcggcggcggcgacgggaacgggaacgagaagggcctgctgctggaattcgacgacgaggccggcaggccgtggcggttccgctactcgtactgggtcagcagccagagctacgtgctcaccaagggctggagccgctacgtcaaggagaagcgcctcgacgccggcgacgtcgtgcgcttcgaccgggtgcgcggcgccggcgtcggcgccgccgaccgtctcttcatctgctgcaggcgccgcggcgagagcgcggcggcggcgtcggcggcggcgactccgacgccgccgcccgtggcgcccgcgcttaacgccggcgagcagcagcagcagcagccgtggagccccaccgtgtgctacagcacgtcggggtcgtcgtacccgcccagcccggctagcccctacgcctaccacatcgacacgccacacgcaggcgcaggcgaggcggacgccaagagcagcggcggcacgcctactacaggtacagcgccgacgaggaagctccggctgttcggcgtcaacctcgactgcggcccggagccggagacggagacgccgacggcgccaatgtacggctacggatacgtgcaccagagtccctacgcagcagtgcccgcagttcccagctactggtaataagcaagcacggtcggaaggaacatcaccgagatcattcggtcgcattatacgtactgtactactgctagctgaagctgatagagctaattaaaatggacaagcatataagcaaagcgtcagtttctcttttttttaatgtttgctcaacttgtataggaaattaggaatgaataggataggagtaattgtgaacgaggacttagttatgttttgttttcatttgtcaacaggggcagttcatgagacagacggacggaggagatgagagagagagagagagagagagagagagagaggaagggggaggggaggaaggagatctgaagcaatgttcttgagaagcctgaagcctaaagaaccaacaaccagcgacgaaagaagaaacttagctaccactactactactgttctctcttctctgtctgtagtactgagccaccacaggtctggtggaattgaccggcgggatggaaagaaagggggagcgaaagagatcgcttgtttcccgggcaatcttctcctcctcccggcaccgcagactgggccaccccctccctttttctccttccttccgcaaacaaaccaaccctacgtgccggaccgggggggccccctcttgcaagccagcaggtagcagtagctagaaggtttcaggaaacatcaggttgaatgaaaaggagtggggtggctactagctagctagctagctaggtagagatcgagacaggggagtgacggatggtgacacacatgcatgcatgcatagtagaaaacaaacaagaggacatgcttgcagtcatgtatactggtagtagtactgtgctgtatgtgcgcgtcgtttgtggtaggagtaggagtgtaggtgagatgtgctccttcaaggaacagagaaatgtcctcatggggattttgttcttcttgcggttttcttttttcctactgctattgctatggtcgttctttcatgcactcttcctctggtacaaccaaaaatcctttcacctctg

SEQ ID NO: 13107 - DNA, 6423 bp, Zea Mays
ctcctgttctatgcagccccatcgtcgcgttgtccacctcgtccctgactacgtcgatgcccagcagtgcctattatcttcaagcttctctcgctgccggcgtcaaactcccatgccaggtccggcataggcccctgcccggctgcacctgccttgccgcacgcctccctccctcgtagacttcgttggttccgttgctgccgcgaccttcccgaccggatctacgttggtgcggccatcccggctaggtccgccacccctttggctagatcgctgtctttatggctggatccgtcgttgtcgtggctttcccgaccggatccgccgataccccttcttttctgccgcgagcacgaccaccttgaccggcgtagatgagtgcgctgtcaccggcctccctggcgaggctcctcgacgaccgatcaccgaacgaagcaagaaggccctaaggttgctgctgttcttttgttgtgtcggtctgccgaccgttgacgctcgaacgtcgacccctcccgaagaacaggcttctgctgcgtgtctcccgaccgcgaccacctcgacttcggctacctcagcatctaggggctatcgttatcttggcacacacactggtctctgctccagccgcaacattcgcaccctcacgacgctgcgactgcgggggatttcaactcgtcggctcctaccttcatcttctactccagtctcatcgtgtgtggtgcccgtgttgcgactgcgggggaatgttagactgtgtgtgtgggccgacaccactgttgggctgccggcctattagggtcagggttgtgagtctatatattgccatcccctatcaatatatcaagcctttcattattctacactttgactaacctgttatgtcttctgaatctgatggccattaaatacaggggtctagcaggttcaggtcttagattcatgttctcttctagagttctagttatggttgtctgaactacttcctccgtcctcaatcatgagtcatttcaacttttttggagagtcaaagcatctcaatttcttaaacttgagatgttttgactctacaagaaagttggaatgccttataatttggaacatagggtgtatctttaaacggttgtatttccgttatataatcaatcattaatgcaaatgaggaatgccttggttcagaaaaaaaatgccagtttctgactgacatttcgcctatataaatttgatggaacatttcttaattgtacagaatttgataagttagaaaccctaatgaatatacatgggaaaccctaacgaacatagatggaaaagctaatgaacaacgttttttaattgcacatgcattgaatttgaacttttaccaagaaaatacaaatttgtatgcataagaaatttatgatcgatggttttcaggaaaacaataaccaatagaagtatagtgaaatatcaggcgaaccaatttagtgatgaaattcaactgcatgcataaatttagtcaagaatggaacatgtcatgtgggacacgagcaaacatttaatacagtgcatgctatactgagtaggtcatggaaaagttgtcattgcctacctctgcattggatccttcaggtttctcagatacgacataacggaggacatccatgaagaaggctgttcctttatccgcaaaattcttcatgtagaaggaaattaactgcccagattttgcccttagatggaacaatctctgctcgatgttcggttcatattgcataactatggggcgaagaaaggtgtcatatacaacgtcacttccctgcagatgaattaagttacaggagccttcatcccaaaaacaaatgcatgatccactgcaaatacaaaatatgggggaacaaatatgtaccttagttttggggtaccacaggtacacaaagaaagctagcttcatttctgaatacattggcatcctggcgtggatacagcaggacagctatgcatcaacaagcagtaggctttaaactatgaaataattagcacgcaacaagaataggactgaccaagagatcacgctctcaacagctatcaccatggccacgataatcctggaacactcacaaacaagacaatttagccagtttgatagtattacttgaacacaatctgaacaaagaactagtttttgtcctaggaaagaatcttaaacttatagaaggtggagtactagctgcgcatgtaaaacaagaaacaaacatgacgttgtatatttctagtcatgtatcactcacaaatctgttttttactctacttcagcatttgttttgtttcttgtattataatgttttcaagtcgtccgattaatcgcgattagtcatgattaattgtccaagtcacgttaattcaacaatcatggagtaaggcttcaaaagtccagtggattccgcaaaaataaagcataaatcaaacttcacaatcactctattattctgtaataaaggattccaggaaaaaaagttccaacataaccgtgactgctcacatgaattccagaggtcaaagctctgctgggtcatttagttaaaaaaaatctcagacaggtaggagagttgcatatcttaaaaagggagaaagagaggaagaagagccccgcacaagaacaactcatgtacaacacaaaaggatgggatgaacaagagtttgaggattacaagaacaaaatcacctagtaacaattatataaattcaagcaaataaagcgattcatgttccactggatctttctttagtggaaaaatgttcttatgttcaatttaatctttttgaccattaagaacacacatcatgaccattgactatgaatactaaatatgaatacctcgttccacaaaagactgccatgaacaaagtcccctctgcaagtacatggtcatgttttttcacatttaactggaatttaacatcctattccaaatgcaacgttaaagcatgcggatggtggtttattccaaaatccaaatgctatgttaaagcatgtggatgatggtttaaccaccccaacaggtatacatttgacagaaataaccagctttgtaataaattatttcccttagttgtttcaaaaagagttcccaaacatcaaaaagcaactgcacacatttgcaactagatgataaacattttttttagcccaatcaacctttcactgtatcagaaatccaagtcattccaactaatagggacaacataatccttttccaactcaaagtagataatgctgctgatacctactgactggcattgtaccaaaatcatcaatgacaaatatagaaatgggaaatacttatagggccaagcacaatcattgcatgcacaacaaacatgtgcacaaagcagctcagctcccacctgtggctacagtcacaaataccagcacacacatgaactttcatgatgagcaatcatcttggcacgatggtagctagcatgcccacctgtttacgtggttgaggttttgtttcaatgttatatctatgttatggaagcttcttgtaagcttgctccaccattcatcaaaagaaacttctgagggatggggaaaaagtcagtaaggcatatctggttgctatgcagctatggggcttgtaatctgctagtataagccagaaatgccatatctttaaaaaaacactcggccgcgcgcggggggggggggggggggtccgtatattatattaagaagagaccgaaatatggtctcggtcgagaaaatgcccaaacactgccccctcatcactagcgggccgtcacctcccactctgcaatggcccaaccggagggtggcaaccaggacgtaacccagggagttgatggggcacaacaagagaatttttttaaccaagcccgaaattcgctcccgaggattgaacccgggacttggaggtgctactcggaagccttaaccattacgctagagaccctttcgtgaaatgccatatcttaaagaggaaaaaacttcgtgtgtagggaaaccaactctgcagtccatatgaagcttcatatgatggcttcatggtatagtcaacggtggattaggtaaaccaacatctgcgtcatttcttagggtgactttgaattggtctctcattctgattggtcaacggactagattaaaaaaatatggtagtctaaaaaccttccatattttagttggtcatgaccaagcgtagtcatgctcatgtctgattacagagataaaataacatgtcaggacacattcatcttgcaaaaaaagacaaccttcatacgtaagagatagtgagaagtaactaaacgaacaatcaaattggcattattaataaggtaaagtattttatgagcatgtagtctatttcgtcggaaaatatgttggccattcaatagtcaagtaaggtgtgtaccttgacaataaaataacacaggttctagtcttgtaacgcatatatgtagctaattcaatggttcttttctgaatcacacatcccatgtaccaaaagtacaatatttgagatgctggatataaaatgcacaattgaacaataattaatttgctgaatgaatttgagtaggttacaatggcatgcaataatttccatagttttttttcctttgaggctttaacaaacaagatagagaaaaggaaagaagtgattcaatttttatgtgatgcattgctatgagtcaaaactatgaaaaggcaaatatgctgattgaatcctcaaatttaaatgagggtgtataggaaatgtaactatctgcattcctagggtaagtggcattcaaattacttcttattgccatgtcttgtgatgtgtacaaacatacaccaagtaatggctaccaattctatttgatttaaacagtaaatggaatccgagttttcatagtaggaaattaaaagggcaagatagaggtcatttacataacataaattaagcatgcatctgcataatacaagaagctgggcaaatttataaccttgcaaataaaattatgtgcaattctagaagattggctggaatcccttacgaggcatgtgagacagaaggaaccctaaaccacaagaggcaagccaattctggcagtaagaaattttgtcaaaacttgaaatagtcaataggcaagaccaccaccataataattagtaactaccaaatcagatagggtgtaaaaccatggtaagttataactagtggcaataacgtttagatattttcctgtgcttgcctcagtcattgattgcacgcaaaccctgatccaatccatagtgttggttataaccgacaaaaccgcacaaaagcagattctcacaacttgcagttttcgtggcaattttcaggtggcagaaggtacgaacctgaaactagaacagagcttgcccgattttaccaatcctaaaataaattagagccggcactcatcattgacaataagggcaaaaggctgaggaatgggtaaggaccctctgattaacactgcttattggtggaatgcaggattgaggtgtcatgatccagtcgtccacctaacatccaactattaacgcaccacgaccaagcttgcaactgaagaactaaagggaggcagaaataaagcgggcacaatcatttcgcatgatctttttgcctgtagagaaaccttttcttttttcgaaaaaaaacagttccaggtcatgttatgttatgttatgttagggatggaaaaggttaaggtgggtgagctaaagtctgcatcaagtagtacagtattaagcaagccctgaatctcacgctacgtccgaaaaaatagtaaataaagggggaaaaaaagcacggcacgccgcacgcatcacacagttggtaatggtaacacaccggccgcgcaggctggtgagcagacgatacgggagcaacaagagcaaatcgggtaggcacgcgggatggttcaaacagaatcctggcggcgattactcgccctcagagtcatgaattgactgaaccgtggagttggagttggaggaagacgagtcagcgagaacagaacggaaagttcagaagaagcaacgcaagattcagagattcagctatcatctattcgtctatttcataccctttcaccggttacagcttcgccttttgtacaccggcgacgccctgaccccaccgaacaggctaacgctcctggtcctggctaatctccaggtgggcgcagctgcttcccaaccgacaacacccgaatccgtttagccacgaaggagccgtttggaaggccgaaacggttccgaatgtgaattcacagtggttcaaattccgttaggcaaatgatctagtgactccgattcgctatccggaacatttccgcaagaatttggatccctaccaaacgaggcctatccgaatgtgaatttggatccccgtcaaggatagtgag

SEQ ID NO: 13108 - DNA, 2777 bp, Zea Mays
acactctcatccccgcaacaaccgcctaccggcccgcgcgcgctgtagtctccggcagacaccaacaaggctcgtcactcccctacctccctcggtactcgctccgtctctcgtctctcgctcgcgcatcggctgggggcacggagaacgggaggcgcggaaggtcagaagcggcggccggcggcgcatcggcctcgcccaggcctagtcccgcacggtgctcggtccttctccgattctcccacagcctcgccccctcgcccctgcgcccctgcgcccctgcgcgtccagcgccccaaccccagcggcctgcggcactgatccacagtccacagacccggacaccggccgggcgaggatccgctgaccacgcagcctccaacgccgcatggagatcgtgcgctcccagaggcaggtcgccgccgcagccagtggcggcggcggcggcggcgcgggggccctgccgacctacaaggcggcgccgcagctcgaggtgcggctggaggagttcgagctcttcgccatcgaccgcctccgagttctcaaggggatttcggatggactctcgcgtgggaagaggccggaggagatggagaaactggtcagtgaattgtggaagacacacatgaggcaccaggatccagcagagaatttgaacaaggatataatatcgcactttgtgctccgtctagtctactgcagaacggaagaattgcggaagtggtttctctccatggagactacactttttcggtatcgctttcggcttgagagtcctgaaacacagaggatgcttatgactgagtttcaattgccgtataaagcactgccatactcagagtttgaggctgtgaaagacaaattgagccaagttgcacgttccattggtcaatctgccagtggtatgcataatttgatattgccactgtcttcgctcaatttattgcagaatgctgttccaactggttgttagtatcagttatagaataggatgcttctccatgatttgtatttttgtgcatcatgtaagcagttattgtaaggtagttttttatttttgctatgttgtttcccaaagtcagctgggcagctcaaaactttgtaattaaagcaggttgtgtgcagttgaagaaccagtaaattcctcagttttctaaaaaagcctaagcagttagcatactgaaacagcagagttaccattgtgactgaacttcaggttaaagggaatgtattgcaatttgcaatgtatagaacaacgaatagaaacatttactgtttcaaaccttgtcatcgattttttttctgtttttgctttcattatcttcttttgtcttcttttaccagaaactaacttcattctgtgcctttccatttttggcagttgagcatgtgttcttcaaggtacctttcgaagaagttcctgatcttgttgctggccgtcgggtatttctttcaaaaggctatgcttatgtggccatgagccaggtggtttctctagtggttactcaattccgctgcaatatctcaaaggcacttgctttaacaaacagaaaatggacagcaactattaaagaacaagaaaaggacaggttgactcctattgttgaagcattaagcaatgcgtattttggacctgattactctcagccaaaggatgctgttgacatatctctaaaggatattgaccaactggctaaaagttctttccctctttgtatgcggcatatgctagataagttgagagaaaaccaccatctgaagcatggcggcagaatgcagtttggtctttttcttaagggtgctggactaaagttggaagatgctcttgcgttttggagggcggaattttctcaaaagattggttctgagcggtttgacaaggaatatgcctatgccatcagacataattatggaaaagaaggaaaacggacagattacactccatattcatgtcaaaagatcatttctgcaacacctggcgttggagatcaccatggatgtccgtttcgacattttggtgaagaaaatttgcgggcagcactcaacaaaatgggcgttggtgggcatgcattggaagaggtaatggataaagtgaagaacaggcattaccaggtagcttgcacattaacctttgaggccacacacggtgtctcctgtgattctggaatcaaccatccaaatcaatatttcagtgaaagccagaaagttctgcgagccaaaaaccaaacaatggagagccaatcgcaatcagcaacctaaattgtgtcagcagctggagaaactatacatttccaaaaaacttaccagcaggtaagcactgaagcaaaattcatccttgatgccaattatgttatcgtcattggctgtacctttggcgcttacctggaatattgttgctccctggtgtttccaaatcccagctgctggcttggcctaaaacgaaaacctccaggctccagctgctagctgtcataccctacaagtgatggcaccgcactctacactagaattgttacctagtgctgcgaacagcagcaggtcaaggcgtctgtagactctgtacatgtaattctcgaaagaaccaagacttctgcatttaatgtaggatcagctgtgctgtgctcttagacctcatccaccagtttatctataaatttatccaaaatactgtctttcattgttctatattgtaaaccgcgttgttcgcgtagtagggtttgaaatggggatgataatggataaactgttggagatagtattattacaagataaaaaaa

SEQ ID NO: 13109 - DNA, 2911 bp, Zea Mays
acactctcatccccgcaacaaccgcctaccggcccgcgcgcgctgtagtctccggcagacaccaacaaggctcgtcactcccctacctccctcggtactcgctccgtctctcgtctctcgctcgcgcatcggctgggggcacggagaacgggaggcgcggaaggtcagaagcggcggccggcggcgcatcggcctcgcccaggcctagtcccgcacggtgctcggtccttctccgattctcccacagcctcgccccctcgcccctgcgcccctgcgcccctgcgcgtccagcgccccaaccccagcggcctgcggcactgatccacagtccacagacccggacaccggccgggcgaggatccgctgaccacgcagcctccaacgccgcatggagatcgtgcgctcccagaggcaggtcgccgccgcagccagtggcggcggcggcggcggcgcgggggccctgccgacctacaaggcggcgccgcagctcgaggtgcggctggaggagttcgagctcttcgccatcgaccgcctccgagttctcaaggggatttcggatggactctcgcgtgggaagaggccggaggagatggagaaactggtcagtgaattgtggaagacacacatgaggcaccaggatccagcagagaatttgaacaaggatataatatcgcactttgtgctccgtctagtctactgcagaacggaagaattgcggaagtggtttctctccatggagactacactttttcggtatcgctttcggcttgagagtcctgaaacacagaggatgcttatgactgagtttcaattgccgtataaagcactgccatactcagagtttgaggctgtgaaagacaaattgagccaagttgcacgttccattggtcaatctgccagtgttgagcatgtgttcttcaaggtacctttcgaagaagttcctgatcttgttgctggccgtcgggtatttctttcaaaaggctatgcttatgtggccatgagccaggtggtttctctagtggttactcaattccgctgcaatatctcaaaggcacttgctttaacaaacagaaaatggacagcaactattaaagaacaagaaaaggacaggttgactcctattgttgaagcattaagcaatgcgtattttggacctgattactctcagccaaaggatgctgttgacatatctctaaaggatattgaccaactggctaaaagttctttccctctttgtatgcggcatatgctagataagttgagagaaaaccaccatctgaagcatggcggcagaatgcagtttggtctttttcttaagggtgctggactaaagttggaagatgctcttgcgttttggagggcggaattttctcaaaagattggttctgagcggtttgacaaggaatatgcctatgccatcagacataattatggaaaagaaggaaaacggacagattacactccatattcatgtcaaaagatcatttctgcaacacctggcgttggagatcaccatggatgtccgtttcgacattttgggtacaatttgacccttaatattctatagacgattactatgtgcttattatttagattggtgctctgaattttctgatagcagtatcagtttgtatttccaatcttccctctttccactagattactcctgaactttgaggtggaagtaagatcacatctggaaaccagaaaatctgaatggtgcaagaggcctccaacttccattttttctgattaaaaatgacacccaacaaaaacaaagcttaatataccacaaagaagccataggtaattttgaatgagaaattaatattttgtttactcattaagtacccagttgatagtacaagtacaatacttaattaccaagcagagtaatgacacattttgccctagttcatgccaatatggtttcatctagtctcatccatacttttctattgtttagtttcttactcgatatggtcacaacagcttctgttaaaaaaactcaacctgcggggatacacagcagcttctattgtgatgtcacttggcatgtcagtttgtgatgtttcaagtcaaacatgattctaccttgctttgtacctcatgtttgctccatgcattttcttctgctttactgtatctgcagtgaagaaaatttgcgggcagcactcaacaaaatgggcgttggtgggcatgcattggaagaggtaatggataaagtgaagaacaggcattaccaggtagcttgcacattaacctttgaggccacacacggtgtctcctgtgattctggaatcaaccatccaaatcaatatttcagtgaaagccagaaagttctgcgagccaaaaaccaaacaatggagagccaatcgcaatcagcaacctaaattgtgtcagcagctggagaaactatacatttccaaaaaacttaccagcaggtaagcactgaagcaaaattcatccttgatgccaattatgttatcgtcattggctgtacctttggcgcttacctggaatattgttgctccctggtgtttccaaatcccagctgctggcttggcctaaaacgaaaacctccaggctccagctgctagctgtcataccctacaagtgatggcaccgcactctacactagaattgttacctagtgctgcgaacagcagcaggtcaaggcgtctgtagactctgtacatgtaattctcgaaagaaccaagacttctgcatttaatgtaggatcagctgtgctgtgctcttagacctcatccaccagtttatctataaatttatccaaaatactgtctttcattgttctatattgtaaaccgcgttgttcgcgtagtagggtttgaaatggggatgataatggataaactgttggagatagtattattacaagataaaaaaa

SEQ ID NO: 13110 - DNA, 3979 bp, Zea Mays
cgcagtctaacatcaaaatcccggttttgccccccgtggagggaatgatcctgcctcgggagccgggaaggagaaaaaaaacgtaaaagggcgagcacagcaaagcaacaagaaagagaaagccaaaacacactatagaccccccccaaacccgagaagagaagtgagaacccaaagccagcaaagccagagcgagcgagggagcaaggaggaagacgcaccaggacattgacgagccgcggtccgcagcagcagctcccagcttcatcccccgacccggagccccagcactggtgcagcaggctcgctcgccgccgccgccgccgcgtgaagtgaggcgcgcccccccgcggacgctgacgctgggacccgcgcctgctgggagtgggcccgccccattgatgggcgccggcaggcgccggcggcgagggaaagcgtgaggacgaggagggccggcgggctccgcacgaagcaggccgggcgagcctgccgccgcgccgcctagggagggcgccgcccgtctttgctttaccaggccagagagaaggggggcgggactgcaggcggcgggccgcggaggagctagggttctctctgttctcactctccctgcgtcgccgggatggcggttggggacgcgctgcgccggctctgcgaggaggtcggctggtcctacgccgtcttctggaaggccatcggcgccgccgaccctgtgcatttggtgtgggaggacggttgctgcggccacgtgtcatgctccgccgggtctgaggctcctgaagctgggtgcgagctgggcaccagtgtgtgcacgcttgttaggaaggtcatgacctcgcaaattcatgttgttggtgagggtaccattggccgtgctgctttcaccggaaatcatcaatggattgtccatgatcctgccaatgatcacaatctcagacccgaggtttctgctgagatgaatcatcagtttgcagctggcattcagactattgcaattattcccgtgttaccacgaggtgtactgcagctaggtgcgacaagtgtggtaatggaaaataccaaccttgtgctccagtataagaacctgtgttctcagctaaacaatcggtcgagtatggcttcatcgtcatctgttaaaaatgatttgaaccagaaaattcagtcacgccctttgaatggcctcacgagtatacaccctgcagatacacgctcaaagttttttagtggacccccattgacatatcaacaatgttatggtcctgatggcagaactgtgtctagtagtacattggcaaacatgggcagtaatgcttcaatgcttatggttgcacaaagaaatggccaagtgggtaaagaacacattgtatatgctcctgacatgaggttcagaccacaaaacccttactgtgacaggagagttgggagtaacacccaaaatagtgttgtgagctctggttttatctcgtctatctcagcatcaatggaaaggcatccattaatgaccaacaatcgacagttagaacaaggaaacactggagaaccatcagattccagaagtgttctcttgaaatctctcgcataccataaccctttagtgcatgaaaacacaaacatgactttgttgcatggaagaggccaggtgccaggctttgttaatggtcatgggggttttgattttctcccagaaggtactagagtagtcaagagtaacctgtatggcagcacaacaaatcaaattttagatcaaatatgcagttctacttctgggatgaaagggcacggaccaactatttcatataaaatcccccaacctacccaatttgttggaaaaacggagagttccaagagagagacatgtcaagcttctgttgctctgttgtctgactctgatattcaggtttctagtgtcttgaaaacagccatttcccaagagaatcagacgagtagatctgatcttattggctcaaaaaaggctaatgaagtgcatgatcctactgatgcaattgttcaagctgtcaagaatatggatcgccgcagactcccagacatatctaacgagagatcacccccattccttatggatcctgctgcagaaagtgatttgtttgacatgtttggttctgaatttcatcatttgtgtcacaatgtggataatgatcttacctggaaagctgcaaaacctgagaattcaaatagagatgtacctgaattctctgatcatcttggttcctctccagccttcaattcagtggatgacgagttcccttattctgggatcttctcactaactgataccgaccaactgttggatgcggttgtctctaatgccaatcctggtggcaagcagatatctggtgacagcgcttcttgcaagacttcagtgacagatattcctagcacttcgtattgtcgcttaaaagagccaaagcagtctgaatcatctgctcctcctttgctaatcaagaatgagttagctgtttcaaattttgttaaacatccatctttcccagaaaaggcagcggatggctgtctttctcaaaataatgcaatacagaaatctcagatacgcctctggattgagagcggacagaacttgaaatgtgaaagtgcctcagcctcaaacagcaagggcgttgatacatcaagcaaggctagtcgaaagaggtctcgaccaggagagaatcctaagccacgaccaaaggaccgccagcttattcaggatcgtataaaggagctccgggaactcgtacctaatggggcaaagtgtagcattgatgccttgttggagaagaccattaagcacatggttttcttgcaaagtgtgacaaagcatgcagataacctcaaggactcaaatgaatctaagattcttggtggtgagaatggtccattaaaagactacttcgaaggtggtgcgacttgggcctttgatgttggtagtcaatctatgacgtgtccaatcattgttgaggatcttgatcggcctcgtcagatgcttgtggagatgctttgtgaggatagaggtatcttcttggagatagctgactttattaaaggactcggattaaccatcttaaggggcgtcatggaagcacgcaaaaataaaatctgggcacggttcactgttgaggccaacagggatgtgactagaatggaaatcttcctttccctaatgcgcttgctggaaccgagttatgatggcggtggagcaggagagaatcctaataacaacataaaaatgccccttggaattgtgcagtatcccgttatccctgtgtcaggtcatcttaggtgagccagctgcccagccagcacaaagatcacaggacaggaggcatctttgaaatgctaagagcgggaggtcgacccacttctgccatgactagcattatcaacccaggacgagcgggaatctcgtggcatgcagtgcatcgtccctgcagtgtgcattcggaaagcctaacagtagaggggaatggagacatggatagttggttcggcgggtgatcattagacgatcgatgttttgactgtataatcttaactgttgctgatgcttttgccttttgttcttctgcatattagtgaattttgttatgttcttctgctgaatggaaattctgagttgaattgtagaccttgttcagttgtttctggtactagctcgaagtcggagctctctttttcttaccgttcctgtgtgattactaatgagaaactagttttactgtttacagttaaggttctctttgttctcccaaattatcgtggacctattgaaagcatctatatagccagacttcagtttagttttgattattaatgataacataagattgttgttattaacatattttttttatagtaacaagtatatttttttttatagaaactatgtttttatagaaacaagttaggttataataatatatgatgattagggtttgggatttttatgcccttattgatagagattaat

SEQ ID NO: 13111 - DNA, 2759 bp, Zea Mays
ccaaaacacactatagaccccccccaaacccgagaagagaagtgagaacccaaagccagcaaagccagagcgagcgagggagcaaggaggaagacgcaccaggacattgacgagccgcggtccgcagcagcagctcccagcttcatcccccgacccggagccccagcactggtgcagcaggctcgctcgccgccgccgccgccgcgtgaagtgaggcgcgcccccccgcggacgctgacgctgggacccgcgcctgctgggagtgggcccgccccattgatgggcgccggcaggcgccggcggcgagggaaagcgtgaggacgaggagggccggcgggctccgcacgaagcaggccgggcgagcctgccgccgcgccgcctagggagggcgccgcccgtctttgctttaccaggccagagagaaggggggcgggactgcaggcggcgggccgcggaggagctagggttctctctgttctcactctccctgcgtcgccgggatggcggttggggacgcgctgcgccggctctgcgaggaggtcggctggtcctacgccgtcttctggaaggccatcggcgccgccgaccctgtgcatttggtgtgggaggacggttgctgcggccacgtgtcatgctccgccgggtctgaggctcctgaagctgggtgcgagctgggcaccagtgtgtgcacgcttgttaggaaggtcatgacctcgcaaattcatgttgttggtgagggtaccattggccgtgctgctttcaccggaaatcatcaatggattgtccatgatcctgccaatgatcacaatctcagacccgaggtttctgctgagatgaatcatcagtttgcagctggcattcagactattgcaattattcccgtgttaccacgaggtgtactgcagctaggtgcgacaagtgtggtaatggaaaataccaaccttgtgctccagtataagaacctgtgttctcagctaaacaatcggtcgagtatggcttcatcgtcatctgttaaaaatgatttgaaccagaaaattcagtcacgccctttgaatggcctcacgagtatacaccctgcagatacacgctcaaagttttttagtggacccccattgacatatcaacaatgttatggtcctgatggcagaactgtgtctagtagtacattggcaaacatgggcagtaatgcttcaatgcttatggttgcacaaagaaatggccaagtgggtaaagaacacattgtatatgctcctgacatgaggttcagaccacaaaacccttactgtgacaggagagttgggagtaacacccaaaatagtgttgtgagctctggttttatctcgtctatctcagcatcaatggaaaggcatccattaatgaccaacaatcgacagttagaacaaggaaacactggagaaccatcagattccagaagtgttctcttgaaatctctcgcataccataaccctttagtgcatgaaaacacaaacatgactttgttgcatggaagaggccaggtgccaggctttgttaatggtcatgggggttttgattttctcccagaaggtactagagtagtcaagagtaacctgtatggcagcacaacaaatcaaattttagatcaaatatgcagttctacttctgggatgaaagggcacggaccaactatttcatataaaatcccccaacctacccaatttgttggaaaaacggagagttccaagagagagacatgtcaagcttctgttgctctgttgtctgactctgatattcaggtttctagtgtcttgaaaacagccatttcccaagagaatcagacgagtagatctgatcttattggctcaaaaaaggctaatgaagtgcatgatcctactgatgcaattgttcaagctgtcaagaatatggatcgccgcagactcccagacatatctaacgagagatcacccccattccttatggatcctgctgcagaaagtgatttgtttgacatgtttggttctgaatttcatcatttgtgtcacaatgtggataatgatcttacctggaaagctgcaaaacctgagaattcaaatagagatgtacctgaattctctgatcatcttggttcctctccagccttcaattcagtggatgacgagttcccttattctgggatcttctcactaactgataccgaccaactgttggatgcggttgtctctaatgccaatcctggtggcaagcagatatctggtgacagcgcttcttgcaagacttcagtgacagatattcctagcacttcgtattgtcgcttaaaagagccaaagcagtctgaatcatctgctcctcctttgctaatcaagaatgagttagctgtttcaaattttgttaaacatccatctttcccagaaaaggcagcggatggctgtctttctcaaaataatgcaatacagaaatctcagatacgcctctggattgagagcggacagaacttgaaatgtgaaagtgcctcagcctcaaacagcaagggcgttgatacatcaagcaaggctagtcgaaagaggtctcgaccaggagagaatcctaagccacgaccaaaggaccgccagcttattcaggatcgtataaaggagctccgggaactcgtacctaatggggcaaagcattgatgccttgttggagaagaccattaagcacatggttttcttgcaaagtgtgacaaagcatgcagataacctcaaggactcaaatgaatctaagtatggataaactccaaacag

SEQ ID NO: 13112 - DNA, 3787 bp, Zea Mays
ccaaaacacactatagaccccccccaaacccgagaagagaagtgagaacccaaagccagcaaagccagagcgagcgagggagcaaggaggaagacgcaccaggacattgacgagccgcggtccgcagcagcagctcccagcttcatcccccgacccggagccccagcactggtgcagcaggctcgctcgccgccgccgccgccgcgtgaagtgaggcgcgcccccccgcggacgctgacgctgggacccgcgcctgctgggagtgggcccgccccattgatgggcgccggcaggcgccggcggcgagggaaagcgtgaggacgaggagggccggcgggctccgcacgaagcaggccgggcgagcctgccgccgcgccgcctagggagggcgccgcccgtctttgcttgtttgctcgcaccgtcgcacgtcctgttccagtaccaggccagagagaaggggggcgggactgcaggcggcgggccgcggaggagctagggttctctctgttctcactctccctgcgtcgccgggatggcggttggggacgcgctgcgccggctctgcgaggaggtcggctggtcctacgccgtcttctggaaggccatcggcgccgccgaccctgtgcatttggtgtgggaggacggttgctgcggccacgtgtcatgctccgccgggtctgaggctcctgaagctgggtgcgagctgggcaccagtgtgtgcacgcttgttaggaaggtcatgacctcgcaaattcatgttgttggtgagggtaccattggccgtgctgctttcaccggaaatcatcaatggattgtccatgatcctgccaatgatcacaatctcagacccgaggtttctgctgagatgaatcatcagtttgcagctggcattcagactattgcaattattcccgtgttaccacgaggtgtactgcagctaggtgcgacaagtgtggtaatggaaaataccaaccttgtgctccagtataagaacctgtgttctcagctaaacaatcggtcgagtatggcttcatcgtcatctgttaaaaatgatttgaaccagaaaattcagtcacgccctttgaatggcctcacgagtatacaccctgcagatacacgctcaaagttttttagtggacccccattgacatatcaacaatgttatggtcctgatggcagaactgtgtctagtagtacattggcaaacatgggcagtaatgcttcaatgcttatggttgcacaaagaaatggccaagtgggtaaagaacacattgtatatgctcctgacatgaggttcagaccacaaaacccttactgtgacaggagagttgggagtaacacccaaaatagtgttgtgagctctggttttatctcgtctatctcagcatcaatggaaaggcatccattaatgaccaacaatcgacagttagaacaaggaaacactggagaaccatcagattccagaagtgttctcttgaaatctctcgcataccataaccctttagtgcatgaaaacacaaacatgactttgttgcatggaagaggccaggtgccaggctttgttaatggtcatgggggttttgattttctcccagaaggtactagagtagtcaagagtaacctgtatggcagcacaacaaatcaaattttagatcaaatatgcagttctacttctgggatgaaagggcacggaccaactatttcatataaaatcccccaacctacccaatttgttggaaaaacggagagttccaagagagagacatgtcaagcttctgttgctctgttgtctgactctgatattcaggtttctagtgtcttgaaaacagccatttcccaagagaatcagacgagtagatctgatcttattggctcaaaaaaggctaatgaagtgcatgatcctactgatgcaattgttcaagctgtcaagaatatggatcgccgcagactcccagacatatctaacgagagatcacccccattccttatggatcctgctgcagaaagtgatttgtttgacatgtttggttctgaatttcatcatttgtgtcacaatgtggataatgatcttacctggaaagctgcaaaacctgagaattcaaatagagatgtacctgaattctctgatcatcttggttcctctccagccttcaattcagtggatgacgagttcccttattctgggatcttctcactaactgataccgaccaactgttggatgcggttgtctctaatgccaatcctggtggcaagcagatatctggtgacagcgcttcttgcaagacttcagtgacagatattcctagcacttcgtattgtcgcttaaaagagccaaagcagtctgaatcatctgctcctcctttgctaatcaagaatgagttagctgtttcaaattttgttaaacatccatctttcccagaaaaggcagcggatggctgtctttctcaaaataatgcaatacagaaatctcagatacgcctctggattgagagcggacagaacttgaaatgtgaaagtgcctcagcctcaaacagcaagggcgttgatacatcaagcaaggctagtcgaaagaggtctcgaccaggagagaatcctaagccacgaccaaaggaccgccagcttattcaggatcgtataaaggagctccgggaactcgtacctaatggggcaaagattcttggtggtgagaatggtccattaaaagactacttcgaaggtggtgcgacttgggcctttgatgttggtagtcaatctatgacgtgtccaatcattgttgaggatcttgatcggcctcgtcagatgcttgtggagatgctttgtgaggatagaggtatcttcttggagatagctgactttattaaaggactcggattaaccatcttaaggggcgtcatggaagcacgcaaaaataaaatctgggcacggttcactgttgaggccaacagggatgtgactagaatggaaatcttcctttccctaatgcgcttgctggaaccgagttatgatggcggtggagcaggagagaatcctaataacaacataaaaatgccccttggaattgtgcagtatcccgttatccctgtgtcaggtcatcttaggtgagccagctgcccagccagcacaaagatcacaggacaggaggcatctttgaaatgctaagagcgggaggtcgacccacttctgccatgactagcattatcaacccaggacgagcgggaatctcgtggcatgcagtgcatcgtccctgcagtgtgcattcggaaagcctaacagtagaggggaatggagacatggatagttggttcggcgggtgatcattagacgatcgatgttttgactgtataatcttaactgttgctgatgcttttgccttttgttcttctgcatattagtgaattttgttatgttcttctgctgaatggaaattctgagttgaattgtagaccttgttcagttgtttctggtactagctcgaagtcggagctctctttttcttaccgttcctgtgtgattactaatgagaaactagttttactgtttacagttaaggttctctttgttctcccaaattatcgtggacctattgaaagcatctatatagccagacttcagtttagttttgattattaatgataacataagattgttgttattaacatattttttttatagtaacaagtatatttttttttatagaaactatgtttttatagaaacaagttaggttataataatatatgatgattagggtttgggatttttatgcccttattgatagagattaat

SEQ ID NO: 13113 - DNA, 3446 bp, Zea Mays
cggaacgttcgtatgcaacttttcgctcgccgggtctgggctttggagttttgctgcacattccgtttcagctagatttgcctggtagacaagcgaagcgcgcgtggggaacattcggatgggcatattcctgtgcatccttcctaacatgggagccctttacttcgaacaaacaaacaaactagtgcatttggtgtgggaggacggttgctgcggccacgtgtcatgctccgccgggtctgaggctcctgaagctgggtgcgagctgggcaccagtgtgtgcacgcttgttaggaaggtcatgacctcgcaaattcatgttgttggtgagggtaccattggccgtgctgctttcaccggaaatcatcaatggattgtccatgatcctgccaatgatcacaatctcagacccgaggtttctgctgagatgaatcatcagtttgcagctggcattcagactattgcaattattcccgtgttaccacgaggtgtactgcagctaggtgcgacaagtgtggtaatggaaaataccaaccttgtgctccagtataagaacctgtgttctcagctaaacaatcggtcgagtatggcttcatcgtcatctgttaaaaatgatttgaaccagaaaattcagtcacgccctttgaatggcctcacgagtatacaccctgcagatacacgctcaaagttttttagtggacccccattgacatatcaacaatgttatggtcctgatggcagaactgtgtctagtagtacattggcaaacatgggcagtaatgcttcaatgcttatggttgcacaaagaaatggccaagtgggtaaagaacacattgtatatgctcctgacatgaggttcagaccacaaaacccttactgtgacaggagagttgggagtaacacccaaaatagtgttgtgagctctggttttatctcgtctatctcagcatcaatggaaaggcatccattaatgaccaacaatcgacagttagaacaaggaaacactggagaaccatcagattccagaagtgttctcttgaaatctctcgcataccataaccctttagtgcatgaaaacacaaacatgactttgttgcatggaagaggccaggtgccaggctttgttaatggtcatgggggttttgattttctcccagaaggtactagagtagtcaagagtaacctgtatggcagcacaacaaatcaaattttagatcaaatatgcagttctacttctgggatgaaagggcacggaccaactatttcatataaaatcccccaacctacccaatttgttggaaaaacggagagttccaagagagagacatgtcaagcttctgttgctctgttgtctgactctgatattcaggtttctagtgtcttgaaaacagccatttcccaagagaatcagacgagtagatctgatcttattggctcaaaaaaggctaatgaagtgcatgatcctactgatgcaattgttcaagctgtcaagaatatggatcgccgcagactcccagacatatctaacgagagatcacccccattccttatggatcctgctgcagaaagtgatttgtttgacatgtttggttctgaatttcatcatttgtgtcacaatgtggataatgatcttacctggaaagctgcaaaacctgagaattcaaatagagatgtacctgaattctctgatcatcttggttcctctccagccttcaattcagtggatgacgagttcccttattctgggatcttctcactaactgataccgaccaactgttggatgcggttgtctctaatgccaatcctggtggcaagcagatatctggtgacagcgcttcttgcaagacttcagtgacagatattcctagcacttcgtattgtcgcttaaaagagccaaagcagtctgaatcatctgctcctcctttgctaatcaagaatgagttagctgtttcaaattttgttaaacatccatctttcccagaaaaggcagcggatggctgtctttctcaaaataatgcaatacagaaatctcagatacgcctctggattgagagcggacagaacttgaaatgtgaaagtgcctcagcctcaaacagcaagggcgttgatacatcaagcaaggctagtcgaaagaggtctcgaccaggagagaatcctaagccacgaccaaaggaccgccagcttattcaggatcgtataaaggagctccgggaactcgtacctaatggggcaaagcattgatgccttgttggagaagaccattaagcacatggttttcttgcaaagtgtgacaaagcatgcagataacctcaaggactcaaatgaatctaagattcttggtggtgagaatggtccattaaaagactacttcgaaggtggtgcgacttgggcctttgatgttggtagtcaatctatgacgtgtccaatcattgttgaggatcttgatcggcctcgtcagatgcttgtggagatgctttgtgaggatagaggtatcttcttggagatagctgactttattaaaggactcggattaaccatcttaaggggcgtcatggaagcacgcaaaaataaaatctgggcacggttcactgttgaggccaacagggatgtgactagaatggaaatcttcctttccctaatgcgcttgctggaaccgagttatgatggcggtggagcaggagagaatcctaataacaacataaaaatgccccttggaattgtgcagtatcccgttatccctgtgtcaggtcatcttaggtgagccagctgcccagccagcacaaagatcacaggacaggaggcatctttgaaatgctaagagcgggaggtcgacccacttctgccatgactagcattatcaacccaggacgagcgggaatctcgtggcatgcagtgcatcgtccctgcagtgtgcattcggaaagcctaacagtagaggggaatggagacatggatagttggttcggcgggtgatcattagacgatcgatgttttgactgtataatcttaactgttgctgatgcttttgccttttgttcttctgcatattagtgaattttgttatgttcttctgctgaatggaaattctgagttgaattgtagaccttgttcagttgtttctggtactagctcgaagtcggagctctctttttcttaccgttcctgtgtgattactaatgagaaactagttttactgtttacagttaaggttctctttgttctcccaaattatcgtggacctattgaaagcatctatatagccagacttcagtttagttttgattattaatgataacataagattgttgttattaacatattttttttatagtaacaagtatatttttttttatagaaactatgtttttatagaaacaagttaggttataataatatatgatgattagggtttgggatttttatgcccttattgatagagattaat

SEQ ID NO: 13114 - DNA, 2420 bp, Zea Mays
gaaagcgtcgtcttgggccaaaataggatgaattaggtttccttggactattctcaatttaacgacttagatttgctccaactacaagcaaggaaacaaaattcactattgaaaacaaatgtatccaagcaacaactacaaaacgaacaaatcatggtcacaagaagtggcaagttattccaaaaattacatgaaaggtaatcatataaatggaaaacattgtagtccccaagaaacaaaaacatagagattgtataacattggcttatggatgctacaaacaaaacataaatgacaataagtgaacagtatgtcaatgcaagaccaaaagtaatatgttcctaggatcaagtctcatgtcaatgtccacaaaaggaattattcataacattcaactccatcaaagttcatgaaattccaaaacacaaaaccccatataggttcctaacgtgcatagaagttaaaaacctaatgctatcatatatgtataacgacaatgaagccttttagtcctaatcaagttgggtaagttagagttgaaacccaacagaaaatgcaagtcaaagttcatgcacatagataattgttttccatgcactcctgttcaaggttaaatctttaggtgtactccatccttttaagtcaccttttactgcctcttcccatatcctattaataaaatggcttccacggttgaccttccgggcatgaaaccaaattggttcatacagatcctcgttattcctctcagacgatgctcgataactccaatagcctcatagcatgccccatcaacttaattcttcgataaatggtaccactttaaatatctcccttattcttgttcatctactaatatacttctccacttgttaggtattttgttcgaccaaaagatatggttgaacaacttggttagcgatactatagttatgtccctgaggcatctccatgccaccatcagggctcatcgccttaccctatttcatccttttcagtaccactctaacatcatattcttggatcctatgcataaagcgtctattgatgtcatcaaaagactcatccaactgaaaggtcgtgtcccctttgtccccattgaacaattagtcaaaatactctcgccatctatatctgatctcttcctccaccaagaggtgcagcgtttcatccttaatgcactaaacttggttgaagttcctcgtcttcctctcacgaaccatagtcatcctatattgtcctttgatgcacaagtatgctttggttaaagctaatatctacttagttattccccgacttaggctatataatccatcttaggtacagtaacctagactcaaactcactatatagtgaaatgtgtgcccaatttattagaatacttacatagagtgacttttcccgccttttgtaatagggttgggctttatcttcttttaatgctgagaatctataccgcttaagtcactcagcttttttaacccggaacgagattggaggcgaccctggatgtagagatagatggtgtactagggattaggttaggtacctagaagagggagaaggtttattcggtgtccaaagatactagtcgggatgaattaaccatacttaaaagtaagcaaggtgaagaatgaatttctaaggtccatagataccgatattgattataatctacttggatacaagacaaaacctgctagggattgattcacggatgagggaccaaagcgtgtttcaactggtattaacacgcccgaggtcagttcagtaaagtagtaactttttttcgtggtcagagactcacaaatcaagttatcaaaaagatgcgagaaatacaaaccaatcttctactactgctgtagaaccacaggaataagatgcttcacggcatgacccttctgtgtggaatcttgaccattatggacttggtagaatctcttccattcctcaacatcattgaggtgaggtgcttgcatctgggaataccctctgaaccagttcaattagatcagcggtgattatgggtcagattctagcctctataccatgaactggctttcccactaaagtgcaatactaccatatgggtattgtttgtatcaggaactgggcagagagaaaagtaatggttacctacttccttcgtactcaaacattagtaaagatctacaaacgccctaccattatttgctaccacgtacatctctatgttgtccacagtcatgtcttggtacaaacgcttatcattcttcgcctccatagccatttggacttcctcttttccactaacaaatatctttagcttcgcatacactcccttttgttgctccacacacctccaaggccaccttccaaatacaagttaccatcttctctcgcatgtttgtgtcatcttcttccttccatgtgccatcttg

SEQ ID NO: 13115 - DNA, 5626 bp, Zea Mays
ccctaattggctagcttctttctcactcgagttgagttcgtaagtgtgagaaacttaacgggggtctagcatagacgatggttttctactaggatcgcttcccacctgaagctccacgccaagttctcgtcccattgttggctcctttcctaaaagagcacctcccatgctaatctcgaattccctctgccaactaagcgccatcccaccagttttgcctctttgctagttgtccacccctagatcatcgcatctcccatcaagcaacctccccttcaattgtttggacatctgacacaagaagataaagaggggggagcatgctaacatacctcaagccttcccttcctcactactctcgccatcaaggctagaccactacacctcttgaacctccttccaagatgcaacattttatcatgttttacgtgcttcgctagtgcaacttccttggcctcctacgctacaggtgggcatagatcccaatacccaaacttgaattacctacagccaaaaaatgatcttcttgtatgtagttgaggtattaaggctcattgtctgatttatccattttacccaaagttgattggaccctgtaacatcagcctcacctaatgaccctgtaacattagcctaacctaatgacccaagcccccatcaataatgccgcctacctaattcaccaaattttttagtcaacgaagtcgaggtgtagggtcaaagaatgtgatacactacttgcgtgacatttttgcaatgcatgtcaaaaatggccctgcataccaaggtctagtcaatgcctttgaatatgttttatgtgactatgattcacccgacaccctacactagctgcattttgacagctgcacagtctagagttggctttactgtcactgttcacctccaccaaaagaatctcatcaaacagcgacacaccatcacaccatgctaacaaacgccaccaaagccacatgaacacatgctctccatcaccttcattgcaccatcatgctagcacaatcaaagggccccaatcttcaacctctttggcgatacccacagctatccaacactcttcttccatgacaatatcaaagagaagccaatagtcactcctcttcttcgacactttacgccagacactgtgagaaacaactcaaaatcccttcttctcgacttctcccaaatgttttccattagcatgggtccaaagcattattttcaagtcgtccgattaatcgcgaccaagtcggtttagaccaatcgcgattaatcgcccaagtcgatcagctagaacgactagcaagtcgtccgacttgaaaacaatggtccaaagggatgatgctcaagaggagggttggtgatgcgatggaaattgagcccaatgtcatgtctaccatttattgctactgacaagcacaggagggtgttgtttttttcttttcaaggtgattcaagtatcaagattacccaaaacccaaacttgagctgtgatttgtttggtaattcatggggaaaagttcaaaatcctagtttttagaactcgaattactcaatccaaaattttctagtctacgtgatgtcatgagtgcttgttcatctttacggttcttaactaaccaactctttcacctattctagtcctagatctcgatcctaatctccccatacttctgtcctcgtagttcgcttacagtttacccttgttgccaaggagctagttaccagactcattctgctcaaagccactagcactaatgcgtacgagatcacaacttacttatgacattatctaggaacattttggtgaatagtcttgcacccttgcccctgacattagccttgctatggatttccatgctaaattgtgcccttacaacccatactcttcacactcgtgtgcacctcccgcgatgacattggtatttggtagagaagccagggagggaaatgaatgtgtacaaagaaaaggactgacatgttgacactactttaataatggacataaacatactacttgtggtgatttgagcatgaacccaacaattatggattttagcggtgtgaaatggcaaattccatataagttggatgacctacaataaaatcttccattaaacatgttaattcattgagatgatatagttttcaatattagtttacagaggccaaatgacctcacaccaaacttcgtttgggcgtcttgacaaggctataggccaaatacacgatccactcagctaccaatttttaaaggtaatatttgaatgactaataacacaaaatcataccacttgttaccatctaccaattcatagaaaccatcctctaaaaaagatcaaacaccaataactgaaatgcatcaagaactatactctggcctctgtttcgtgctacctacaggaagcccaactacatggctgcaacgcagcaacctacaggaagccgagtttcgtgctaccagagtagcgggcaaagaagccatagagccatcctctgggctgggcctatacagttagggctggtttggtgaccatggatggatccatggggagaaatacccttgctattcaaaattgaaaagcaaggggattcctcttccatggaacccctcgtgatccctagtcatcaaatcagcctttacagaaataaatgtccttataaaataatcccagatcccttccccgccaccgtacatcaatctgcacttatgggcagaggaaccacagttatacgactacccacgttagaacacgtggcttgagctcctcttgttgacttgctaatcaagagtacaagtaataatcactcggttgcagtaaaaaccaccaacactgggaacaaccaacgccgaatcggcaaatcccactaattcttctatctattaaacgcgggcgcaaagcgggcacctccttcagccacgccacctccaaaaacttcggccgtcagatcttctttggacggcgtcgtcaaaacgtcggtccaatacgtactcacgcgcgtagcttccagacttctgactcacgcgacctttgggaatgaaaagggttactaccagatggtttcacagacgacgaaacgttttccatggaaaaaaaggcgatcgcccgacgacggcggtgaagagtgctcgcaaacgtcttcgtcgccaatcgcttgtcgttgcctcacacatacgtccacgtcagctagccgcccgatgctgctcctaaggcccacgaaagcatctcaggtagcagccattgcaagcgcggggtttcagagccatcgagaaagctcccgtggatagcacaagactgctctatctcgtatgtcctcttccgttgcagcatcagagctcgcatccatggtgtcttcaggtagcggcgtttttgtccccacttcggctagcggcctcgccgcccacgcaacgcatctatcctcacttcgccataggaaacgccgacgcagctgaggcagctcagtaggatcctctggggcacctaatcagagtccaggagcaactgatgtgccactgagaagcctgcatcaacaactatatggcgacgacctgcaactatcgacgcgaacaacggagcactgggtctgcgcggcggcggcgaccgcacgaggaggccgacacaagcccggacaacacggcgaaatctggagcgtggcagatcagccgcttgatctccagcgtggccctcaccgttgttacctcgtcgctcgaggagactgcttcgacgtatgtgagtatgtccccgtcgtctgcgcccaatctatttcgtcatcccctgtcaaacaagagacacaggcactccatcgccccttccctaatacacaggcacacagcccccacctaatctttgcggctattggtcatcgggagaaacggggatcctgcatggtgtacgggagcaaattttggatggatttctgctcgaagtttttgcttaacttatgaagaagcaagggaccaatggaagtggatagtcactataatgatggaagtggaagtgaagaacgacatattacacacggctgattcgtaggtgggactaatttagctcaaattaaatgtgattgtctaataaataatgaaagattacgctaaaaaacaactcatatattcgcccttgtattcggatacactgaaaccaatttaagctaaaaattagctaactaataataaggttttttatttaaacatatcctataggttatattctatttgattgagttttaaaggtaggcacgcctcaacaaagcactctcgaattttttctttgctgacaaaagctacgcatgcacttggtttctcctcctctgtcctctgttgtttctgtttggagccgtggtatctgaccacggagtgtggtagccaaaccatggcttaatggctaggatacgagaaatcgacagtgcaatccttttctcgattttttttattagttggtataatcacatgcatcacaagacatttgcgtgtccatgtatatttacatataataaatatttgtatatgcaatgtatcagtacatatagtgaacatggatcatatatatatatatatacacacaaagtggtagcctatattattaaatatctgcatgcatatgtacatatatgtatacatgtacagggtaggcactattttccaccctagatgatgatcaccgcgctaaaatagcttaataggcacatatagactgaaaaaatgagcactacatatcggaaaaaaggacagtggacttcacgaagattaaatgttatcgtgaaaagcatcacattttttgattattttaatcagcatttttttgcctctaacaccagtgttttgttgcctttagaaatttgtacatatgactgatccgcgttcagtgcgtggctgcagaaactcactgtaaactttatttcagagtatcattgttttgtgttcattaagaccagcattttgttgcttcaatacatgtatatatatctgctcagctctcttcaagcagcgtcattgtaatataacatctatgctgattatgctgctatatttgtagattgaattgttctattactagattattgttgctttcatatatctaaagcaacacttttttaaacggtgtaaacaaataaaccaatgacccgcgcagggcacgggcaaattactagtacagatacaacccacaccaattggctggcaaacaactatggcattacaaagaacaaaacgaatctgagaaaaatacacagccaaggtccaaccccctcaatcacggagagaacagatctcccgttgagacaacccctcaaacagcaggcaatcactccacattatttgttagcaaaggaaacttcagtcaagcaacaaacctagcgcaccatacctcaatccaaacaacaaagaaacaatcttgccacgccaaacattaatccaatcaacaaacatggaacaagcgcaagcaagcgcgtaggcacatcccagaagaataatcctggcaacgaaacatggaacaagcgcataggcacgtcccagcagaataaatcggtgaaataatgagtcgaggagggaggtcacgcggtaccttatgccatccgatcccctccgacgccggtacggagaacccgaagcagaggcaccgccggtcga

SEQ ID NO: 13116 - DNA, 2341 bp, Zea Mays
gctccaaagttgaaatggcccgtaattaaggttcgctaagtggtcggagaggttcaagtcaatggatttgcaccccactaagtcatgatcatgaggcactcccgggaggtggtggtcggcgtggacccgcgcaccggggcacccgtcgtgaggcgcgacaaggtgtggaactacaccatcgcggacattgctctcctcgcgttcggcaccaacttccctcagatctccctcgccaccatcgacgccatccgtaacctcggtcaactcacagcaggaggtctaggtccaggcacactcatcggctctatggcgtttgatctgtttctgatccacgctgtctgtgtggttatgccaagggcgggatcaaagatgaagatctcagacctgggcatttggttagtcgagctcttctggtctttctgggcctatatctggctctatgtcatcttagaggtgtggacgcctagagtgatcaccctctgggaggcatagctgacagtcctgcagtatgggctgcttctgctccatgcgtatgcgcaggataaacggtggccatttgtgttgatcccatttttcactagatcgggagaaaccagaacaggtgcgcaggacagattatctcaatggagctggtagcaccccacttcactatgctgcttgtggtggaaatgttgtctattgtcaagtatgtgccgcgatcagtgcgagaggtgagaggcctgaagattgggttccaccagaagatgtttctgctgtttattacgccaaatgtgatggcattgacgagacactccctatgggtgctgacgggaacgatgggattgtagacatcttctctgcacattcctactacgatgcagcagagtacagtcaacttgcagaagaggatatggaaggatcgtcaacaatggatcaagttgtaaagaacacacaagagaacatgtcctggctttctatttggtggcaacaatttgttgatgcttctatggtaatttggttcgtcgttggtctctttatgtgtactgaatagcaagtcatttattgttgcatttggcaaggacattattttttccctgctggcttcctgctctacgagaagaagcaagtgaaacaggtgcatgcttttgcttgctgtcgcagatgcccctgatggcaagcttcagcaatcgtcaagtacaaagacatcctcccgtgcgaaattcaatttgccaaatcctaatctcttctatatatcctcatagatcgcagcgatggagccggatccggtcgccgctggggcatcctcctcgtcgccgccttcaccagcgccggccacgtccccgccgtggcaaacgcaagcaattacatataggttcagaaaggacaatgagaaagcaaaaatgcttttgagaaggcctcaaaaggacaggaaatgatctcctcgtatcctttggaaatttcagaacctatacgcttttgatggtgcaaaacgaatgttttttggtgcaaaacgaatgttttttggtggtgaaagatttttggaaggaatatctggagaggctaacattagtggtttgagttttatttttataacatgttgtgtaacttattaacttgttcatttttgctgaacttcccttttcctgggtttcttggctcgcactttgctttgaacgtcagatcacggtccagcggacagaacagaacaatccacttgggcttgaggttcagctacatattacagaagttgtctgtcctgccttaagtgaacctggcttacgggcctttcttccatttatgactggggtatctgtgtgcctaaataggggagacatagatccaaaagctcaacagcttgcagaagcagcaggatcttcattggtgtccattatcgtagatcacatattcctctatattaaagatactgagtttcaacttgaacttctcatgcggtctttgttcttctcacgggcaagcatttcagacggcgaatgctcaaagaacttatcttgcatcaaggtcggcgggatgtttctgaggtactatatctgtccttgttactcaagactacacaagtcctgatggttgtgtcattcacttacaaattgaggcattgtgacccctcacgcctaaagtattgaatgacattagaccaatattattttggttaaggcataactgaggttcctgacggttctgaatataggatattgtgactgtccgtgtcaaaagtatcaaatgtcatataactgtcattaacaatgaacttggctgacattgccccctcagtgtctgattcacgttttttttcctggtgggcacgctctatcaagctggtgcccaaaataattcggaaggtgtt

SEQ ID NO: 13117 - DNA, 3530 bp, Zea Mays
ctaagtcatggtaagttcaaattcgcctactgcttcgtcgggctgtccgcggtcattgcctgcttcttcaaatccattgagcagatcatgaggcactcccgggaggtggtggtcggcgtggacccgcgcaccggggcacccgtcgtgaggcgcgacaaggtgtggaactacaccatcgcggacattgctctcctcgcgttcggcaccaacttccctcagatctccctcgccaccatcgacgccatccgtaacctcggtcaactcacagcaggagtgtggcacgcacgataggtaatttggagctttgcaggtctaggtccaggcacactcatcggctctatggcgtttgatctgtttctgatccacgctgtctgtgtggttatgccaagggcgggatcaaagatgaagatctcagacctgggcatttggttagtcgagctcttctggtctttctgggcctatatctggctctatgtcatcttagaggtgtggacgcctagagtgatcaccctctgggaggcatagctgacagtcctgcagtatgggctgcttctgctccatgcgtatgcgcaggataaacggtggccatttgtgttgatcccattgtacgatcctgattcctgaatgaatgcctttttcttttgcaaacttatctcatttatgttttcttttacaaagtctgctgcttcctctatcaggcgattgcctctatggtagtgattgcctagcggcatatcaaaaacatctgtacagaaacattgttgggaacaaaagttaagaactgaatgatgtcccttgtgcaatactgaaacaagctccaggtcgcatgagatacactcgactggttggtccgtgtagtactgaataatgtcaaaatattttagcaggaattacctttttgttctggaaaggtagttcgttggaaactgttggaaatgatactccttcaataatttttggcgacttggaatcccttgattttgggaagaaattgttgggaactcttgagatgctctaattaattatcttctgtttggctgtattcagactggtcttgtaatgtctccgttaagtaacaaatcattgtttgctgacaatcaccgaaacccttgaatgatgtcccttgtgcaatactgaaacaagctccaggtcgcatgagatacactcgactggttggtccgtgtagtactgaataatgtcaaaatattttagcaggaattacctttttgttctggaaaggtagttcgttggaaactgttggaaatgatactccttcaataatttttggcgacttggaatcccttgattttgggaagaaattgttgggaactcttgagatgctctaattaattatcttctgtttggctgtattcagactggtcttgtaatgtctctgttaagtaacaaatcattgtttgctgacaatcaccggaaccctttcccaacatttttcttaagatgtctttacctgtctttttcaactgacgaccctttacaaattcacccgaccaaggaaccgctggttgaagataaagtattgcggcttcagtaatgaccattcatccatccctctgtttctgttatctgtttttccactcagatgtttcttagtttcgattgcttgttgctcttgacagcttttctaccagtccggtttctctcacgctgctactgattctgagtccatttgtttcacttcttaatgtggacagattttccatctttttttaatccctaagctctaacattgtgtggttttagtttcactagatcgggagaaaccagaacaggtgcgcaggacagattatctcaatggagctggtagcaccccacttcactatgctgcttgtggtggaaatgttgtctattgtcaagtatgtgccgcgatcagtgcgagaggtgagaggcctgaagattgggttccaccagaagatgtttctgctgtttattacgccaaatgtgatggcattgacgagacactccctatgggtgctgacgggaacgatgggattgtagacatcttctctgcacattcctactacgatgcagcagagtacagtcaacttgcagaagaggatatggaaggatcgtcaacaatggatcaagttgtaaagaacacacaagagaacatgtcctggctttctatttggtggcaacaatttgttgatgcttctatggtaatttggttcgtcgttggtctctttatgtgtactgaatagcaagtcatttattgttgcatttggcaaggacattattttttccctgctggcttcctgctctacgagaagaagcaagtgaaacaggtgcatgcttttgcttgctgtcgcagatgcccctgatggcaagcttcagcaatcgtcaagtacaaagacatcctcccgtgcgaaattcaatttgccaaatcctaatctcttctatatatcctcatagatcgcagcgatggagccggatccggtcgccgctggggcatcctcctcgtcgccgccttcaccagcgccggccacgtccccgccgtggcaaacgcaagcaattacatataggttcagaaaggacaatgagaaagcaaaaatgcttttgagaaggcctcaaaaggacaggaaatgatctcctcgtatcctttggaaatttcagaacctatacgcttttgatggtgcaaaacgaatgttttttggtgcaaaacgaatgttttttggtggtgaaagatttttggaaggaatatctggagaggctaacattagtggtttgagttttatttttataacatgttgtgtaacttattaacttgttcatttttgctgaacttcccttttcctgggtttcttggctcgcactttgctttgaacgtcagatcacggtccagcggacagaacagaacaatccacttgggcttgaggttcagctacatattacagaagttgtctgtcctgccttaagtgaacctggcttacgggcctttcttccatttatgactggggtatctgtgtgcctaaataggggagacatagatccaaaagctcaacagcttgcagaagcagcaggatcttcattggtgtccattatcgtagatcacatattcctctatattaaagatactgagtttcaacttgaacttctcatgcggtctttgttcttctcacgggcaagcatttcagacggcgaatgctcaaagaacttatcttgcatcaaggtcggcgggatgtttctgaggtactatatctgtccttgttactcaagactacacaagtcctgatggttgtgtcattcacttacaaattgaggcattgtgacccctcacgcctaaagtattgaatgacattagaccaatattattttggttaaggcataactgaggttcctgacggttctgaatataggatattgtgactgtccgtgtcaaaagtatcaaatgtcatataactgtcattaacaatgaacttggctgacattgccccctcagtgtctgattcacgttttttttcctggtgggcacgctctatcaagctggtgcccaaaataattcggaaggtgtt

SEQ ID NO: 13118 - DNA, 526 bp, Zea Mays
gacgcagcacaatagcaacaggcagttcacttccttgttcctaacccgccgccgcgccgttgacttgaacggcgctgctgcttccctccaccaagaagctcagctcccgaccgcggcgatcggccgcgcgcgccgcgacgtctcgaagctcgggtcttccgttcgcccatcgcaggctcctcgtgccggccgatctaccaccgctaccgaggaaagcgcgaggccgtccggcgccggccggaatccaccacgatcctatgatttgctgccgttgctggtttctgttgacaagcctgacaagggctccttctccgttgttgtcaaccaccattagcttagttttgtttagagatttccgttgacaacaagccagtttagtgattgtatgcaaggtgagctcttttctgtaggcaaaacagagatttgattgtattctaatgacatgagtggagtggtagcatgaacatatatcatcttgtgagttgatccgcaatttgtatatctttaatgatagagaagagagaga

SEQ ID NO: 13119 - DNA, 1888 bp, Zea Mays
cagcccaataacatcttgtcgtcgtcccgactcaccgccgccgtcatcatgagttcatgactggcctaccgatcgccgcaccaggccctcgcgcggggcaatagaactatagaagtcctcaccccctccgacgacagcgccgatcgttacgccgccggttagtccggcacgtgaactaaccacgatctcccccgatggcgtcgtcgttcaagccgcacgccgcaccgaagaggcgcgccctcgccacgttcaacatcggggctctgcccctggacctcctcgtgtacgagattctgctgcgcctccccgccaagctcctctgccgactgcgcacggtgtgccggttgtggcggtccatcctctctgacccgcacttcgccgcggcccacgccatgcggcacccggggccgctcatcatcgccgccatcgatgagagacccgacgtgcacgtcaacatcatggatctgtcagggcaaatcttaaagcaggtgcgcggcgtgccgggtcagagagtcgtgagcacggcccttgacctcgtctttgtcaagaaaaccgatagcagcagcagcagctaccgattctgcaacccgtttagcggagacgtgcattacttaccagatcaattgctcaacccagcaactggagctgtgtatcaaataccaaacagcttcgccgaagaacacatagatttcacatcgagctttatttcacagtccagatatctgtttggtcaggttagcagcacaggggaatacaaggtgttccggaagctttaccatctttccgttcagtttggaggcaggcagctgctcgagatctgcacagtcaacggtagcaaccacacagggtggagggcagtcacgcccctcgaaaaaaacattcagtttggtgtgttcaccagtgtggtaattaatggaatcatctactcccaatgttttgatccgcaccattctatcacttatgattgtcgagctactgaggaagacttgataattacatttgacattgagactgagaaatgggggccatttatgcgaggaccccccatcagcttttctgatgctgctgctcaggtgttcaatgaccttcggcttccacctataaagcagctaacattagccaatctgaatggctctttagctgttgtgcatggcccagctcccagtatggacatttggattctgatggactctggtaagggtctctgggtcaaacaatacatcatacagttcaaagagtatgccagttttcaatatgtgcatccattggtggtattacgtgacggaagggtggtcctatataaagaagacatgcagcttttacagatctatgacccaagaactaacacactcacagattccgtggaggtcttgcaggatcgcatctattgcttcttgtgctcatcgcagggctgtctagtatcagtggtggcaatatctttagctatattctttctctttgtcttggccttgaccttcacagctttagatgctggtgctgcaccacttgtgtgctctgtagatgttcaggttgatttgagccttctttggatctgtaaaaatgcattcattttagttaaacttcgagagttataccgtttagtaccaacaatttattgatttaaaactgtgagaaaattagatctactcataagccaatttttatgtgaattttcatgcatttgacaaaatcagatatgtttacaggatgtttccctacaagcgaaaatattaaatcagggtcatttgcctttaaatttcttgtcttcattggtactgaacatacagactttattacctcagtgctgctagagctctcatgtcttttagattaccctttttacatgtatgccagtgatgcccaacatccaaacaaataggacacttgt

SEQ ID NO: 13120 - DNA, 2062 bp, Zea Mays
cagcccaataacatcttgtcgtcgtcccgactcaccgccgccgtcatcatgagttcatgactggcctaccgatcgccgcaccaggccctcgcgcggggcaatagaactatagaagtcctcaccccctccgacgacagcgccgatcgttacgccgccgcgatggcgtcgtcgttcaagccgcacgccgcaccgaagaggcgcgccctcgccacgttcaacatcggggctctgcccctggacctcctcgtgtacgagattctgctgcgcctccccgccaagctcctctgccgactgcgcacggtgtgccggttgtggcggtccatcctctctgacccgcacttcgccgcggcccacgccatgcggcacccggggccgctcatcatcgccgccatcgatgagagacccgacgtgcacgtcaacatcatggatctgtcagggcaaatcttaaagcaggtgcgcggcgtgccgggtcagagagtcgtgagcacggcccttgacctcgtctttgtcaagaaaaccgatagcagcagcagcagctaccgattctgcaacccgtttagcggagacgtgcattacttaccagatcaattgctcaacccagcaactggagctgtgtatcaaataccaaacagcttcgccgaagaacacatagatttcacatcgagctttatttcacagtccagatatctgtttggtcaggttagcagcacaggggaatacaaggtgttccggaagctttaccatctttccgttcagtttggaggcaggcagctgctcgagatctgcacagtcaacggtagcaaccacacagggtggagggcagtcacgcccctcgaaaaaaacattcagtttggtgtgttcaccagtgtggtaattaatggaatcatctactcccaatgttttgatccgcaccattctatcacttatgattgtcgagctactgaggaagacttgataattacatttgacattgagactgagaaatgggggccatttatgcgaggaccccccatcagcttttctgatgctgctgctcaggtgttcaatgaccttcggcttccacctataaagcagctaacattagccaatctgaatggctctttagctgttgtgcatggcccagctcccagtatggacatttggattctgatggactctggtaagggtctctgggtcaaacaatacatcatacagttcaaagagtatgccagttttcaatatgtgcatccattggtggtattacgtgacggaagggtggtcctatataaagaagacatgcagcttttacagatctatgacccaagaactaacacactcacagattccgtggaggtgtgccatttttctgcagttgctttgtttggaggaaatctactgagtttataatattactatacggcacggcaccttcggcgaggactcaactcaacagagaatgatttgacaaacattgatccgccagctcaactctgaaaaagaaaagaggagaatctctctagcttgtggaatcacttccctggatgcttagatagctcgagaaagtcttgcaggatcgcatctattgcttcttgtgctcatcgcagggctgtctagtatcagtggtggcaatatctttagctatattctttctctttgtcttggccttgaccttcacagctttagatgctggtgctgcaccacttgtgtgctctgtagatgttcaggttgatttgagccttctttggatctgtaaaaatgcattcattttagttaaacttcgagagttataccgtttagtaccaacaatttattgatttaaaactgtgagaaaattagatctactcataagccaatttttatgtgaattttcatgcatttgacaaaatcagatatgtttacaggatgtttccctacaagcgaaaatattaaatcagggtcatttgcctttaaatttcttgtcttcattggtactgaacatacagactttattacctcagtgctgctagagctctcatgtcttttagattaccctttttacatgtatgccagtgatgcccaacatccaaacaaataggacacttgt

SEQ ID NO: 13121 - DNA, 1095 bp, Zea Mays
atagaactcccaaatctattttggtaagaacagaccgggtagctgatcgattgagatttgaagtgtttatcttcttgttggtcaaggtcaactcgactttgagctgaacaccatcagctagaggaagaaattaagagttctgtaccaagacttaatctgggattcatatatgccacagagcagatttgcatcgtttttgtttgattctatttggcattaaaataagaaagcaaggaaattatatttctttgataacactcttccattattttccccacttttcacttgtttatttcaggttttaccagggctgagtatttatggccaaaatcatatacagactgaattctgccaaaatctttttattctcttatccagaagactcaaactgtgatggctcctctcatgagcagctatgccttacaaaatagtgaaaaattcttatttggccctgattggaacttgcttttcttctttggtcctgaaacaaatctgctgcctctaatgtcttgaagtgatacatgaaatgaccaatttatccccgagacattatgaaaaaccaaaggatagccaggtcttgcaggatcgcatctattgcttcttgtgctcatcgcagggctgtctagtatcagtggtggcaatatctttagctatattctttctctttgtcttggccttgaccttcacagctttagatgctggtgctgcaccacttgtgtgctctgtagatgttcaggttgatttgagccttctttggatctgtaaaaatgcattcattttagttaaacttcgagagttataccgtttagtaccaacaatttattgatttaaaactgtgagaaaattagatctactcataagccaatttttatgtgaattttcatgcatttgacaaaatcagatatgtttacaggatgtttccctacaagcgaaaatattaaatcagggtcatttgcctttaaatttcttgtcttcattggtactgaacatacagactttattacctcagtgctgctagagctctcatgtcttttagattaccctttttacatgtatgccagtgatgcccaacatccaaacaaataggacacttgt

SEQ ID NO: 13122 - DNA, 2184 bp, Zea Mays
aagactttacccccacgtctgcaaccctagcgagccgccgcccgccgcagttcgactttagtcggtctgagtcctgcagcccctggcgccgctatgtacctgacctcgtgtagtcgcttggcccagccgtcgaaaagttccgttgctctgccggagtcgggagagtcgatgtacgccgccgcccgcgtggaggtggaagcggatcggaagaaggaaaaggtggatgagacggagaggatggcaagggagaagaaaaatacacatgaaaaggagcagattcgcaaggtggtgatggggaagcggaagcggaacgaggatgagttggggatggaagagaagcagatgatcgcggagaaagagaaagaggagaaggtgaagaagggcaatggaggaggaattctgactaccaaacttttctcagagctctacatatccgagctcactgccaaggcgatcagagagatgaactacagccacctcaccgagattcaagctagatcaataccgcatcttatgctaggaaatgatgtgctgggttcagccaaaacaggatcagggaagacccttgccttccttataccagccattgaactgctgcacaaagcgtccttcatgccaaggaacgggactggagttattgtagtttgcccaacaagggagcttgctatgcagcttctgaaagggatcaatctcttagttgcaactccaggcaggcttctggatcatctgcgaaatactagaagtttcaactacaaacggctacagtgccttataattgatgaagctgatcgcatacttgagcaaaattttgaagaggatatgaaacaaatatttaaacgactccctcaggataggcaaacagttcttttttctgccacacagaatcaaaaggttgttgaatttgcgaattttacgtttgggcaaaatgaagaaagacaaaagaaacttgtttatgttggagttgatgattctaaattaaagcctactgttgagggcttgcagcagggttactgtgtcattcctagcgagaaaaggtttctggttctgtatgctttcctaagaaggatgcagcttaggaaggaggatctgaaggtcatggtgttcttttcatcatgtagctcagtcaaattccatgcagaatttctaaatttcctcgggatagggtgttatgatatccatgggcaacagaagcagcagaagcggactagtacattcttccaatttttgaaggagaaaaatggcatcttattatgcacaaacgtggcagctcgtgggcttgatattcctgatgtggactatattgtgcaatttgatcctccagatgacccaaaggattacattcacagggttggtcgcactgcccgaggtgacaaaggcaaaggaagtgcattattgttcttactaccggaagaattgaagttgcttatttacctgcaggccgccaaaatttctctgactgaatatgttttcagtgaaaagcacgtgccaaaatcgcaatcacaacttgaggacgttgtcggtgggaattacttcttaaaccagtcagcgaaggaagcctacaggtcctaccttttgtcgtacaactcgcattctatgaaagacatttttgatgtccatcaacttgatctcaagaaagttgctgcatccttctgtttcaagaaccctcctaaagtgaatctggacctggacagtagctcatcaaaacatcgaaagatgaggaaagcggacggtgcaaataggcatggaattggtccttcgaccccctacggaaggagcggccgttacggttccaggcagttggcaagattctagaaaggatattacatattgtaggaagataaattccgatgttggaaatagagattctagctaggaaggatattagtaggaagataagttccgatgttggaaatcgtcatctaatttttttttatttagacgatcaggaatttttatagctttagggctcgttcggttattcccaaaacatatggattggataggattggaaaaaattgagaaggagtttgacttgtttgggattcaaacccatccaatcccgctcaatccacatggattgagagctaaccgaacaaggccttatggacatgcaagatcttagataattcaaggttccgtgtaaatgaatgaattagactaattaccgtacctgtacggctgtac

SEQ ID NO: 13123 - DNA, 2186 bp, Zea Mays
attctcttcctcatacctcgcgcgttaaaaaacctccttcgtctcctggtctgtgtcccacactcctatccttctcgccttcgactgcccagagcgcccagcgcccgcgacgcttctagaacacgcgacgcgggcgagcgcgctggcgggtgggcgaggcaaaactaaggaggcgggaggggcggcgatgcggggcaggtgacgctgcggcgcggcgtgggggatggtggcggcggagggtgggcccggcggggccgtcgaggagggcgtcggggagagctcgtccccgccgcgcgaggacgccgtcccagcgcccgccggctccggcgggagcgggggcagcggaggcgcccgcgaaatctgtgcccaggtgctcgaccgcctcgtcgccgacggctacgcggaggcgtccgaccccgagttccgcgacaggctcgccgcccatttcggccggctcccgcacagctatcagctggatatcaatgttgacaaagcatccgatgtcttggtccaccagaacgtcttagcggaagcaaaggatcctgataggcgccctgcattctatgtccgtttcttgagggcagggcacaccatatactcacattcatgagatagttttctccacaatcgataagccaaagctccttagtcagctatctgcattgctatctgacattggattgaacatcagagaagcacatgttttctctacccatgatggctattctcttgatgtttttgttgttgatggctggcctgttcaggatgctgatggtttgcacaaagcactggaagcatccattctaagaaatgagggttcatggtctggttcatctcattcctcagccgctgaaagaacactgcccttccaagttaaaggtggtgagtgggaaatcgacaaacgacttctgaagatgggagggatggttgcttctggttcttgtggggacttgtatcacgggacttaccttggtgaggatgtagctgttaaagttataagagctgagcatttgaataagaatgtttggaacgagtttacgcaagaagtatatatactaagagaagttcaacataaaaatgttgtgcgattcattggtgcatgcacaaaaccaccccaattttgcataattacagaatacatgtctggaggaagcctatatgactttgtgcacaagcagcataatgttctaaacctcaggactttattaaagtttgcagttgatgtatgccgagggatgtgctacttgcatgaaaggggtatcatccatagagacttgaagactgcaaaccttctaatggacaaagatcatgttgtgaaagtggctgattttggtgtagctcggttccaggatcaaggaggtgtcatgacagctgaaactggaacatacagatggatggcacctgaggttataaaccatcaaccctatgataacaaagcagatgttttcagctttgctattgtcatctgggagctgataacgtctaagatcccgtatgaaagcatgacccctctccaagcggctgtaggtgtgagacagggattgcgcccaggacttccaaagaagacgcatccaaaggtattggacttgatgcagagatgctgggaagcagacccatctgcccggcctgctttcccagacattttagccgaactggaggatcttttggcacaggttcagggaacaccgggaaagacggcccatgctccatcaaataactcgaacacgaaagattaacccccatgcacacatacctgacgtttttctgaattcagtgatctgccatgtttaggattcgagtcgctaattacgaggaatgtagcatatcgatttttttccctggatggttttgcttgtgtacatttgaacaatcttcttggggcctattttttatggtcacctcattgttcttacataggggaaattggctcgagcgtttgggaggattacgtattatgacaacggctgataatttaccgcctacaacatgggtggatatttttcatgcattattatcccagtagctgccattccaagaaaggcataatgctttactcgccttaggttccttttggaatggacactggcgtgttcagctccagtggtcaaagcaccactccctcccgtttagaccttgttcgattgtttccattatagattacatgagattagaaaaaaattatgaaa

SEQ ID NO: 13124 - DNA, 2315 bp, Zea Mays
attctcttcctcatacctcgcgcgttaaaaaacctccttcgtctcctggtctgtgtcccacactcctatccttctcgccttcgactgcccagagcgcccagcgcccgcgacgcttctagaacacgcgacgcgggcgagcgcgctggcgggtgggcgaggcaaaactaaggaggcgggaggggcggcgatgcggggcaggtgacgctgcggcgcggcgtgggggatggtggcggcggagggtgggcccggcggggccgtcgaggagggcgtcggggagagctcgtccccgccgcgcgaggacgccgtcccagcgcccgccggctccggcgggagcgggggcagcggaggcgcccgcgaaatctgtgcccaggtgctcgaccgcctcgtcgccgacggctacgcggaggcgtccgaccccgagttccgcgacaggctcgccgcccatttcggccggctcccgcacagctatcagctggatatcaatgttgacaaagcatccgatgtcttggtccaccagaacgtcttagcggaagcaaaggatcctgataggcgccctgcattctatgtccgtttcttgaggtatcaccaatagaaattggagttatcaaattgactctaaactttgatcaaagattgaagatatggattcagcatacgactccgatgcatctgaagaaggggatgatgatggtgatgatctctctgtaaggcagggcacaccatatactcacattcatgagatagttttctccacaatcgataagccaaagctccttagtcagctatctgcattgctatctgacattggattgaacatcagagaagcacatgttttctctacccatgatggctattctcttgatgtttttgttgttgatggctggcctgttcaggatgctgatggtttgcacaaagcactggaagcatccattctaagaaatgagggttcatggtctggttcatctcattcctcagccgctgaaagaacactgcccttccaagttaaaggtggtgagtgggaaatcgacaaacgacttctgaagatgggagggatggttgcttctggttcttgtggggacttgtatcacgggacttaccttggtgaggatgtagctgttaaagttataagagctgagcatttgaataagaatgtttggaacgagtttacgcaagaagtatatatactaagagaagttcaacataaaaatgttgtgcgattcattggtgcatgcacaaaaccaccccaattttgcataattacagaatacatgtctggaggaagcctatatgactttgtgcacaagcagcataatgttctaaacctcaggactttattaaagtttgcagttgatgtatgccgagggatgtgctacttgcatgaaaggggtatcatccatagagacttgaagactgcaaaccttctaatggacaaagatcatgttgtgaaagtggctgattttggtgtagctcggttccaggatcaaggaggtgtcatgacagctgaaactggaacatacagatggatggcacctgaggttataaaccatcaaccctatgataacaaagcagatgttttcagctttgctattgtcatctgggagctgataacgtctaagatcccgtatgaaagcatgacccctctccaagcggctgtaggtgtgagacagggattgcgcccaggacttccaaagaagacgcatccaaaggtattggacttgatgcagagatgctgggaagcagacccatctgcccggcctgctttcccagacattttagccgaactggaggatcttttggcacaggttcagggaacaccgggaaagacggcccatgctccatcaaataactcgaacacgaaagattaacccccatgcacacatacctgacgtttttctgaattcagtgatctgccatgtttaggattcgagtcgctaattacgaggaatgtagcatatcgatttttttccctggatggttttgcttgtgtacatttgaacaatcttcttggggcctattttttatggtcacctcattgttcttacataggggaaattggctcgagcgtttgggaggattacgtattatgacaacggctgataatttaccgcctacaacatgggtggatatttttcatgcattattatcccagtagctgccattccaagaaaggcataatgctttactcgccttaggttccttttggaatggacactggcgtgttcagctccagtggtcaaagcaccactccctcccgtttagaccttgttcgattgtttccattatagattacatgagattagaaaaaaattatgaaa

SEQ ID NO: 13125 - DNA, 2322 bp, Zea Mays
attctcttcctcatacctcgcgcgttaaaaaacctccttcgtctcctggtctgtgtcccacactcctatccttctcgccttcgactgcccagagcgcccagcgcccgcgacgcttctagaacacgcgacgcgggcgagcgcgctggcgggtgggcgaggcaaaactaaggaggcgggaggggcggcgatgcggggcaggtgacgctgcggcgcggcgtgggggatggtggcggcggagggtgggcccggcggggccgtcgaggagggcgtcggggagagctcgtccccgccgcgcgaggacgccgtcccagcgcccgccggctccggcgggagcgggggcagcggaggcgcccgcgaaatctgtgcccaggtgctcgaccgcctcgtcgccgacggctacgcggaggcgtccgaccccgagttccgcgacaggctcgccgcccatttcggccggctcccgcacagctatcagctggatatcaatgttgacaaagcatccgatgtcttggtccaccagaacgtcttagcggaagcaaaggatcctgataggcgccctgcattctatgtccgtttcttgaggattgaagatatggattcagcatacgactccgatgcatctgaagaaggggatgatgatggtgatgatctctctgtaaggcagggcacaccatatactcacattcatgagatagttttctccacaatcgataagccaaagctccttagtcagctatctgcattgctatctgacattggattgaacatcagagaagcacatgttttctctacccatgatggctattctcttgatgtttttgttgttgatggctggcctgttcaggagtatccatatttttcacttgcccctccggaaatgctgactcacatatttattattaggatgctgatggtttgcacaaagcactggaagcatccattctaagaaatgagggttcatggtctggttcatctcattcctcagccgctgaaagaacactgcccttccaagttaaaggtggtgagtgggaaatcgacaaacgacttctgaagatgggagggatggttgcttctggttcttgtggggacttgtatcacgggacttaccttggtgaggatgtagctgttaaagttataagagctgagcatttgaataagaatgtttggaacgagtttacgcaagaagtatatatactaagagaagttcaacataaaaatgttgtgcgattcattggtgcatgcacaaaaccaccccaattttgcataattacagaatacatgtctggaggaagcctatatgactttgtgcacaagcagcataatgttctaaacctcaggactttattaaagtttgcagttgatgtatgccgagggatgtgctacttgcatgaaaggggtatcatccatagagacttgaagactgcaaaccttctaatggacaaagatcatgttgtgaaagtggctgattttggtgtagctcggttccaggatcaaggaggtgtcatgacagctgaaactggaacatacagatggatggcacctgaggttataaaccatcaaccctatgataacaaagcagatgttttcagctttgctattgtcatctgggagctgataacgtctaagatcccgtatgaaagcatgacccctctccaagcggctgtaggtgtgagacagggattgcgcccaggacttccaaagaagacgcatccaaaggtattggacttgatgcagagatgctgggaagcagacccatctgcccggcctgctttcccagacattttagccgaactggaggatcttttggcacaggttcagggaacaccgggaaagacggcccatgctccatcaaataactcgaacacgaaagattaacccccatgcacacatacctgacgtttttctgaattcagtgatctgccatgtttaggattcgagtcgctaattacgaggaatgtagcatatcgatttttttccctggatggttttgcttgtgtacatttgaacaatcttcttggggcctattttttatggtcacctcattgttcttacataggggaaattggctcgagcgtttgggaggattacgtattatgacaacggctgataatttaccgcctacaacatgggtggatatttttcatgcattattatcccagtagctgccattccaagaaaggcataatgctttactcgccttaggttccttttggaatggacactggcgtgttcagctccagtggtcaaagcaccactccctcccgtttagaccttgttcgattgtttccattatagattacatgagattagaaaaaaattatgaaa

SEQ ID NO: 13126 - DNA, 2250 bp, Zea Mays
attctcttcctcatacctcgcgcgttaaaaaacctccttcgtctcctggtctgtgtcccacactcctatccttctcgccttcgactgcccagagcgcccagcgcccgcgacgcttctagaacacgcgacgcgggcgagcgcgctggcgggtgggcgaggcaaaactaaggaggcgggaggggcggcgatgcggggcaggtgacgctgcggcgcggcgtgggggatggtggcggcggagggtgggcccggcggggccgtcgaggagggcgtcggggagagctcgtccccgccgcgcgaggacgccgtcccagcgcccgccggctccggcgggagcgggggcagcggaggcgcccgcgaaatctgtgcccaggtgctcgaccgcctcgtcgccgacggctacgcggaggcgtccgaccccgagttccgcgacaggctcgccgcccatttcggccggctcccgcacagctatcagctggatatcaatgttgacaaagcatccgatgtcttggtccaccagaacgtcttagcggaagcaaaggatcctgataggcgccctgcattctatgtccgtttcttgaggattgaagatatggattcagcatacgactccgatgcatctgaagaaggggatgatgatggtgatgatctctctgtaaggcagggcacaccatatactcacattcatgagatagttttctccacaatcgataagccaaagctccttagtcagctatctgcattgctatctgacattggattgaacatcagagaagcacatgttttctctacccatgatggctattctcttgatgtttttgttgttgatggctggcctgttcaggatgctgatggtttgcacaaagcactggaagcatccattctaagaaatgagggttcatggtctggttcatctcattcctcagccgctgaaagaacactgcccttccaagttaaaggtggtgagtgggaaatcgacaaacgacttctgaagatgggagggatggttgcttctggttcttgtggggacttgtatcacgggacttaccttggtgaggatgtagctgttaaagttataagagctgagcatttgaataagaatgtttggaacgagtttacgcaagaagtatatatactaagagaagttcaacataaaaatgttgtgcgattcattggtgcatgcacaaaaccaccccaattttgcataattacagaatacatgtctggaggaagcctatatgactttgtgcacaagcagcataatgttctaaacctcaggactttattaaagtttgcagttgatgtatgccgagggatgtgctacttgcatgaaaggggtatcatccatagagacttgaagactgcaaaccttctaatggacaaagatcatgttgtgaaagtggctgattttggtgtagctcggttccaggatcaaggaggtgtcatgacagctgaaactggaacatacagatggatggcacctgaggttataaaccatcaaccctatgataacaaagcagatgttttcagctttgctattgtcatctgggagctgataacgtctaagatcccgtatgaaagcatgacccctctccaagcggctgtaggtgtgagacaggacttccaaagaagacgcatccaaaggtattggacttgatgcagagatgctgggaagcagacccatctgcccggcctgctttcccagacattttagccgaactggaggatcttttggcacaggttcagggaacaccgggaaagacggcccatgctccatcaaataactcgaacacgaaagattaacccccatgcacacatacctgacgtttttctgaattcagtgatctgccatgtttaggattcgagtcgctaattacgaggaatgtagcatatcgatttttttccctggatggttttgcttgtgtacatttgaacaatcttcttggggcctattttttatggtcacctcattgttcttacataggggaaattggctcgagcgtttgggaggattacgtattatgacaacggctgataatttaccgcctacaacatgggtggatatttttcatgcattattatcccagtagctgccattccaagaaaggcataatgctttactcgccttaggttccttttggaatggacactggcgtgttcagctccagtggtcaaagcaccactccctcccgtttagaccttgttcgattgtttccattatagattacatgagattagaaaaaaattatgaaa

SEQ ID NO: 13127 - DNA, 1472 bp, Zea Mays
ctgctccacttaaccaacctaaacaacatcttatggtccacacatcatttgatgctgatggtttgcacaaagcactggaagcatccattctaagaaatgagggttcatggtctggttcatctcattcctcagccgctgaaagaacactgcccttccaagttaaaggtggtgagtgggaaatcgacaaacgacttctgaagatgggagggatggttgcttctggttcttgtggggacttgtatcacgggacttaccttggtgaggatgtagctgttaaagttataagagctgagcatttgaataagaatgtttggaacgagtttacgcaagaagtatatatactaagagaagttcaacataaaaatgttgtgcgattcattggtgcatgcacaaaaccaccccaattttgcataattacagaatacatgtctggaggaagcctatatgactttgtgcacaagcagcataatgttctaaacctcaggactttattaaagtttgcagttgatgtatgccgagggatgtgctacttgcatgaaaggggtatcatccatagagacttgaagactgcaaaccttctaatggacaaagatcatgttgtgaaagtggctgattttggtgtagctcggttccaggatcaaggaggtgtcatgacagctgaaactggaacatacagatggatggcacctgaggttataaaccatcaaccctatgataacaaagcagatgttttcagctttgctattgtcatctgggagctgataacgtctaagatcccgtatgaaagcatgacccctctccaagcggctgtaggtgtgagacagggattgcgcccaggacttccaaagaagacgcatccaaaggtattggacttgatgcagagatgctgggaagcagacccatctgcccggcctgctttcccagacattttagccgaactggaggatcttttggcacaggttcagggaacaccgggaaagacggcccatgctccatcaaataactcgaacacgaaagattaacccccatgcacacatacctgacgtttttctgaattcagtgatctgccatgtttaggattcgagtcgctaattacgaggaatgtagcatatcgatttttttccctggatggttttgcttgtgtacatttgaacaatcttcttggggcctattttttatggtcacctcattgttcttacataggggaaattggctcgagcgtttgggaggattacgtattatgacaacggctgataatttaccgcctacaacatgggtggatatttttcatgcattattatcccagtagctgccattccaagaaaggcataatgctttactcgccttaggttccttttggaatggacactggcgtgttcagctccagtggtcaaagcaccactccctcccgtttagaccttgttcgattgtttccattatagattacatgagattagaaaaaaattatgaaa

SEQ ID NO: 13128 - DNA, 2665 bp, Zea Mays
gccgacatcgccctcaaccatctgccgatatgcgaacctggagagtggttcggacggacgaggaagacggaagtgaggatcctcctctcgctcctcggcaacgataggtcatccttcttggactcctatccctgcacgcgccgtccaactcagccaccgccacggacacggtgtaccccggcaatggcctcgccggcagcagcagcaagctcgtctccaacaacagcaagttcgcgctgggcttcttcaggatggacaacaagtccttcaactacgccaccaacccatacacttacctcggcatctggttcaacaaggtccccaagctaactccgctctggagcgccaacggcgagagcccggtcatggaccctgcctcaccggagctcgccatcgccggcgacgggaacttggtcatcctggaccaggccaccaggtccgtcatctggtctacccatgccaagaccaccaccaacgacaccgtcgccgtgctccagaacaacggcaacctcgtgctccggagctcctccaactcgtccaccgtcttctggcagagcttcgactacccgaccgacaccttcttcgccggagcaaagattggctgggacaaggtaaccggtctgaaccgccgccttgtttcgaggaagaacctgatagatcaggcccctggcctgtacactggggagatacagaagaatggggttggccatctcgtgtggaactcgacagtagaaatcgagtccaccgggctgtggaacggccagtacttcagctcggcgccggagatgataggcaacaccgacaacatcacaactttcgagtatgtcaacaacgataaagaggtgtacttcacatggaatctgcacgacgagacggcgatcgtgctctcgcagctaggtgtcgatggccaaggcatggtgagtctgtggattgacaaggactgggtggtaatgtacaagcagcctgtactccagtgcgatgcctacgcaacgtgcggacaattcacagtctgtgatgagggtgagaacgagggcccaatctgcaactgcatgaagggtttctctgtaagctcacccagggactgggagctgggagaccggagagacgggtgcaagaggaatactccattgcactgtggaaggagccgcaacacagataagttctacgatgtgcaaaaggtcatgttgccccaggacgaaatgaaaattcaggctgcaacaagtgatgaggatgactgctcacgggtttgcttgggtaactgctcgtgcactggatattcctatagggaaggaggttgctctgtctggcatggcaaattgaccaatgtgaagaagcaacaacctgatggaaatggggaaacactttacctacgccttgctgctaaagaggtgccaggggtgccgaggaagaatagtagaatttttcgctttggtgctgccattattggcgcaagcgctgcagctgttgctgccctgatgatccttggtctgatgatgatttggaggagaaaagggaagctgtttacccgcaccgtgggagatgctcaagttggcattgggatcactacgttcagatatgtcgatttgcagcatgcaaccaagaacttctctgaaaagttagggggaggcagtttcggttccgtattcaaggggtacctaagtgactcacttgcactggcagtgaaaaggctcgatggcgccaatcaaggggagaagcaattcagagcagaagtgagctcggttggaatcatccagcacatcaatttagtcaaactgatcgggttctgttgccaaggtgatcagaggttactggtttatgaatacatgccaaatagcgattggagttgccagaggcctggcctacctgcacactggttgtcgggattgcattatacactgcgacatcaagccagagaacatactccttgatgcgtcttttgtaccgaaaattgcagattttggaatggcaaaggtgttggggagggaatttagtgacgcgataactacgatgagaggaactattgggtatcttgcgcctgaatggatcagcggagaagctgtcacatctaaagtggactttacagctatggatcggtcttatttgaaatagtatcagggaggaggaattcgagccaagaacactccaaggatggtgattattcagcatttttcccagtgcaagttgcacgcaagcttctgagcggagacattggcagcctggtggacgcaaatttgcatggtaatgtaaatcttgaggaggttgaaagagtttgcaaagttgcatgctggtgcattcaagatagcgagtttgatcgaccgaccatgaccgaggtggtgcagtttcttgagggtgtttctgagctccacatgcctccggtgccaaggctactcgatgctatcacaggaggagccaccaacaccaaaatctactcaatgctatcactggaggggtcacctacatcagtgtgacatctgtttagctgtccctcaaactaaaatataactcttcagaaaaaatttagctatcccatgagaatatagtaatttatatcatatcatatatatgtaaggacttgggcatttgtggcatgctagtgcatctcgatcaatgtaacctggaggtggtagaaaaacaaatatgtacgccaataaaaagcttgttattt

SEQ ID NO: 13129 - DNA, 4605 bp, Zea Mays
gccgacatcgccctcaaccatctgccgatatgcgaacctggagagtggttcggacggacgaggaagacggaagtgaggatcctcctctcgctcctcggcaacgataggtggggcagctgtctcgtggtctcaccctgccgtagtgcccgtatggggagctcctcctctttcaacgcgtccccagctccacatggcaccgccctcgtccctaacagccgcgctgctaatccacctcctgcgcggcggctccgacctcgcgtccgtcgccgccacgcacgctaagcttgtcaaggccggcatcgcgacccccctctcctcctccaatcatctcctcgccgcctactgccgctacggcgcgattggctgcgcccgcgacctgttcgacggaatgcgggaccgggacgtcgtctcctggacgacgctcatgtccgggtacgccgccgccgcccggccccgggacgccgtgtccctcctccgcgccatggggtgcagcggcgtgcggcctaacgcggtcaccttctcgacggccgcctgcgcgtgcgcgcgcctcgcggacgcagaactcggccggcaggtgcacgcccaagtggagatcgccgggtgcgcacgcgacacagtcgtcgccactgcgctcgttgacatgtacggcaagtccggcggtgtcgaggacgcgcgcgcggtgttcgacgccatggctgcgccagcgaggaacgccgtgtcgtggggcgctatgctggccgtgtacgcgcagaacgctctcgggaacgaggcggtcgagctcttcgcggagctcaggacgtgtggcggtggcatggcgcccaaccacttcatgctggcgagcgtggtgagcgcgtgcgcaggcatggcgcgtctgggcatcggtaggtgcgtccatggcgctgtccttcggcttgggtatggaaacaatgacgtgatttcggtggctttggtcgacatgtactccaagtgcgggcgctacgagtactcaagaaaggtgtttgacaggatcaagcaaccatccgtcgtcacttacacctccatcattgtcgccgcagcaaagtacggccgctggacgtgcgcgcttactttgttcaacgagatggtagatcaagctcctccgctccatgcagagcagatacggcgttgctccgtgccccagccactacacatctgccgttgacatgctgggccgggcagggcggctcgaggaggcattcgagctggccaaggaggcgcagcttgaaggcaacgatgccctcttgctgtggaactccttgctgtcagcttgccggacacataagcgcctagacctagcaaccatggctggccagagggtttatgagttcaataaccagcaggatgtagcagctgggctggtagtgatgtcaaatgcatatatttcagccggtcagatagataatgctgccgctgtgcgatcaagcatgaggctgcgtggcatacggaaggatcccgggtgcagctggattgaagtaaaggataccccccatgtgttctatgctggtgcagtatcatgcgctggtgcatgggcagataaagttctgatgttgctagatgaattggagagtaagatgagggagagaggttacagggggagattagggagtgctagagtatccgatgcacatgaagatgaggaggaagggaaaggtgtgatggttggtgtgcacagtgagattcttgctttagcgtttggtttgctagttgtcccgaatgggatgaccatcagggtgatgaagaacctgaggatgtgcagtgattgccatgaggtgttcaagttcatcagcgccattgttgagagcgagttcgtggtcagggatctgaacaggttccaccatttcaagctggggtcatgttcttgcaatgactactggtgatcccaaattgtaatctcagtggttctgctgttcatagtagaaaagaacaacgttagcatattatcagttattaaaaaatgttgagaaattatcttgctggagatgttcgagtgacttatttttgggtacaactacggaactaccagacattggtcatccttcttggactcctatccctgcacgcgccgtccaactcagccaccgccacggacacggtgtaccccggcaatggcctcgccggcagcagcagcaagctcgtctccaacaacagcaagttcgcgctgggcttcttcaggatggacaacaagtccttcaactacgccaccaacccatacacttacctcggcatctggttcaacaaggtccccaagctaactccgctctggagcgccaacggcgagagcccggtcatggaccctgcctcaccggagctcgccatcgccggcgacgggaacttggtcatcctggaccaggccaccaggtccgtcatctggtctacccatgccaagaccaccaccaacgacaccgtcgccgtgctccagaacaacggcaacctcgtgctccggagctcctccaactcgtccaccgtcttctggcagagcttcgactacccgaccgacaccttcttcgccggagcaaagattggctgggacaaggtaaccggtctgaaccgccgccttgtttcgaggaagaacctgatagatcaggcccctggcctgtacactggggagatacagaagaatggggttggccatctcgtgtggaactcgacagtagaaatcgagtccaccgggctgtggaacggccagtacttcagctcggcgccggagatgataggcaacaccgacaacatcacaactttcgagtatgtcaacaacgataaagaggtgtacttcacatggaatctgcacgacgagacggcgatcgtgctctcgcagctaggtgtcgatggccaaggcatggtgagtctgtggattgacaaggactgggtggtaatgtacaagcagcctgtactccagtgcgatgcctacgcaacgtgcggacaattcacagtctgtgatgagggtgagaacgagggcccaatctgcaactgcatgaagggtttctctgtaagctcacccagggactgggagctgggagaccggagagacgggtgcaagaggaatactccattgcactgtggaaggagccgcaacacagataagttctacgatgtgcaaaaggtcatgttgccccaggacgaaatgaaaattcaggctgcaacaagtgatgaggatgactgctcacgggtttgcttgggtaactgctcgtgcactggatattcctatagggaaggaggttgctctgtctggcatggcaaattgaccaatgtgaagaagcaacaacctgatggaaatggggaaacactttacctacgccttgctgctaaagaggtgccaggggtgccgaggaagaatagtagaatttttcgctttggtgctgccattattggcgcaagcgctgcagctgttgctgccctgatgatccttggtctgatgatgatttggaggagaaaagggaagctgtttacccgcaccgtgggagatgctcaagttggcattgggatcactacgttcagatatgtcgatttgcagcatgcaaccaagaacttctctgaaaagttagggggaggcagtttcggttccgtattcaaggggtacctaagtgactcacttgcactggcagtgaaaaggctcgatggcgccaatcaaggggagaagcaattcagagcagaagtgagctcggttggaatcatccagcacatcaatttagtcaaactgatcgggttctgttgccaaggtgatcagaggttactggtttatgaatacatgccaaatagcgattggagttgccagaggcctggcctacctgcacactggttgtcgggattgcattatacactgcgacatcaagccagagaacatactccttgatgcgtcttttgtaccgaaaattgcagattttggaatggcaaaggtgttggggagggaatttagtgacgcgataactacgatgagaggaactattgggtatcttgcgcctgaatggatcagcggagaagctgtcacatctaaagtggactttacagctatggatcggtcttatttgaaatagtatcagggaggaggaattcgagccaagaacactccaaggatggtgattattcagcatttttcccagtgcaagttgcacgcaagcttctgagcggagacattggcagcctggtggacgcaaatttgcatggtaatgtaaatcttgaggaggttgaaagagtttgcaaagttgcatgctggtgcattcaagatagcgagtttgatcgaccgaccatgaccgaggtggtgcagtttcttgagggtgtttctgagctccacatgcctccggtgccaaggctactcgatgctatcacaggaggagccaccaacaccaaaatctactcaatgctatcactggaggggtcacctacatcagtgtgacatctgtttagctgtccctcaaactaaaatataactcttcagaaaaaatttagctatcccatgagaatatagtaatttatatcatatcatatatatgtaaggacttgggcatttgtggcatgctagtgcatctcgatcaatgtaacctggaggtggtagaaaaacaaatatgtacgccaataaaaagcttgttattt

SEQ ID NO: 13130 - DNA, 2589 bp, Zea Mays
ctgatatctccggtgggagtgggaagcagaggtcatccttcttggactcctatccctgcacgcgccgtccaactcagccaccgccacggacacggtgtaccccggcaatggcctcgccggcagcagcagcaagctcgtctccaacaacagcaagttcgcgctgggcttcttcaggatggacaacaagtccttcaactacgccaccaacccatacacttacctcggcatctggttcaacaaggtccccaagctaactccgctctggagcgccaacggcgagagcccggtcatggaccctgcctcaccggagctcgccatcgccggcgacgggaacttggtcatcctggaccaggccaccaggtccgtcatctggtctacccatgccaagaccaccaccaacgacaccgtcgccgtgctccagaacaacggcaacctcgtgctccggagctcctccaactcgtccaccgtcttctggcagagcttcgactacccgaccgacaccttcttcgccggagcaaagattggctgggacaaggtaaccggtctgaaccgccgccttgtttcgaggaagaacctgatagatcaggcccctggcctgtacactggggagatacagaagaatggggttggccatctcgtgtggaactcgacagtagaaatcgagtccaccgggctgtggaacggccagtacttcagctcggcgccggagatgataggcaacaccgacaacatcacaactttcgagtatgtcaacaacgataaagaggtgtacttcacatggaatctgcacgacgagacggcgatcgtgctctcgcagctaggtgtcgatggccaaggcatggtgagtctgtggattgacaaggactgggtggtaatgtacaagcagcctgtactccagtgcgatgcctacgcaacgtgcggacaattcacagtctgtgatgagggtgagaacgagggcccaatctgcaactgcatgaagggtttctctgtaagctcacccagggactgggagctgggagaccggagagacgggtgcaagaggaatactccattgcactgtggaaggagccgcaacacagataagttctacgatgtgcaaaaggtcatgttgccccaggacgaaatgaaaattcaggctgcaacaagtgatgaggatgactgctcacgggtttgcttgggtaactgctcgtgcactggatattcctatagggaaggaggttgctctgtctggcatggcaaattgaccaatgtgaagaagcaacaacctgatggaaatggggaaacactttacctacgccttgctgctaaagaggtgccaggggtgccgaggaagaatagtagaatttttcgctttggtgctgccattattggcgcaagcgctgcagctgttgctgccctgatgatccttggtctgatgatgatttggaggagaaaagggaagctgtttacccgcaccgtgggagatgctcaagttggcattgggatcactacgttcagatatgtcgatttgcagcatgcaaccaagaacttctctgaaaagttagggggaggcagtttcggttccgtattcaaggggtacctaagtgactcacttgcactggcagtgaaaaggctcgatggcgccaatcaaggggagaagcaattcagagcagaagtgagctcggttggaatcatccagcacatcaatttagtcaaactgatcgggttctgttgccaaggtgatcagaggttactggtttatgaatacatgccaaatagcgattggagttgccagaggcctggcctacctgcacactggttgtcgggattgcattatacactgcgacatcaagccagagaacatactccttgatgcgtcttttgtaccgaaaattgcagattttggaatggcaaaggtgttggggagggaatttagtgacgcgataactacgatgagaggaactattgggtatcttgcgcctgaatggatcagcggagaagctgtcacatctaaagtggactttacagctatggatcggtcttatttgaaatagtatcagggaggaggaattcgagccaagaacactccaaggatggtgattattcagcatttttcccagtgcaagttgcacgcaagcttctgagcggagacattggcagcctggtggacgcaaatttgcatggtaatgtaaatcttgaggaggttgaaagagtttgcaaagttgcatgctggtgcattcaagatagcgagtttgatcgaccgaccatgaccgaggtggtgcagtttcttgagggtgtttctgagctccacatgcctccggtgccaaggctactcgatgctatcacaggaggagccaccaacaccaaaatctactcaatgctatcactggaggggtcacctacatcagtgtgacatctgtttagctgtccctcaaactaaaatataactcttcagaaaaaatttagctatcccatgagaatatagtaatttatatcatatcatatatatgtaaggacttgggcatttgtggcatgctagtgcatctcgatcaatgtaacctggaggtggtagaaaaacaaatatgtacgccaataaaaagcttgttattt

SEQ ID NO: 13131 - DNA, 3012 bp, Zea Mays
tcttcctcggctcctccaccccggtcctctcctgccgcgtcgcgttcgcccctcgcagcgggcaactcccaccgccgccgcttcgcatccgcccatctgcttccatcgtctcacggaggtcgctcacttcgccgccgcccgccccgcctctcccggtgccacggggccctcggccgcgccgtggcgcttaaaccctagatctgtgcctccgcgctggccgcggccgcgtcccgacgccggcacgccgccgatcgccgcacgtcgctcgatcccaggttttgccgctcgagtttagataagttccttcaatgcatcgtgttgggagtgctggtaacacagctggctcgactcgaccgagaaaagagaagcgcttcacatatgtactcaatgatgctgatgataaaaagcattgtgcggggatcaattgcttggcttatctagatggttccatatttagtacaagtgatcatctttttagcgggagccgtgatggtaccttgaaaagatgggaattaaataatggggatgcaagcttctcaggaactttcgagtctcatgttgattgggttaatgatgccattatagttggagacaagcttgtttcctgctcctcagacactacaataaaggtgtggaattgcttctctgatggtgcctgtaccaggactctccgccggcattctgattacgtgatttgtcttgctgctgctgagaataatccaaatctgtggatgcaaaagaggatgaggttcctaatggaaactccgggcctgctttgacaacactgtgcagcataaattctagtagcaatattgcttcctctaatggtcaatcacatgggtacagtccaatagctgccaaaggtcacaaagattcagtttacgcactggcgatgaatgatacaggaacccttcttctctctggtggcactgagaaggttgtccgagtgtgggatccgaggacaggatcgaaaaacatgaaattgagagggcacactgacaatatcagagccttgcttgttgattctacagggaggtattgcctatcgggatcatctgattcaatgataagactatgggatctaggacagcagcgttgtgttcattcttatgctgtgcatactgattctgtttgggcacttgcaagcactcctgcatttggtcatgtctacagtggtggaagagatcaatctgtatacctaacagatttgtccacaagagagagtcttttactctgcacaaatgaataccctgttctacagttgtctctgcaagatgacacaatatgggtggcaacaactgattcttctgtttatggatggccagctgaagggcgcacaccccaaaaagtcttcgaaaagggtgcctcattcttagctgggaatttgtcattctcaagggcaagagcatctttagaaggatcggcacctgtccctgtatacaaagagccatcttttgttatcccaggagttccagcaataattcaacatgaaataatgaataatagaagacatgtactgacaaaggataccactggttcagtcaaattgtgggagatcactcggggtgctgttattgaagattttggcaaggtttctttcgaagacaagaaaaaagagttgtttgagatggtaagcatacctgcttggttcaccatggatgctcgattagggtgcttgtctgtccacctggatactccacaatgcttttctgcagaaatatatgcggttgacctaaatgttgctggagcacaagaagatctcaagattaatttggctcaagagacccttcgtggtttgctaattcattggagtaaaagaaagcagaaatctagttcacacagcttgtgtaatggtgatagttcaatagggaaagatgttccgtcgaaagactcgccccggtcaagacctgaggtcgacgatgccactcaaaaccatgcaactcatgtgcttccatcatttgagttttctacagtttcacctccatcaattatcacggaaggttctagtggagggccatggagaaagagaattaccgatttggatgtaactgagggtgatcttccatggtggtgtgtggactgcattactctcaatcgatatccaaaggagaatacaaaatgcgggttttatttacaccctgctgaaggctcgcctgcaccaaacataactcaagggaagcttagtgctccacggatattgcgaattcacaaggtagctaactatgtggttgagaaactcgttcttgacaaaccattggatggaggctctgatgcgtttgttatgggattgagttctgctcaatcacagctctcagttctagatagttcttcgcggcttggactaaagccatggcaaaaaacaaagccatgtattgagatattgtgcaataaccaggttctatcaccagagatgagtttggctactgtgcgaacatatatatggaaaaagccagaagatttgattcttcattacagagtggtccaaccgagatgatcacggcttcagatcacatggttctcagcatgcctgcaccataaacggtgtggttgaagacacccttggcttagcgaggaaaccgtcagaaatattttgctcttgggctccggtagcctttctcctagaatcccgacttcgtttgcttctttgtaaagttccttcctgatcttgccctggtagtaagatgtatcatagcacaggtataaggccctctgcttgtacatgtagaagatttgggtgcttaataaaggtcaaatggatttttttcgtttttctttgataaagtttgtaagaaaacgggctggttctcggctcagaccgtgacgttccgacgtcgattattggatttaaccctgtcgcatcctcttggttctgttagcgtaagaggtggacgggatgtcgggagcaataaagctgtttttttatatatgttgctgtctttcgactgtgctgttcagctgcgacgaattacaaaggctgtagactcggagatcttgtgaacatttgcaataaag

SEQ ID NO: 13132 - DNA, 2931 bp, Zea Mays
tcttcctcggctcctccaccccggtcctctcctgccgcgtcgcgttcgcccctcgcagcgggcaactcccaccgccgccgcttcgcatccgcccatctgcttccatcgtctcacggaggttttgccgctcgagtttagataagttccttcaatgcatcgtgttgggagtgctggtaacacagctggctcgactcgaccgagaaaagagaagcgcttcacatatgtactcaatgatgctgatgataaaaagcattgtgcggggatcaattgcttggcttatctagatggttccatatttagtacaagtgatcatctttttagcgggagccgtgatggtaccttgaaaagatgggaattaaataatggggatgcaagcttctcaggaactttcgagtctcatgttgattgggttaatgatgccattatagttggagacaagcttgtttcctgctcctcagacactacaataaaggtgtggaattgcttctctgatggtgcctgtaccaggactctccgccggcattctgattacgtgatttgtcttgctgctgctgagaataatagcaatattgtagcctctggtggtcttggtggtgaggttttcatttgggaccttgatgctgctcttgctcctgtagccaaatctgtggatgcaaaagaggatgaggttcctaatggaaactccgggcctgctttgacaacactgtgcagcataaattctagtagcaatattgcttcctctaatggtcaatcacatgggtacagtccaatagctgccaaaggtcacaaagattcagtttacgcactggcgatgaatgatacaggaacccttcttctctctggtggcactgagaaggttgtccgagtgtgggatccgaggacaggatcgaaaaacatgaaattgagagggcacactgacaatatcagagccttgcttgttgattctacagggaggtattgcctatcgggatcatctgattcaatgataagactatgggatctaggacagcagcgttgtgttcattcttatgctgtgcatactgattctgtttgggcacttgcaagcactcctgcatttggtcatgtctacagtggtggaagagatcaatctgtatacctaacagatttgtccacaagagagagtcttttactctgcacaaatgaataccctgttctacagttgtctctgcaagatgacacaatatgggtggcaacaactgattcttctgtttatggatggccagctgaagggcgcacaccccaaaaagtcttcgaaaagggtgcctcattcttagctgggaatttgtcattctcaagggcaagagcatctttagaaggatcggcacctgtccctgtatacaaagagccatcttttgttatcccaggagttccagcaataattcaacatgaaataatgaataatagaagacatgtactgacaaaggataccactggttcagtcaaattgtgggagatcactcggggtgctgttattgaagattttggcaaggtttctttcgaagacaagaaaaaagagttgtttgagatggtaagcatacctgcttggttcaccatggatgctcgattagggtgcttgtctgtccacctggatactccacaatgcttttctgcagaaatatatgcggttgacctaaatgttgctggagcacaagaagatctcaagattaatttggctcaagagacccttcgtggtttgctaattcattggagtaaaagaaagcagaaatctagttcacacagcttgtgtaatggtgatagttcaatagggaaagatgttccgtcgaaagactcgccccggtcaagacctgaggtcgacgatgccactcaaaaccatgcaactcatgtgcttccatcatttgagttttctacagtttcacctccatcaattatcacggaaggttctagtggagggccatggagaaagagaattaccgatttggatgtaactgagggtgatcttccatggtggtgtgtggactgcattactctcaatcgatatccaaaggagaatacaaaatgcgggttttatttacaccctgctgaaggctcgcctgcaccaaacataactcaagggaagcttagtgctccacggatattgcgaattcacaaggtagctaactatgtggttgagaaactcgttcttgacaaaccattggatggaggctctgatgcgtttgttatgggattgagttctgctcaatcacagctctcagttctagatagttcttcgcggcttggactaaagccatggcaaaaaacaaagccatgtattgagatattgtgcaataaccaggttctatcaccagagatgagtttggctactgtgcgaacatatatatggaaaaagccagaagatttgattcttcattacagagtggtccaaccgagatgatcacggcttcagatcacatggttctcagcatgcctgcaccataaacggtgtggttgaagacacccttggcttagcgaggaaaccgtcagaaatattttgctcttgggctccggtagcctttctcctagaatcccgacttcgtttgcttctttgtaaagttccttcctgatcttgccctggtagtaagatgtatcatagcacaggtataaggccctctgcttgtacatgtagaagatttgggtgcttaataaaggtcaaatggatttttttcgtttttctttgataaagtttgtaagaaaacgggctggttctcggctcagaccgtgacgttccgacgtcgattattggatttaaccctgtcgcatcctcttggttctgttagcgtaagaggtggacgggatgtcgggagcaataaagctgtttttttatatatgttgctgtctttcgactgtgctgttcagctgcgacgaattacaaaggctgtagactcggagatcttgtgaacatttgcaataaag

SEQ ID NO: 13133 - DNA, 3607 bp, Zea Mays
gtgagggcgacccggtcattaaaatccccgcacccacctgtcgccttcctcctttctctcctcgcctgctccaccaccacaccgcttgccctccccgatctccgcacgctccggccagcgggacccaacggacagccagccgaacatatcccccctacgctggcgccgtcgcacgcgccgccactaggtgtcacccgtccttgcgccgccgccgcatccttcgactttcgatctgcgagctagcgattctccgctgaggagtggggcccatccctccggagcccaaccccagggcatccgcccgcccccgccgccgtggctcaggccccacgcgtcatccccgcgacggacaacgtagtcacgcaggtggagcgcggtccactcccccccccccccccccccccgcgcttcgcctccgctgagaccgcgccctgctggtgcgagtacccgggagcttccaaaccctagggccgggcatcgagcgagcgagggggtgagcgcggagcccaggcatgccttgccgcccgcggggatccaggcagtgatgcgcggatcggcgcggcgggggcggcccggaagctcggccgcatgaggtgcctcgtcggcggcggcgtccaggacagcccgcgcgcagcggccaaaagagtatcgccggcgtcgtggcggctggacgccgccacagcggaggcggacgcggggagagctgaggccaagggggtcaggttctgcgtcaggccgccggacgtcatggagacggtgcacgaggtggccatttacatccaccgcttccacaacctcgatctgtttcagcaaggatggtatcagatgaagattagtgcaatgtgggaggaaggtggcaacaaaacaccggcttcacctgccagggtcgtgcaatatgaagcttctgatgttggtgcggatgatgcattaggcatttggaaaatagatgacgtcgacaatagcttccacacacagccgtttcggatcaagtatgccagacaagatatctatctgtcagttatggtgtcgttcaacatattcaacattgaagaggagggtccagcagcctcggcggtgatgttgaagtttgagctgatgtatgccccaacactagagaacgggtctgagcttcaagcttctagtgtcacatcttcagcagctgtgcatgaatttaggatcccccacagagcactcctgggtctacactcctactgtccagttcattttgatgcgttccactctgtgcttgttgatctgacattacacatagtgtacctgaaagctggtgcaactaaaccatcattgaaggtaccggaccaaggtttaggtcctacatcatatcatattgtcaaggcattattaacttctagaaagttgttgctggaagaactgaagaaaatcagtggtgctattggtaagacagtagaggaattagatgttgctgacttgaatcttggtagatatgagtcatttaatccatcaaaatctggattaccaaattctagtaaagtgttccctgcaactggcaagggtgtgggacagttgactggagttttacatgatttcttggagaaaaacaacgatatggttaatggtacagatgattctatgctgtatactcttccccaggaagagttgtttgaactatttctaactctgagcggacaacttttcacttatatggaatgcatttttgaaatttcatagggtaaataaaacaaagatattggagtacttgcacgatgcttgggctattgacaggaaggcagaatggtcaatatggactgttcactcaaaaattgagatccctcatcgctatttgcggagtatgaatgatgaatcatctcaccgtcattcacttcttagagtttctggatcaaggaagttccatgacgatcctgcacagaactctgcttcacgggctgaactacaccggaaaagcatagcacaaatgaagatcaatacacaatctgttcaagatatgcatatatatgctgatccttcacatgttcctgttgttcttatagaacaacatgtcatggttgttccacagcatagttccagcaaggatttggcttcgaatgcttctgaacaaaaggatactattgtgctacctaaactacaaggagagcctctggtacccaaaagtagtgttggtaaaaaaagtgggcgcatcttgcgagctgtcatttttgtgcatggttttcagggccaccatttggatttacgtcttgttagaaaccaatggcttctattggaccctggagctgattgcctaatgtctgaggctaatgaagataaaacatctggagacttcaaagaaatgggtagcaggttggccggggaggtaattgccttcctgaagaagaaaatggataagctttctagatatggaggctgcaaagagctgaagttaagttttgtcggccattccatcgggaacatcatcattagaagtgccctggcagaacctgcattgcagccatacttgaagaacctctacacttacatgtcaatatcagggcctcacttgggttactggtacagttcaaattctttgttcaattctggactctggctgctgaaaaagctcaagaatgctcaatgcatccatcaactcactttcagtgatgatcaagacccccacaatacatacttctataagctttgcaagttgaaaacattggagaacttcaaaaatatcatattgttatcatcaccacaggatggctatgtaccatatcactcagcgagaatggagctctgcccagccgcatcatcggacacctcaaagaagggtcaagtcttcacagaaatgctcaacaattgcttggatcagatccgtgcgccctcatctgacacccggacgttcatgcgctgcgatgtgaattttgaccagtccaaccacggacggagcctgaacaccatgattggcagggcagcccacatcgagttccttgagaccgacatctacgccaagttcatcatgtggtccttccctgacctgttccgatgacagacaacgccgctcgtctctgtaatgtctctgtaatactgctgcataccaaacctacaaaccgatagcgcacactactgagtactgaccaggcaaggaaaagtaagcttgcataaaggctcccccagaatccaacaccgccacaggcagagtagcgctgtaaagatcctagaagcaacggtttttccagcttgctagatctgattctgtataaatagttgattctttcgtcattccattcatagtgctgtagatgtgcacctttgctgtgaatttataatcctttgtcggcttgtgtatctaacgcttcggtttaggatgtgctgacaatcagtgagcttatgtccaaataagccccctttcttaatgtttggttttagtcaccttggtctttgtgctgctgtaaatccagggtgttgtttctgtttggtgaaatgactgctacatgaatatctggttctggcatcttgccatagccggatcttgcttctgctaaggttattcctatcagggatatataggattggaaaaaaatatgaaagattttgatttatttgggatttaaactcatggattgggtggtgttgagag

SEQ ID NO: 13134 - DNA, 3583 bp, Zea Mays
gtcattaaaatccccgcacccacctgtcgccttcctcctttctctcctcgcctgctccaccaccacaccgcttgccctccccgatctccgcacgctccggccagcgggacccaacggacagccagccgaacatatcccccctacgctggcgccgtcgcacgcgccgccactaggtgtcacccgtccttgcgccgccgccgcatccttcgactttcgatctgcgagctagcgattctccgctgaggagtggggcccatccctccggagcccaaccccagggcatccgcccgcccccgccgccgtggctcaggccccacgcgtcatccccgcgacggacaacgtagtcacgcaggtggagcgcggtccactcccccccccccccccccccccgcgcttcgcctccgctgagaccgcgccctgctggtgcgagtacccgggagcttccaaaccctagggccgggcatcgagcgagcgagggggtgagcgcggagcccaggcatgccttgccgcccgcggggatccaggcagtgatgcgcggatcggcgcggcgggggcggcccggaagctcggccgcatgaggtgcctcgtcggcggcggcgtccaggacagcccgcgcgcagcggccaaaagagtatcgccggcgtcgtggcggctggacgccgccacagcggaggcggacgcggggagagctgaggccaagggggtcaggttctgcgtcaggccgccggacgtcatggagacggtgcacgaggtggccatttacatccaccgcttccacaacctcgatctgtttcagcaaggatggtatcagatgaagattagtgcaatgtgggaggaaggtggcaacaaaacaccggcttcacctgccagggtcgtgcaatatgaagcttctgatgttggtgcggatgatgcattaggcatttggaaaatagatgacgtcgacaatagcttccacacacagccgtttcggatcaagtatgccagacaagatatctatctgtcagttatggtgtcgttcaacatattcaacattgaagaggagcctcggcggtgatgttgaagtttgagctgatgtatgccccaacactagagaacgggtctgagcttcaagcttctagtgtcacatcttcagcagctgtgcatgaatttaggatcccccacagagcactcctgggtctacactcctactgtccagttcattttgatgcgttccactctgtgcttgttgatctgacattacacatagtgtacctgaaagctggtgcaactaaaccatcattgaaggtaccggaccaaggtttaggtcctacatcatatcatattgtcaaggcattattaacttctagaaagttgttgctggaagaactgaagaaaatcagtggtgctattggtaagacagtagaggaattagatgttgctgacttgaatcttggtagatatgagtcatttaatccatcaaaatctggattaccaaattctagtaaagtgttccctgcaactggcaagggtgtgggacagttgactggagttttacatgatttcttggagaaaaacaacgatatggttaatggtacagatgattctatgctgtatactcttccccaggaagagttgtttgaactatttctaactctgagcggacaacttttcacttatatggaatgcatttttgaaatttcatagggtaaataaaacaaagatattggagtacttgcacgatgcttgggctattgacaggaaggcagaatggtcaatatggactgttcactcaaaaattgagatccctcatcgctatttgcggagtatgaatgatgaatcatctcaccgtcattcacttcttagagtttctggatcaaggaagttccatgacgatcctgcacagaactctgcttcacgggctgaactacaccggaaaagcatagcacaaatgaagatcaatacacaatctgttcaagatatgcatatatatgctgatccttcacatgttcctgttgttcttatagaacaacatgtcatggttgttccacagcatagttccagcaaggatttggcttcgaatgcttctgaacaaaaggatactattgtgctacctaaactacaaggagagcctctggtacccaaaagtagtgttggtaaaaaaagtgggcgcatcttgcgagctgtcatttttgtgcatggttttcagggccaccatttggatttacgtcttgttagaaaccaatggcttctattggaccctggagctgattgcctaatgtctgaggctaatgaagataaaacatctggagacttcaaagaaatgggtagcaggttggccggggaggtaattgccttcctgaagaagaaaatggataagctttctagatatggaggctgcaaagagctgaagttaagttttgtcggccattccatcgggaacatcatcattagaagtgccctggcagaacctgcattgcagccatacttgaagaacctctacacttacatgtcaatatcagggcctcacttgggttactggtacagttcaaattctttgttcaattctggactctggctgctgaaaaagctcaagaatgctcaatgcatccatcaactcactttcagtgatgatcaagacccccacaatacatacttctataagctttgcaagttgaaaacattggagaacttcaaaaatatcatattgttatcatcaccacaggatggctatgtaccatatcactcagcgagaatggagctctgcccagccgcatcatcggacacctcaaagaagggtcaagtcttcacagaaatgctcaacaattgcttggatcagatccgtgcgccctcatctgacacccggacgttcatgcgctgcgatgtgaattttgaccagtccaaccacggacggagcctgaacaccatgattggcagggcagcccacatcgagttccttgagaccgacatctacgccaagttcatcatgtggtccttccctgacctgttccgatgacagacaacgccgctcgtctctgtaatgtctctgtaatactgctgcataccaaacctacaaaccgatagcgcacactactgagtactgaccaggcaaggaaaagtaagcttgcataaaggctcccccagaatccaacaccgccacaggcagagtagcgctgtaaagatcctagaagcaacggtttttccagcttgctagatctgattctgtataaatagttgattctttcgtcattccattcatagtgctgtagatgtgcacctttgctgtgaatttataatcctttgtcggcttgtgtatctaacgcttcggtttaggatgtgctgacaatcagtgagcttatgtccaaataagccccctttcttaatgtttggttttagtcaccttggtctttgtgctgctgtaaatccagggtgttgtttctgtttggtgaaatgactgctacatgaatatctggttctggcatcttgccatagccggatcttgcttctgctaaggttattcctatcagggatatataggattggaaaaaaatatgaaagattttgatttatttgggatttaaactcatggattgggtggtgttgagag

SEQ ID NO: 13135 - DNA, 3470 bp, Zea Mays
gtcattaaaatccccgcacccacctgtcgccttcctcctttctctcctcgcctgctccaccaccacaccgcttgccctccccgatctccgcacgctccggccagcgggacccaacggacagccagccgaacatatcccccctacgctggcgccgtcgcacgcgccgccactaggtgtcacccgtccttgcgccgccgccgcatccttcgactttcgatctgcgagctagcgattctccgctgaggagtggggcccatccctccggagcccaaccccagggcatccgcccgcccccgccgccgtggctcaggccccacgcgtcatccccgcgacggacaacgtagtcacgcaggtggagcgcggtccactcccccccccccccccccccccgcgcttcgcctccgctgagaccgcgccctgctggtgcgagtacccgggagcttccaaaccctagggccgggcatcgagcgagcgagggggtgagcgcggagcccaggcatgccttgccgcccgcggggatccaggcagtgatgcgcggatcggcgcggcgggggcggcccggaagctcggccgcatgaggtgcctcgtcggcggcggcgtccaggacagcccgcgcgcagcggccaaaagagtatcgccggcgtcgtggcggctggacgccgccacagcggaggcggacgcggggagagctgaggccaagggggtcaggttctgcgtcaggccgccggacgtcatggagacggtgcacgaggtggccatttacatccaccgcttccacaacctcgatctgtttcagcaaggatggtatcagatgaagattagtgcaatgtgggaggaaggtggcaacaaaacaccggcttcacctgccagggtcgtgcaatatgaagcttctgatgttggtgcggatgatgcattaggcatttggaaaatagatgacgtcgacaatagcttccacacacagccgtttcggatcaagtatgccagacaagatatctatctgtcagttatggtgtcgttcaacatattcaacattgaagaggagggtccagcagcctcggcggtgatgttgaagtttgagctgatgtatgccccaacactagagaacgggtctgagcttcaagcttctagtgtcacatcttcagcagctgtgcatgaatttaggatcccccacagagcactcctgggtctacactcctactgtccagttcattttgatgcgttccactctgtgcttgttgatctgacattacacatagtgtacctgaaagctggtgcaactaaaccatcattgaaggtaccggaccaaggtttaggtcctacatcatatcatattgtcaaggcattattaacttctagaaagttgttgctggaagaactgaagaaaatcagtggtgctattggtaagacagtagaggaattagatgttgctgacttgaatcttggtagatatgagtcatttaatccatcaaaatctggattaccaaattctagtaaagtgttccctgcaactggcaagggtgtgggacagttgactggagttttacatgatttcttggagaaaaacaacgatatggttaatggtacagatgattctatgctgtatactcttccccaggaagagttgtttgaactatttctaactctgagcggacaacttttcacttatatggaatgcatttttgaaatttcatagggtaaataaaacaaagatattggagtacttgcacgatgcttgggctattgacaggaaggcagaatggtcaatatggactgttcactcaaaaattgagatccctcatcgctatttgcggagtatgaatgatgaatcatctcaccgtcattcacttcttagagtttctggatcaaggaagttccatgacgatcctgcacagaactctgcttcacgggctgaactacaccggaaaagcatagcacaaatgaagaacaacatgtcatggttgttccacagcatagttccagcaaggatttggcttcgaatgcttctgaacaaaaggatactattgtgctacctaaactacaaggagagcctctggtacccaaaagtagtgttgggccaccatttggatttacgtcttgttagaaaccaatggcttctattggaccctggagctgattgcctaatgtctgaggctaatgaagataaaacatctggagacttcaaagaaatgggtagcaggttggccggggaggtaattgccttcctgaagaagaaaatggataagctttctagatatggaggctgcaaagagctgaagttaagttttgtcggccattccatcgggaacatcatcattagaagtgccctggcagaacctgcattgcagccatacttgaagaacctctacacttacatgtcaatatcagggcctcacttgggttactggtacagttcaaattctttgttcaattctggactctggctgctgaaaaagctcaagaatgctcaatgcatccatcaactcactttcagtgatgatcaagacccccacaatacatacttctataagctttgcaagttgaaaacattggagaacttcaaaaatatcatattgttatcatcaccacaggatggctatgtaccatatcactcagcgagaatggagctctgcccagccgcatcatcggacacctcaaagaagggtcaagtcttcacagaaatgctcaacaattgcttggatcagatccgtgcgccctcatctgacacccggacgttcatgcgctgcgatgtgaattttgaccagtccaaccacggacggagcctgaacaccatgattggcagggcagcccacatcgagttccttgagaccgacatctacgccaagttcatcatgtggtccttccctgacctgttccgatgacagacaacgccgctcgtctctgtaatgtctctgtaatactgctgcataccaaacctacaaaccgatagcgcacactactgagtactgaccaggcaaggaaaagtaagcttgcataaaggctcccccagaatccaacaccgccacaggcagagtagcgctgtaaagatcctagaagcaacggtttttccagcttgctagatctgattctgtataaatagttgattctttcgtcattccattcatagtgctgtagatgtgcacctttgctgtgaatttataatcctttgtcggcttgtgtatctaacgcttcggtttaggatgtgctgacaatcagtgagcttatgtccaaataagccccctttcttaatgtttggttttagtcaccttggtctttgtgctgctgtaaatccagggtgttgtttctgtttggtgaaatgactgctacatgaatatctggttctggcatcttgccatagccggatcttgcttctgctaaggttattcctatcagggatatataggattggaaaaaaatatgaaagattttgatttatttgggatttaaactcatggattgggtggtgttgagag

SEQ ID NO: 13136 - DNA, 3665 bp, Zea Mays
gtcattaaaatccccgcacccacctgtcgccttcctcctttctctcctcgcctgctccaccaccacaccgcttgccctccccgatctccgcacgctccggccagcgggacccaacggacagccagccgaacatatcccccctacgctggcgccgtcgcacgcgccgccactaggtgtcacccgtccttgcgccgccgccgcatccttcgactttcgatctgcgagctagcgattctccgctgaggagtggggcccatccctccggagcccaaccccagggcatccgcccgcccccgccgccgtggctcaggccccacgcgtcatccccgcgacggacaacgtagtcacgcaggtggagcgcggtccactcccccccccccccccccccccgcgcttcgcctccgctgagaccgcgccctgctggtgcgagtacccgggagcttccaaaccctagggccgggcatcgagcgagcgagggggtgagcgcggagcccaggcatgccttgccgcccgcggggatccaggcagtgatgcgcggatcggcgcggcgggggcggcccggaagctcggccgcatgaggtgcctcgtcggcggcggcgtccaggacagcccgcgcgcagcggccaaaagagtatcgccggcgtcgtggcggctggacgccgccacagcggaggcggacgcggggagagctgaggccaagggggtcaggttctgcgtcaggccgccggacgtcatggagacggtgcacgaggtggccatttacatccaccgcttccacaacctcgatctgtttcagcaaggatggtatcagatgaagattagtgcaatgtgggaggaaggtggcaacaaaacaccggcttcacctgccagggtcgtgcaatatgaagcttctgatgttggtgcggatgatgcattaggcatttggaaaatagatgacgtcgacaatagcttccacacacagccgtttcggatcaagtatgccagacaagatatctatctgtcagttatggtgtcgttcaacatattcaacattgaagaggagggtccagcagcctcggcggtgatgttgaagtttgagctgatgtatgccccaacactagagaacgggtctgagcttcaagcttctagtgtcacatcttcagcagctgtgcatgaatttaggatcccccacagagcactcctgggtctacactcctactgtccagttcattttgatgcgttccactctgtgcttgttgatctgacattacacatagtgtacctgaaagctggtgcaactaaaccatcattgaaggtacacaggtaccggaccaaggtttaggtcctacatcatatcatattgtcaaggcattattaacttctagaaagttgttgctggaagaactgaagaaaatcagtggtgctattggtaagacagtagaggaattagatgttgctgacttgaatcttggtagatatgagtcatttaatccatcaaaatctggattaccaaattctagtaaagtgttccctgcaactggcaagggtgtgggacagttgactggagttttacatgatttcttggagaaaaacaacgatatggttaatggtacagatgattctatgctgtatactcttccccaggaagagttgtttgaactatttctaactctgagcggacaacttttcacttatatggaatgcatttttgaaatttcatagggtaaataaaacaaagatattggagtacttgcacgatgcttgggctattgacaggaaggcagaatggtcaatatggactgttcactcaaaaattgagatccctcatcgctatttgcggagtatgaatgatgaatcatctcaccgtcattcacttcttagagtttctggatcaaggaagttccatgacgatcctgcacagaactctgcttcacgggctgaactacaccggaaaagcatagcacaaatgaagaacaacatgtcatggttgttccacagcatagttccagcaaggatttggcttcgaatgcttctgaacaaaaggatactattgtgctacctaaactacaaggagagcctctggtacccaaaagtagtgttggtaaaaaaagtgggcgcatcttgcgagctgtcatttttgtgcatggttttcagggccaccatttggatttacgtcttgttagaaaccaatggcttctattggaccctggagctgattgcctaatgtctgaggctaatgaagataaaacatctggagacttcaaagaaatgggtagcaggttggccggggaggtaattgccttcctgaagaagaaaatggataagctttctagatatggaggctgcaaagagctgaagttaagttttgtcggccattccatcgggaacatcatcattagaagtgccctggcagccatacttgaagaacctctacacttacatgtcaatatcagggcctcacttgggttactggtacagttcaaattctttgttcaattctggactctggctgctgaaaaagctcaagaatgctcaatgcatccatcaactcactttcagtgatgatcaagacccccacaatacatacttctataagctttgcaagttgaaaacattggagaacttcaaaaatatcatattgttatcatcaccacaggttattcccttttctcatctcaaatagtaatttacttgtgtacacggaatttgttttgctgcactaaatgatttggccccaatccctatatagtccttattgcatgtcatgacttgcgagcaatgcacatgtttttctttctttcaaggatggctatgtaccatatcactcagcgagaatggagctctgcccagccgcatcatcggacacctcaaagaagggtcaagtcttcacagaaatgctcaacaattgcttggatcagatccgtgcgccctcatctgacacccggacgttcatgcgctgcgatgtgaattttgaccagtccaaccacggacggagcctgaacaccatgattggcagggcagcccacatcgagttccttgagaccgacatctacgccaagttcatcatgtggtccttccctgacctgttccgatgacagacaacgccgctcgtctctgtaatgtctctgtaatactgctgcataccaaacctacaaaccgatagcgcacactactgagtactgaccaggcaaggaaaagtaagcttgcataaaggctcccccagaatccaacaccgccacaggcagagtagcgctgtaaagatcctagaagcaacggtttttccagcttgctagatctgattctgtataaatagttgattctttcgtcattccattcatagtgctgtagatgtgcacctttgctgtgaatttataatcctttgtcggcttgtgtatctaacgcttcggtttaggatgtgctgacaatcagtgagcttatgtccaaataagccccctttcttaatgtttggttttagtcaccttggtctttgtgctgctgtaaatccagggtgttgtttctgtttggtgaaatgactgctacatgaatatctggttctggcatcttgccatagccggatcttgcttctgctaaggttattcctatcagggatatataggattggaaaaaaatatgaaagattttgatttatttgggatttaaactcatggattgggtggtgttgagag

SEQ ID NO: 13137 - DNA, 3500 bp, Zea Mays
ctgtcgccttcctcctttctctcctcgcctgctccaccaccacaccgcttgccctccccgatctccgcacgctccggccagcgggacccaacggacagccagccgaacatatcccccctacgctggcgccgtcgcacgcgccgccactaggtgtcacccgtccttgcgccgccgccgcatccttcgactttcgatctgcgagctagcgattctccgctgaggagtggggcccatccctccggagcccaaccccagggcatccgcccgcccccgccgccgtggctcaggccccacgcgtcatccccgcgacggacaacgtagtcacgcaggtggagcgcggtccactcccccccccccccccccccccgcgcttcgcctccgctgagaccgcgccctgctggtgcgagtacccgggagcttccaaaccctagggccgggcatcgagcgagcgagggggtgagcgcggagcccaggcatgccttgccgcccgcggggatccaggcagtgatgcgcggatcggcgcggcgggggcggcccggaagctcggccgcatgaggtgcctcgtcggcggcggcgtccaggacagcccgcgcgcagcggccaaaagagtatcgccggcgtcgtggcggctggacgccgccacagcggaggcggacgcggggagagctgaggccaagggggtcaggttctgcgtcaggccgccggacgtcatggagacggtgcacgaggtggccatttacatccaccgcttccacaacctcgatctgtttcagcaaggatggtatcagatgaagattagtgcaatgtgggaggaaggtggcaacaaaacaccggcttcacctgccagggtcgtgcaatatgaagcttctgatgttggtgcggatgatgcattaggcatttggaaaatagatgacgtcgacaatagcttccacacacagccgtttcggatcaagtatgccagacaagatatctatctgtcagttatggtgtcgttcaacatattcaacattgaagaggagggtccagcagcctcggcggtgatgttgaagtttgagctgatgtatgccccaacactagagaacgggtctgagcttcaagcttctagtgtcacatcttcagcagctgtgcatgaatttaggatcccccacagagcactcctgggtctacactcctactgtccagttcattttgatgcgttccactctgtgcttgttgatctgacattacacatagtgtacctgaaagctggtgcaactaaaccatcattgaaggtaccggaccaaggtttaggtcctacatcatatcatattgtcaaggcattattaacttctagaaagttgttgctggaagaactgaagaaaatcagtggtgctattggtaagacagtagaggaattagatgttgctgacttgaatcttggtagatatgagtcatttaatccatcaaaatctggattaccaaattctagtaaagtgttccctgcaactggcaagggtgtgggacagttgactggagttttacatgatttcttggagaaaaacaacgatatggttaatggtacagatgattctatgctgtatactcttccccaggaagagttgtttgaactatttctaactctgagcggacaacttttcacttatatggaatgcatttttgaaatttcatagggtaaataaaacaaagatattggagtacttgcacgatgcttgggctattgacaggaaggcagaatggtcaatatggactgttcactcaaaaattgagatccctcatcgctatttgcggagtatgaatgatgaatcatctcaccgtcattcacttcttagagtttctggatcaaggaagttccatgacgatcctgcacagaactctgcttcacgggctgaactacaccggaaaagcatagcacaaatgaagaacaacatgtcatggttgttccacagcatagttccagcaaggatttggcttcgaatgcttctgaacaaaaggatactattgtgctacctaaactacaaggagagcctctggtacccaaaagtagtgttggtaaaaaaagtgggcgcatcttgcgagctgtcatttttgtgcatggttttcagggccaccatttggatttacgtcttgttagaaaccaatggcttctattggaccctggagctgattgcctaatgtctgaggctaatgaagataaaacatctggagacttcaaagaaatgggtagcaggttggccggggaggtaattgccttcctgaagaagaaaatggataagctttctagatatggaggctgcaaagagctgaagttaagttttgtcggccattccatcgggaacatcatcattagaagtgccctggcagaacctgcattgcagccatacttgaagaacctctacacttacatgtcaatatcagggcctcacttgggttactggtacagttcaaattctttgttcaattctggactctggctgctgaaaaagctcaagaatgctcaatgcatccatcaactcactttcagtgatgatcaagacccccacaatacatacttctataagctttgcaagttgaaaacattggagaacttcaaaaatatcatattgttatcatcaccacaggatggctatgtaccatatcactcagcgagaatggagctctgcccagccgcatcatcggacacctcaaagaagggtcaagtcttcacagaaatgctcaacaattgcttggatcagatccgtgcgccctcatctgacacccggacgttcatgcgctgcgatgtgaattttgaccagtccaaccacggacggagcctgaacaccatgattggcagggcagcccacatcgagttccttgagaccgacatctacgccaagttcatcatgtggtccttccctgacctgttccgatgacagacaacgccgctcgtctctgtaatgtctctgtaatactgctgcataccaaacctacaaaccgatagcgcacactactgagtactgaccaggcaaggaaaagtaagcttgcataaaggctcccccagaatccaacaccgccacaggcagagtagcgctgtaaagatcctagaagcaacggtttttccagcttgctagatctgattctgtataaatagttgattctttcgtcattccattcatagtgctgtagatgtgcacctttgctgtgaatttataatcctttgtcggcttgtgtatctaacgcttcggtttaggatgtgctgacaatcagtgagcttatgtccaaataagccccctttcttaatgtttggttttagtcaccttggtctttgtgctgctgtaaatccagggtgttgtttctgtttggtgaaatgactgctacatgaatatctggttctggcatcttgccatagccggatcttgcttctgctaaggttattcctatcagggatatataggattggaaaaaaatatgaaagattttgatttatttgggatttaaactcatggattgggtggtgttgagag

SEQ ID NO: 13138 - DNA, 3523 bp, Zea Mays
gtcgccttcctcctttctctcctcgcctgctccaccaccacaccgcttgccctccccgatctccgcacgctccggccagcgggacccaacggacagccagccgaacatatcccccctacgctggcgccgtcgcacgcgccgccactaggtgtcacccgtccttgcgccgccgccgcatccttcgactttcgatctgcgagctagcgattctccgctgaggagtggggcccatccctccggagcccaaccccagggcatccgcccgcccccgccgccgtggctcaggccccacgcgtcatccccgcgacggacaacgtagtcacgcaggtggagcgcggtccactcccccccccccccccccccccgcgcttcgcctccgctgagaccgcgccctgctggtgcgagtacccgggagcttccaaaccctagggccgggcatcgagcgagcgagggggtgagcgcggagcccaggcatgccttgccgcccgcggggatccaggcagtgatgcgcggatcggcgcggcgggggcggcccggaagctcggccgcatgaggtgcctcgtcggcggcggcgtccaggacagcccgcgcgcagcggccaaaagagtatcgccggcgtcgtggcggctggacgccgccacagcggaggcggacgcggggagagctgaggccaagggggtcaggttctgcgtcaggccgccggacgtcatggagacggtgcacgaggtggccatttacatccaccgcttccacaacctcgatctgtttcagcaaggatggtatcagatgaagattagtgcaatgtgggaggaaggtggcaacaaaacaccggcttcacctgccagggtcgtgcaatatgaagcttctgatgttggtgcggatgatgcattaggcatttggaaaatagatgacgtcgacaatagcttccacacacagccgtttcggatcaagtatgccagacaagatatctatctgtcagttatggtgtcgttcaacatattcaacattgaagaggagggtccagcagcctcggcggtgatgttgaagtttgagctgatgtatgccccaacactagagaacgggtctgagcttcaagcttctagtgtcacatcttcagcagctgtgcatgaatttaggatcccccacagagcactcctgggtctacactcctactgtccagttcattttgatgcgttccactctgtgcttgttgatctgacattacacatagtgtacctgaaagctggtgcaactaaaccatcattgaaggtacacaggtaccggaccaaggtttaggtcctacatcatatcatattgtcaaggcattattaacttctagaaagttgttgctggaagaactgaagaaaatcagtggtgctattggtaagacagtagaggaattagatgttgctgacttgaatcttggtagatatgagtcatttaatccatcaaaatctggattaccaaattctagtaaagtgttccctgcaactggcaagggtgtgggacagttgactggagttttacatgatttcttggagaaaaacaacgatatggttaatggtacagatgattctatgctgtatactcttccccaggaagagttgtttgaactatttctaactctgagcggacaacttttcacttatatggaatgcatttttgaaatttcatagggtaaataaaacaaagatattggagtacttgcacgatgcttgggctattgacaggaaggcagaatggtcaatatggactgttcactcaaaaattgagatccctcatcgctatttgcggagtatgaatgatgaatcatctcaccgtcattcacttcttagagtttctggatcaaggaagttccatgacgatcctgcacagaactctgcttcacgggctgaactacaccggaaaagcatagcacaaatgaagatcaatacacaatctgttcaagatatgcatatatatgctgatccttcacatgttcctgttgttcttatagaacaacatgtcatggttgttccacagcatagttccagcaaggatttggcttcgaatgcttctgaacaaaaggatactattgtgctacctaaactacaaggagagcctctggtacccaaaagtagtgttgggccaccatttggatttacgtcttgttagaaaccaatggcttctattggaccctggagctgattgcctaatgtctgaggctaatgaagataaaacatctggagacttcaaagaaatgggtagcaggttggccggggaggtaattgccttcctgaagaagaaaatggataagctttctagatatggaggctgcaaagagctgaagttaagttttgtcggccattccatcgggaacatcatcattagaagtgccctggcagaacctgcattgcagccatacttgaagaacctctacacttacatgtcaatatcagggcctcacttgggttactggtacagttcaaattctttgttcaattctggactctggctgctgaaaaagctcaagaatgctcaatgcatccatcaactcactttcagtgatgatcaagacccccacaatacatacttctataagctttgcaagttgaaaacattggagaacttcaaaaatatcatattgttatcatcaccacaggatggctatgtaccatatcactcagcgagaatggagctctgcccagccgcatcatcggacacctcaaagaagggtcaagtcttcacagaaatgctcaacaattgcttggatcagatccgtgcgccctcatctgacacccggacgttcatgcgctgcgatgtgaattttgaccagtccaaccacggacggagcctgaacaccatgattggcagggcagcccacatcgagttccttgagaccgacatctacgccaagttcatcatgtggtccttccctgacctgttccgatgacagacaacgccgctcgtctctgtaatgtctctgtaatactgctgcataccaaacctacaaaccgatagcgcacactactgagtactgaccaggcaaggaaaagtaagcttgcataaaggctcccccagaatccaacaccgccacaggcagagtagcgctgtaaagatcctagaagcaacggtttttccagcttgctagatctgattctgtataaatagttgattctttcgtcattccattcatagtgctgtagatgtgcacctttgctgtgaatttataatcctttgtcggcttgtgtatctaacgcttcggtttaggatgtgctgacaatcagtgagcttatgtccaaataagccccctttcttaatgtttggttttagtcaccttggtctttgtgctgctgtaaatccagggtgttgtttctgtttggtgaaatgactgctacatgaatatctggttctggcatcttgccatagccggatcttgcttctgctaaggttattcctatcagggatatataggattggaaaaaaatatgaaagattttgatttatttgggatttaaactcatggattgggtggtgttgagag

SEQ ID NO: 13139 - DNA, 3513 bp, Zea Mays
cgccttcctcctttctctcctcgcctgctccaccaccacaccgcttgccctccccgatctccgcacgctccggccagcgggacccaacggacagccagccgaacatatcccccctacgctggcgccgtcgcacgcgccgccactaggtgtcacccgtccttgcgccgccgccgcatccttcgactttcgatctgcgagctagcgattctccgctgaggagtggggcccatccctccggagcccaaccccagggcatccgcccgcccccgccgccgtggctcaggccccacgcgtcatccccgcgacggacaacgtagtcacgcaggtggagcgcggtccactcccccccccccccccccccccgcgcttcgcctccgctgagaccgcgccctgctggtgcgagtacccgggagcttccaaaccctagggccgggcatcgagcgagcgagggggtgagcgcggagcccaggcatgccttgccgcccgcggggatccaggcagtgatgcgcggatcggcgcggcgggggcggcccggaagctcggccgcatgaggtgcctcgtcggcggcggcgtccaggacagcccgcgcgcagcggccaaaagagtatcgccggcgtcgtggcggctggacgccgccacagcggaggcggacgcggggagagctgaggccaagggggtcaggttctgcgtcaggccgccggacgtcatggagacggtgcacgaggtggccatttacatccaccgcttccacaacctcgatctgtttcagcaaggatggtatcagatgaagattagtgcaatgtgggaggaaggtggcaacaaaacaccggcttcacctgccagggtcgtgcaatatgaagcttctgatgttggtgcggatgatgcattaggcatttggaaaatagatgacgtcgacaatagcttccacacacagccgtttcggatcaagtatgccagacaagatatctatctgtcagttatggtgtcgttcaacatattcaacattgaagaggagggtccagcagcctcggcggtgatgttgaagtttgagctgatgtatgccccaacactagagaacgggtctgagcttcaagcttctagtgtcacatcttcagcagctgtgcatgaatttaggatcccccacagagcactcctgggtctacactcctactgtccagttcattttgatgcgttccactctgtgcttgttgatctgacattacacatagtgtacctgaaagctggtgcaactaaaccatcattgaaggtaccggaccaaggtttaggtcctacatcatatcatattgtcaaggcattattaacttctagaaagttgttgctggaagaactgaagaaaatcagtggtgctattggtaagacagtagaggaattagatgttgctgacttgaatcttggtagatatgagtcatttaatccatcaaaatctggattaccaaattctagtaaagtgttccctgcaactggcaagggtgtgggacagttgactggagttttacatgatttcttggagaaaaacaacgatatggttaatggtacagatgattctatgctgtatactcttccccaggaagagttgtttgaactatttctaactctgagcggacaacttttcacttatatggaatgcatttttgaaatttcatagggtaaataaaacaaagatattggagtacttgcacgatgcttgggctattgacaggaaggcagaatggtcaatatggactgttcactcaaaaattgagatccctcatcgctatttgcggagtatgaatgatgaatcatctcaccgtcattcacttcttagagtttctggatcaaggaagttccatgacgatcctgcacagaactctgcttcacgggctgaactacaccggaaaagcatagcacaaatgaagatcaatacacaatctgttcaagatatgcatatatatgctgatccttcacatgttcctgttgttcttatagaacaacatgtcatggttgttccacagcatagttccagcaaggatttggcttcgaatgcttctgaacaaaaggatactattgtgctacctaaactacaaggagagcctctggtacccaaaagtagtgttgggccaccatttggatttacgtcttgttagaaaccaatggcttctattggaccctggagctgattgcctaatgtctgaggctaatgaagataaaacatctggagacttcaaagaaatgggtagcaggttggccggggaggtaattgccttcctgaagaagaaaatggataagctttctagatatggaggctgcaaagagctgaagttaagttttgtcggccattccatcgggaacatcatcattagaagtgccctggcagaacctgcattgcagccatacttgaagaacctctacacttacatgtcaatatcagggcctcacttgggttactggtacagttcaaattctttgttcaattctggactctggctgctgaaaaagctcaagaatgctcaatgcatccatcaactcactttcagtgatgatcaagacccccacaatacatacttctataagctttgcaagttgaaaacattggagaacttcaaaaatatcatattgttatcatcaccacaggatggctatgtaccatatcactcagcgagaatggagctctgcccagccgcatcatcggacacctcaaagaagggtcaagtcttcacagaaatgctcaacaattgcttggatcagatccgtgcgccctcatctgacacccggacgttcatgcgctgcgatgtgaattttgaccagtccaaccacggacggagcctgaacaccatgattggcagggcagcccacatcgagttccttgagaccgacatctacgccaagttcatcatgtggtccttccctgacctgttccgatgacagacaacgccgctcgtctctgtaatgtctctgtaatactgctgcataccaaacctacaaaccgatagcgcacactactgagtactgaccaggcaaggaaaagtaagcttgcataaaggctcccccagaatccaacaccgccacaggcagagtagcgctgtaaagatcctagaagcaacggtttttccagcttgctagatctgattctgtataaatagttgattctttcgtcattccattcatagtgctgtagatgtgcacctttgctgtgaatttataatcctttgtcggcttgtgtatctaacgcttcggtttaggatgtgctgacaatcagtgagcttatgtccaaataagccccctttcttaatgtttggttttagtcaccttggtctttgtgctgctgtaaatccagggtgttgtttctgtttggtgaaatgactgctacatgaatatctggttctggcatcttgccatagccggatcttgcttctgctaaggttattcctatcagggatatataggattggaaaaaaatatgaaagattttgatttatttgggatttaaactcatggattgggtggtgttgagag

SEQ ID NO: 13140 - DNA, 3539 bp, Zea Mays
tctctcctcgcctgctccaccaccacaccgcttgccctccccgatctccgcacgctccggccagcgggacccaacggacagccagccgaacatatcccccctacgctggcgccgtcgcacgcgccgccactaggtgtcacccgtccttgcgccgccgccgcatccttcgactttcgatctgcgagctagcgattctccgctgaggagtggggcccatccctccggagcccaaccccagggcatccgcccgcccccgccgccgtggctcaggccccacgcgtcatccccgcgacggacaacgtagtcacgcaggtggagcgcggtccactcccccccccccccccccccccgcgcttcgcctccgctgagaccgcgccctgctggtgcgagtacccgggagcttccaaaccctagggccgggcatcgagcgagcgagggggtgagcgcggagcccaggcatgccttgccgcccgcggggatccaggcagtgatgcgcggatcggcgcggcgggggcggcccggaagctcggccgcatgaggtgcctcgtcggcggcggcgtccaggacagcccgcgcgcagcggccaaaagagtatcgccggcgtcgtggcggctggacgccgccacagcggaggcggacgcggggagagctgaggccaagggggtcaggttctgcgtcaggccgccggacgtcatggagacggtgcacgaggtggccatttacatccaccgcttccacaacctcgatctgtttcagcaaggatggtatcagatgaagattagtgcaatgtgggaggaaggtggcaacaaaacaccggcttcacctgccagggtcgtgcaatatgaagcttctgatgttggtgcggatgatgcattaggcatttggaaaatagatgacgtcgacaatagcttccacacacagccgtttcggatcaagtatgccagacaagatatctatctgtcagttatggtgtcgttcaacatattcaacattgaagaggagggtccagcagcctcggcggtgatgttgaagtttgagctgatgtatgccccaacactagagaacgggtctgagcttcaagcttctagtgtcacatcttcagcagctgtgcatgaatttaggatcccccacagagcactcctgggtctacactcctactgtccagttcattttgatgcgttccactctgtgcttgttgatctgacattacacatagtgtacctgaaagctggtgcaactaaaccatcattgaaggtaccggaccaaggtttaggtcctacatcatatcatattgtcaaggcattattaacttctagaaagttgttgctggaagaactgaagaaaatcagtggtgctattggtaagacagtagaggaattagatgttgctgacttgaatcttggtagatatgagtcatttaatccatcaaaatctggattaccaaattctagtaaagtgttccctgcaactggcaagggtgtgggacagttgactggagttttacatgatttcttggagaaaaacaacgatatggttaatggtacagatgattctatgctgtatactcttccccaggaagagttgtttgaactatttctaactctgagcggacaacttttcacttatatggaatgcatttttgaaatttcatagggtaaataaaacaaagatattggagtacttgcacgatgcttgggctattgacaggaaggcagaatggtcaatatggactgttcactcaaaaattgagatccctcatcgctatttgcggagtatgaatgatgaatcatctcaccgtcattcacttcttagagtttctggatcaaggaagttccatgacgatcctgcacagaactctgcttcacgggctgaactacaccggaaaagcatagcacaaatgaagatcaatacacaatctgttcaagatatgcatatatatgctgatccttcacatgttcctgttgttcttatagaacaacatgtcatggttgttccacagcatagttccagcaaggatttggcttcgaatgcttctgaacaaaaggatactattgtgctacctaaactacaaggagagcctctggtacccaaaagtagtgttggtaaaaaaagtgggcgcatcttgcgagctgtcatttttgtgcatggttttcagggccaccatttggatttacgtcttgttagaaaccaatggcttctattggaccctggagctgattgcctaatgtctgaggctaatgaagataaaacatctggagacttcaaagaaatgggtagcaggttggccggggaggtaattgccttcctgaagaagaaaatggataagctttctagatatggaggctgcaaagagctgaagttaagttttgtcggccattccatcgggaacatcatcattagaagtgccctggcagccatacttgaagaacctctacacttacatgtcaatatcagggcctcacttgggttactggtacagttcaaattctttgttcaattctggactctggctgctgaaaaagctcaagaatgctcaatgcatccatcaactcactttcagtgatgatcaagacccccacaatacatacttctataagctttgcaagttgaaaacattggagaacttcaaaaatatcatattgttatcatcaccacaggatggctatgtaccatatcactcagcgagaatggagctctgcccagccgcatcatcggacacctcaaagaagggtcaagtcttcacagaaatgctcaacaattgcttggatcagatccgtgcgccctcatctgacacccggacgttcatgcgctgcgatgtgaattttgaccagtccaaccacggacggagcctgaacaccatgattggcagggcagcccacatcgagttccttgagaccgacatctacgccaagttcatcatgtggtccttccctgacctgttccgatgacagacaacgccgctcgtctctgtaatgtctctgtaatactgctgcataccaaacctacaaaccgatagcgcacactactgagtactgaccaggcaaggaaaagtaagcttgcataaaggctcccccagaatccaacaccgccacaggcagagtagcgctgtaaagatcctagaagcaacggtttttccagcttgctagatctgattctgtataaatagttgattctttcgtcattccattcatagtgctgtagatgtgcacctttgctgtgaatttataatcctttgtcggcttgtgtatctaacgcttcggtttaggatgtgctgacaatcagtgagcttatgtccaaataagccccctttcttaatgtttggttttagtcaccttggtctttgtgctgctgtaaatccagggtgttgtttctgtttggtgaaatgactgctacatgaatatctggttctggcatcttgccatagccggatcttgcttctgctaaggttattcctatcagggatatataggattggaaaaaaatatgaaagattttgatttatttgggatttaaactcatggattgggtggtgttgagag

SEQ ID NO: 13141 - DNA, 3327 bp, Zea Mays
cctgctccaccaccacaccgcttgccctccccgatctccgcacgctccggccagcgggacccaacggacagccagccgaacatatcccccctacgctggcgccgtcgcacgcgccgccactaggtgtcacccgtccttgcgccgccgccgcatccttcgactttcgatctgcgagctagcgattctccgctgaggagtggggcccatccctccggagcccaaccccagggcatccgcccgcccccgccgccgtggctcaggccccacgcgtcatccccgcgacggacaacgtagtcacgcaggtggagcgcggtccactcccccccccccccccccccccgcgcttcgcctccgctgagaccgcgccctgctggtgcgagtacccgggagcttccaaaccctagggccgggcatcgagcgagcgagggggtgagcgcggagcccaggcatgccttgccgcccgcggggatccaggcagtgatgcgcggatcggcgcggcgggggcggcccggaagctcggccgcatgaggtgcctcgtcggcggcggcgtccaggacagcccgcgcgcagcggccaaaagagtatcgccggcgtcgtggcggctggacgccgccacagcggaggcggacgcggggagagctgaggccaagggggtcaggttctgcgtcaggccgccggacgtcatggagacggtgcacgaggtggccatttacatccaccgcttccacaacctcgatctgtttcagcaaggatggtatcagatgaagattagtgcaatgtgggaggaaggtggcaacaaaacaccggcttcacctgccagggtcgtgcaatatgaagcttctgatgttggtgcggatgatgcattaggcatttggaaaatagatgacgtcgacaatagcttccacacacagccgtttcggatcaagtatgccagacaagatatctatctgtcagttatggtgtcgttcaacatattcaacattgaagaggagggtccagcagcctcggcggtgatgttgaagtttgagctgatgtatgccccaacactagagaacgggtctgagcttcaagcttctagtgtcacatcttcagcagctgtgcatgaatttaggatcccccacagagcactcctgggtctacactcctactgtccagttcattttgatgcgttccactctgtgcttgttgatctgacattacacatagtgtacctgaaagctggtgcaactaaaccatcattgaaggtacacaggtaccggaccaaggtttaggtcctacatcatatcatattgtcaaggcattattaacttctagaaagttgttgctggaagaactgaagaaaatcagtggtgctattggtaagacagtagaggaattagatgttgctgacttgaatcttggtagatatgagtcatttaatccatcaaaatctggattaccaaattctagtaaagtgttccctgcaactggcaagggtgtgggacagttgactggagttttacatgatttcttggagaaaaacaacgatatggttaatggtacagatgattctatgctgtatactcttccccaggaagagttgtttgaactatttctaactctgagcggacaacttttcacttatatggaatgcatttttgaaatttcatagggtaaataaaacaaagatattggagtacttgcacgatgcttgggctattgacaggaaggcagaatggtcaatatggactgttcactcaaaaattgagatccctcatcgctatttgcggagtatgaatgatgaatcatctcaccgtcattcacttcttagagtttctggatcaaggaagttccatgacgatcctgcacagaactctgcttcacgggctgaactacaccggaaaagcatagcacaaatgaagaacaacatgtcatggttgttccacagcatagttccagcaaggatttggcttcgaatgcttctgaacaaaaggatactattgtgctacctaaactacaaggagagcctctggtacccaaaagtagtgttgggccaccatttggatttacgtcttgttagaaaccaatggcttctattggaccctggagctgattgcctaatgtctgaggctaatgaagataaaacatctggagacttcaaagaaatgggtagcaggttggccggggaggtaattgccttcctgaagaagaaaatggataagctttctagatatggaggctgcaaagagctgaagttaagttttgtcggccattccatcgggaacatcatcattagaagtgccctggcagccatacttgaagaacctctacacttacatgtcaatatcagggcctcacttgggttactgtgatgatcaagacccccacaatacatacttctataagctttgcaagttgaaaacattggagaacttcaaaaatatcatattgttatcatcaccacaggatggctatgtaccatatcactcagcgagaatggagctctgcccagccgcatcatcggacacctcaaagaagggtcaagtcttcacagaaatgctcaacaattgcttggatcagatccgtgcgccctcatctgacacccggacgttcatgcgctgcgatgtgaattttgaccagtccaaccacggacggagcctgaacaccatgattggcagggcagcccacatcgagttccttgagaccgacatctacgccaagttcatcatgtggtccttccctgacctgttccgatgacagacaacgccgctcgtctctgtaatgtctctgtaatactgctgcataccaaacctacaaaccgatagcgcacactactgagtactgaccaggcaaggaaaagtaagcttgcataaaggctcccccagaatccaacaccgccacaggcagagtagcgctgtaaagatcctagaagcaacggtttttccagcttgctagatctgattctgtataaatagttgattctttcgtcattccattcatagtgctgtagatgtgcacctttgctgtgaatttataatcctttgtcggcttgtgtatctaacgcttcggtttaggatgtgctgacaatcagtgagcttatgtccaaataagccccctttcttaatgtttggttttagtcaccttggtctttgtgctgctgtaaatccagggtgttgtttctgtttggtgaaatgactgctacatgaatatctggttctggcatcttgccatagccggatcttgcttctgctaaggttattcctatcagggatatataggattggaaaaaaatatgaaagattttgatttatttgggatttaaactcatggattgggtggtgttgagag

SEQ ID NO: 13142 - DNA, 3370 bp, Zea Mays
gctccaccaccacaccgcttgccctccccgatctccgcacgctccggccagcgggacccaacggacagccagccgaacatatcccccctacgctggcgccgtcgcacgcgccgccactaggtgtcacccgtccttgcgccgccgccgcatccttcgactttcgatctgcgagctagcgattctccgctgaggagtggggcccatccctccggagcccaaccccagggcatccgcccgcccccgccgccgtggctcaggccccacgcgtcatccccgcgacggacaacgtagtcacgcaggtggagcgcggtccactcccccccccccccccccccccgcgcttcgcctccgctgagaccgcgccctgctggtgcgagtacccgggagcttccaaaccctagggccgggcatcgagcgagcgagggggtgagcgcggagcccaggcatgccttgccgcccgcggggatccaggcagtgatgcgcggatcggcgcggcgggggcggcccggaagctcggccgcatgaggtgcctcgtcggcggcggcgtccaggacagcccgcgcgcagcggccaaaagagtatcgccggcgtcgtggcggctggacgccgccacagcggaggcggacgcggggagagctgaggccaagggggtcaggttctgcgtcaggccgccggacgtcatggagacggtgcacgaggtggccatttacatccaccgcttccacaacctcgatctgtttcagcaaggatggtatcagatgaagattagtgcaatgtgggaggaaggtggcaacaaaacaccggcttcacctgccagggtcgtgcaatatgaagcttctgatgttggtgcggatgatgcattaggcatttggaaaatagatgacgtcgacaatagcttccacacacagccgtttcggatcaagtatgccagacaagatatctatctgtcagttatggtgtcgttcaacatattcaacattgaagaggagggtccagcagcctcggcggtgatgttgaagtttgagctgatgtatgccccaacactagagaacgggtctgagcttcaagcttctagtgtcacatcttcagcagctgtgcatgaatttaggatcccccacagagcactcctgggtctacactcctactgtccagttcattttgatgcgttccactctgtgcttgttgatctgacattacacatagtgtacctgaaagctggtgcaactaaaccatcattgaaggtacacaggtaccggaccaaggtttaggtcctacatcatatcatattgtcaaggcattattaacttctagaaagttgttgctggaagaactgaagaaaatcagtggtgctattgtaaagtgttccctgcaactggcaagggtgtgggacagttgactggagttttacatgatttcttggagaaaaacaacgatatggttaatggtacagatgattctatgctgtatactcttccccaggaagagttgtttgaactatttctaactctgagcggacaacttttcacttatatggaatgcatttttgaaatttcatagggtaaataaaacaaagatattggagtacttgcacgatgcttgggctattgacaggaaggcagaatggtcaatatggactgttcactcaaaaattgagatccctcatcgctatttgcggagtatgaatgatgaatcatctcaccgtcattcacttcttagagtttctggatcaaggaagttccatgacgatcctgcacagaactctgcttcacgggctgaactacaccggaaaagcatagcacaaatgaagatcaatacacaatctgttcaagatatgcatatatatgctgatccttcacatgttcctgttgttcttatagaacaacatgtcatggttgttccacagcatagttccagcaaggatttggcttcgaatgcttctgaacaaaaggatactattgtgctacctaaactacaaggagagcctctggtacccaaaagtagtgttggtaaaaaaagtgggcgcatcttgcgagctgtcatttttgtgcatggttttcagggccaccatttggatttacgtcttgttagaaaccaatggcttctattggaccctggagctgattgcctaatgtctgaggctaatgaagataaaacatctggagacttcaaagaaatgggtagcaggttggccggggaggtaattgccttcctgaagaagaaaatggataagctttctagatatggaggctgcaaagagctgaagttaagttttgtcggccattccatcgggaacatcatcattagaagtgccctggcagaacctgcattgcagccatacttgaagaacctctacacttacatgtcaatatcagggcctcacttgggttactgtgatgatcaagacccccacaatacatacttctataagctttgcaagttgaaaacattggagaacttcaaaaatatcatattgttatcatcaccacaggatggctatgtaccatatcactcagcgagaatggagctctgcccagccgcatcatcggacacctcaaagaagggtcaagtcttcacagaaatgctcaacaattgcttggatcagatccgtgcgccctcatctgacacccggacgttcatgcgctgcgatgtgaattttgaccagtccaaccacggacggagcctgaacaccatgattggcagggcagcccacatcgagttccttgagaccgacatctacgccaagttcatcatgtggtccttccctgacctgttccgatgacagacaacgccgctcgtctctgtaatgtctctgtaatactgctgcataccaaacctacaaaccgatagcgcacactactgagtactgaccaggcaaggaaaagtaagcttgcataaaggctcccccagaatccaacaccgccacaggcagagtagcgctgtaaagatcctagaagcaacggtttttccagcttgctagatctgattctgtataaatagttgattctttcgtcattccattcatagtgctgtagatgtgcacctttgctgtgaatttataatcctttgtcggcttgtgtatctaacgcttcggtttaggatgtgctgacaatcagtgagcttatgtccaaataagccccctttcttaatgtttggttttagtcaccttggtctttgtgctgctgtaaatccagggtgttgtttctgtttggtgaaatgactgctacatgaatatctggttctggcatcttgccatagccggatcttgcttctgctaaggttattcctatcagggatatataggattggaaaaaaatatgaaagattttgatttatttgggatttaaactcatggattgggtggtgttgagag

SEQ ID NO: 13143 - DNA, 3427 bp, Zea Mays
ctccaccaccacaccgcttgccctccccgatctccgcacgctccggccagcgggacccaacggacagccagccgaacatatcccccctacgctggcgccgtcgcacgcgccgccactaggtgtcacccgtccttgcgccgccgccgcatccttcgactttcgatctgcgagctagcgattctccgctgaggagtggggcccatccctccggagcccaaccccagggcatccgcccgcccccgccgccgtggctcaggccccacgcgtcatccccgcgacggacaacgtagtcacgcaggtggagcgcggtccactcccccccccccccccccccccgcgcttcgcctccgctgagaccgcgccctgctggtgcgagtacccgggagcttccaaaccctagggccgggcatcgagcgagcgagggggtgagcgcggagcccaggcatgccttgccgcccgcggggatccaggcagtgatgcgcggatcggcgcggcgggggcggcccggaagctcggccgcatgaggtgcctcgtcggcggcggcgtccaggacagcccgcgcgcagcggccaaaagagtatcgccggcgtcgtggcggctggacgccgccacagcggaggcggacgcggggagagctgaggccaagggggtcaggttctgcgtcaggccgccggacgtcatggagacggtgcacgaggtggccatttacatccaccgcttccacaacctcgatctgtttcagcaaggatggtatcagatgaagattagtgcaatgtgggaggaaggtggcaacaaaacaccggcttcacctgccagggtcgtgcaatatgaagcttctgatgttggtgcggatgatgcattaggcatttggaaaatagatgacgtcgacaatagcttccacacacagccgtttcggatcaagtatgccagacaagatatctatctgtcagttatggtgtcgttcaacatattcaacattgaagaggagggtccagcagcctcggcggtgatgttgaagtttgagctgatgtatgccccaacactagagaacgggtctgagcttcaagcttctagtgtcacatcttcagcagctgtgcatgaatttaggatcccccacagagcactcctgggtctacactcctactgtccagttcattttgatgcgttccactctgtgcttgttgatctgacattacacatagtgtacctgaaagctggtgcaactaaaccatcattgaaggtacacaggtaccggaccaaggtttaggtcctacatcatatcatattgtcaaggcattattaacttctagaaagttgttgctggaagaactgaagaaaatcagtggtgctattgtaaagtgttccctgcaactggcaagggtgtgggacagttgactggagttttacatgatttcttggagaaaaacaacgatatggttaatggtacagatgattctatgctgtatactcttccccaggaagagttgtttgaactatttctaactctgagcggacaacttttcacttatatggaatgcatttttgaaatttcatagggtaaataaaacaaagatattggagtacttgcacgatgcttgggctattgacaggaaggcagaatggtcaatatggactgttcactcaaaaattgagatccctcatcgctatttgcggagtatgaatgatgaatcatctcaccgtcattcacttcttagagtttctggatcaaggaagttccatgacgatcctgcacagaactctgcttcacgggctgaactacaccggaaaagcatagcacaaatgaagatcaatacacaatctgttcaagatatgcatatatatgctgatccttcacatgttcctgttgttcttatagaacaacatgtcatggttgttccacagcatagttccagcaaggatttggcttcgaatgcttctgaacaaaaggatactattgtgctacctaaactacaaggagagcctctggtacccaaaagtagtgttggtaaaaaaagtgggcgcatcttgcgagctgtcatttttgtgcatggttttcagaaaccaatggcttctattggaccctggagctgattgcctaatgtctgaggctaatgaagataaaacatctggagacttcaaagaaatgggtagcaggttggccggggaggtaattgccttcctgaagaagaaaatggataagctttctagatatggaggctgcaaagagctgaagttaagttttgtcggccattccatcgggaacatcatcattagaagtgccctggcagaacctgcattgcagccatacttgaagaacctctacacttacatgtcaatatcagggcctcacttgggttactggtacagttcaaattctttgttcaattctggactctggctgctgaaaaagctcaagaatgctcaatgcatccatcaactcactttcagtgatgatcaagacccccacaatacatacttctataagctttgcaagttgaaaacattggagaacttcaaaaatatcatattgttatcatcaccacaggatggctatgtaccatatcactcagcgagaatggagctctgcccagccgcatcatcggacacctcaaagaagggtcaagtcttcacagaaatgctcaacaattgcttggatcagatccgtgcgccctcatctgacacccggacgttcatgcgctgcgatgtgaattttgaccagtccaaccacggacggagcctgaacaccatgattggcagggcagcccacatcgagttccttgagaccgacatctacgccaagttcatcatgtggtccttccctgacctgttccgatgacagacaacgccgctcgtctctgtaatgtctctgtaatactgctgcataccaaacctacaaaccgatagcgcacactactgagtactgaccaggcaaggaaaagtaagcttgcataaaggctcccccagaatccaacaccgccacaggcagagtagcgctgtaaagatcctagaagcaacggtttttccagcttgctagatctgattctgtataaatagttgattctttcgtcattccattcatagtgctgtagatgtgcacctttgctgtgaatttataatcctttgtcggcttgtgtatctaacgcttcggtttaggatgtgctgacaatcagtgagcttatgtccaaataagccccctttcttaatgtttggttttagtcaccttggtctttgtgctgctgtaaatccagggtgttgtttctgtttggtgaaatgactgctacatgaatatctggttctggcatcttgccatagccggatcttgcttctgctaaggttattcctatcagggatatataggattggaaaaaaatatgaaagattttgatttatttgggatttaaactcatggattgggtggtgttgagag

SEQ ID NO: 13144 - DNA, 3400 bp, Zea Mays
ccaccaccacaccgcttgccctccccgatctccgcacgctccggccagcgggacccaacggacagccagccgaacatatcccccctacgctggcgccgtcgcacgcgccgccactaggtgtcacccgtccttgcgccgccgccgcatccttcgactttcgatctgcgagctagcgattctccgctgaggagtggggcccatccctccggagcccaaccccagggcatccgcccgcccccgccgccgtggctcaggccccacgcgtcatccccgcgacggacaacgtagtcacgcaggtggagcgcggtccactcccccccccccccccccccccgcgcttcgcctccgctgagaccgcgccctgctggtgcgagtacccgggagcttccaaaccctagggccgggcatcgagcgagcgagggggtgagcgcggagcccaggcatgccttgccgcccgcggggatccaggcagtgatgcgcggatcggcgcggcgggggcggcccggaagctcggccgcatgaggtgcctcgtcggcggcggcgtccaggacagcccgcgcgcagcggccaaaagagtatcgccggcgtcgtggcggctggacgccgccacagcggaggcggacgcggggagagctgaggccaagggggtcaggttctgcgtcaggccgccggacgtcatggagacggtgcacgaggtggccatttacatccaccgcttccacaacctcgatctgtttcagcaaggatggtatcagatgaagattagtgcaatgtgggaggaaggtggcaacaaaacaccggcttcacctgccagggtcgtgcaatatgaagcttctgatgttggtgcggatgatgcattaggcatttggaaaatagatgacgtcgacaatagcttccacacacagccgtttcggatcaagtatgccagacaagatatctatctgtcagttatggtgtcgttcaacatattcaacattgaagaggagggtccagcagcctcggcggtgatgttgaagtttgagctgatgtatgccccaacactagagaacgggtctgagcttcaagcttctagtgtcacatcttcagcagctgtgcatgaatttaggatcccccacagagcactcctgggtctacactcctactgtccagttcattttgatgcgttccactctgtgcttgttgatctgacattacacatagtgtacctgaaagctggtgcaactaaaccatcattgaaggtaccggaccaaggtttaggtcctacatcatatcatattgtcaaggcattattaacttctagaaagttgttgctggaagaactgaagaaaatcagtggtgctattggtaagacagtagaggaattagatgttgctgacttgaatcttggtagatatgagtcatttaatccatcaaaatctggattaccaaattctagtaaagtgttccctgcaactggcaagggtgtgggacagttgactggagttttacatgatttcttggagaaaaacaacgatatggttaatggtacagatgattctatgctgtatactcttccccaggaagagttgtttgaactatttctaactctgagcggacaacttttcacttatatggaatgcatttttgaaatttcatagggtaaataaaacaaagatattggagtacttgcacgatgcttgggctattgacaggaaggcagaatggtcaatatggactgttcactcaaaaattgagatccctcatcgctatttgcggagtatgaatgatgaatcatctcaccgtcattcacttcttagagtttctggatcaaggaagttccatgacgatcctgcacagaactctgcttcacgggctgaactacaccggaaaagcatagcacaaatgaagaacaacatgtcatggttgttccacagcatagttccagcaaggatttggcttcgaatgcttctgaacaaaaggatactattgtgctacctaaactacaaggagagcctctggtacccaaaagtagtgttgggccaccatttggatttacgtcttgttagaaaccaatggcttctattggaccctggagctgattgcctaatgtctgaggctaatgaagataaaacatctggagacttcaaagaaatgggtagcaggttggccggggaggtaattgccttcctgaagaagaaaatggataagctttctagatatggaggctgcaaagagctgaagttaagttttgtcggccattccatcgggaacatcatcattagaagtgccctggcagccatacttgaagaacctctacacttacatgtcaatatcagggcctcacttgggttactggtacagttcaaattctttgttcaattctggactctggctgctgaaaaagctcaagaatgctcaatgcatccatcaactcactttcagtgatgatcaagacccccacaatacatacttctataagctttgcaagttgaaaacattggagaacttcaaaaatatcatattgttatcatcaccacaggatggctatgtaccatatcactcagcgagaatggagctctgcccagccgcatcatcggacacctcaaagaagggtcaagtcttcacagaaatgctcaacaattgcttggatcagatccgtgcgccctcatctgacacccggacgttcatgcgctgcgatgtgaattttgaccagtccaaccacggacggagcctgaacaccatgattggcagggcagcccacatcgagttccttgagaccgacatctacgccaagttcatcatgtggtccttccctgacctgttccgatgacagacaacgccgctcgtctctgtaatgtctctgtaatactgctgcataccaaacctacaaaccgatagcgcacactactgagtactgaccaggcaaggaaaagtaagcttgcataaaggctcccccagaatccaacaccgccacaggcagagtagcgctgtaaagatcctagaagcaacggtttttccagcttgctagatctgattctgtataaatagttgattctttcgtcattccattcatagtgctgtagatgtgcacctttgctgtgaatttataatcctttgtcggcttgtgtatctaacgcttcggtttaggatgtgctgacaatcagtgagcttatgtccaaataagccccctttcttaatgtttggttttagtcaccttggtctttgtgctgctgtaaatccagggtgttgtttctgtttggtgaaatgactgctacatgaatatctggttctggcatcttgccatagccggatcttgcttctgctaaggttattcctatcagggatatataggattggaaaaaaatatgaaagattttgatttatttgggatttaaactcatggattgggtggtgttgagag

SEQ ID NO: 13145 - DNA, 3413 bp, Zea Mays
caccaccacaccgcttgccctccccgatctccgcacgctccggccagcgggacccaacggacagccagccgaacatatcccccctacgctggcgccgtcgcacgcgccgccactaggtgtcacccgtccttgcgccgccgccgcatccttcgactttcgatctgcgagctagcgattctccgctgaggagtggggcccatccctccggagcccaaccccagggcatccgcccgcccccgccgccgtggctcaggccccacgcgtcatccccgcgacggacaacgtagtcacgcaggtggagcgcggtccactcccccccccccccccccccccgcgcttcgcctccgctgagaccgcgccctgctggtgcgagtacccgggagcttccaaaccctagggccgggcatcgagcgagcgagggggtgagcgcggagcccaggcatgccttgccgcccgcggggatccaggcagtgatgcgcggatcggcgcggcgggggcggcccggaagctcggccgcatgaggtgcctcgtcggcggcggcgtccaggacagcccgcgcgcagcggccaaaagagtatcgccggcgtcgtggcggctggacgccgccacagcggaggcggacgcggggagagctgaggccaagggggtcaggttctgcgtcaggccgccggacgtcatggagacggtgcacgaggtggccatttacatccaccgcttccacaacctcgatctgtttcagcaaggatggtatcagatgaagattagtgcaatgtgggaggaaggtggcaacaaaacaccggcttcacctgccagggtcgtgcaatatgaagcttctgatgttggtgcggatgatgcattaggcatttggaaaatagatgacgtcgacaatagcttccacacacagccgtttcggatcaagtatgccagacaagatatctatctgtcagttatggtgtcgttcaacatattcaacattgaagaggagggtccagcagcctcggcggtgatgttgaagtttgagctgatgtatgccccaacactagagaacgggtctgagcttcaagcttctagtgtcacatcttcagcagctgtgcatgaatttaggatcccccacagagcactcctgggtctacactcctactgtccagttcattttgatgcgttccactctgtgcttgttgatctgacattacacatagtgtacctgaaagctggtgcaactaaaccatcattgaaggtaccggaccaaggtttaggtcctacatcatatcatattgtcaaggcattattaacttctagaaagttgttgctggaagaactgaagaaaatcagtggtgctattggtaagacagtagaggaattagatgttgctgacttgaatcttggtagatatgagtcatttaatccatcaaaatctggattaccaaattctagtaaagtgttccctgcaactggcaagggtgtgggacagttgactggagttttacatgatttcttggagaaaaacaacgatatggttaatggtacagatgattctatgctggtaaataaaacaaagatattggagtacttgcacgatgcttgggctattgacaggaaggcagaatggtcaatatggactgttcactcaaaaattgagatccctcatcgctatttgcggagtatgaatgatgaatcatctcaccgtcattcacttcttagagtttctggatcaaggaagttccatgacgatcctgcacagaactctgcttcacgggctgaactacaccggaaaagcatagcacaaatgaagatcaatacacaatctgttcaagatatgcatatatatgctgatccttcacatgttcctgttgttcttatagaacaacatgtcatggttgttccacagcatagttccagcaaggatttggcttcgaatgcttctgaacaaaaggatactattgtgctacctaaactacaaggagagcctctggtacccaaaagtagtgttggtaaaaaaagtgggcgcatcttgcgagctgtcatttttgtgcatggttttcagaaaccaatggcttctattggaccctggagctgattgcctaatgtctgaggctaatgaagataaaacatctggagacttcaaagaaatgggtagcaggttggccggggaggtaattgccttcctgaagaagaaaatggataagctttctagatatggaggctgcaaagagctgaagttaagttttgtcggccattccatcgggaacatcatcattagaagtgccctggcagaacctgcattgcagccatacttgaagaacctctacacttacatgtcaatatcagggcctcacttgggttactggtacagttcaaattctttgttcaattctggactctggctgctgaaaaagctcaagaatgctcaatgcatccatcaactcactttcagtgatgatcaagacccccacaatacatacttctataagctttgcaagttgaaaacattggagaacttcaaaaatatcatattgttatcatcaccacaggatggctatgtaccatatcactcagcgagaatggagctctgcccagccgcatcatcggacacctcaaagaagggtcaagtcttcacagaaatgctcaacaattgcttggatcagatccgtgcgccctcatctgacacccggacgttcatgcgctgcgatgtgaattttgaccagtccaaccacggacggagcctgaacaccatgattggcagggcagcccacatcgagttccttgagaccgacatctacgccaagttcatcatgtggtccttccctgacctgttccgatgacagacaacgccgctcgtctctgtaatgtctctgtaatactgctgcataccaaacctacaaaccgatagcgcacactactgagtactgaccaggcaaggaaaagtaagcttgcataaaggctcccccagaatccaacaccgccacaggcagagtagcgctgtaaagatcctagaagcaacggtttttccagcttgctagatctgattctgtataaatagttgattctttcgtcattccattcatagtgctgtagatgtgcacctttgctgtgaatttataatcctttgtcggcttgtgtatctaacgcttcggtttaggatgtgctgacaatcagtgagcttatgtccaaataagccccctttcttaatgtttggttttagtcaccttggtctttgtgctgctgtaaatccagggtgttgtttctgtttggtgaaatgactgctacatgaatatctggttctggcatcttgccatagccggatcttgcttctgctaaggttattcctatcagggatatataggattggaaaaaaatatgaaagattttgatttatttgggatttaaactcatggattgggtggtgttgagag

SEQ ID NO: 13146 - DNA, 3232 bp, Zea Mays
caccaccacaccgcttgccctccccgatctccgcacgctccggccagcgggacccaacggacagccagccgaacatatcccccctacgctggcgccgtcgcacgcgccgccactaggtgtcacccgtccttgcgccgccgccgcatccttcgactttcgatctgcgagctagcgattctccgctgaggagtggggcccatccctccggagcccaaccccagggcatccgcccgcccccgccgccgtggctcaggccccacgcgtcatccccgcgacggacaacgtagtcacgcaggtggagcgcggtccactcccccccccccccccccccccgcgcttcgcctccgctgagaccgcgccctgctggtgcgagtacccgggagcttccaaaccctagggccgggcatcgagcgagcgagggggtgagcgcggagcccaggcatgccttgccgcccgcggggatccaggcagtgatgcgcggatcggcgcggcgggggcggcccggaagctcggccgcatgaggtgcctcgtcggcggcggcgtccaggacagcccgcgcgcagcggccaaaagagtatcgccggcgtcgtggcggctggacgccgccacagcggaggcggacgcggggagagctgaggccaagggggtcaggttctgcgtcaggccgccggacgtcatggagacggtgcacgaggtggccatttacatccaccgcttccacaacctcgatctgtttcagcaaggatggtatcagatgaagattagtgcaatgtgggaggaaggtggcaacaaaacaccggcttcacctgccagggtcgtgcaatatgaagcttctgatgttggtgcggatgatgcattaggcatttggaaaatagatgacgtcgacaatagcttccacacacagccgtttcggatcaagtatgccagacaagatatctatctgtcagttatggtgtcgttcaacatattcaacattgaagaggagggtccagcagcctcggcggtgatgttgaagtttgagctgatgtatgccccaacactagagaacgggtctgagcttcaagcttctagtgtcacatcttcagcagctgtgcatgaatttaggatcccccacagagcactcctgggtctacactcctactgtccagttcattttgatgcgttccactctgtgcttgttgatctgacattacacatagtgtacctgaaagctggtgcaactaaaccatcattgaaggtaccggaccaaggtttaggtcctacatcatatcatattgtcaaggcattattaacttctagaaagttgttgctggaagaactgaagaaaatcagtggtgctattggtaagacagtagaggaattagatgttgctgacttgaatcttggtagatatgagtcatttaatccatcaaaatctggattaccaaattctagtaaagtgttccctgcaactggcaagggtgtgggacagttgactggagttttacatgatttcttggagaaaaacaacgatatggttaatggtacagatgattctatgctggtaaataaaacaaagatattggagtacttgcacgatgcttgggctattgacaggaaggcagaatggtcaatatggactgttcactcaaaaattgagatccctcatcgctatttgcggagtatgaatgatgaatcatctcaccgtcattcacttcttagagtttctggatcaaggaagttccatgacgatcctgcacagaactctgcttcacgggctgaactacaccggaaaagcatagcacaaatgaagaacaacatgtcatggttgttccacagcatagttccagcaaggatttggcttcgaatgcttctgaacaaaaggatactattgtgctacctaaactacaaggagagcctctggtacccaaaagtagtgttgggccaccatttggatttacgtcttgttagaaaccaatggcttctattggaccctggagctgattgcctaatgtctgaggctaatgaagataaaacatctggagacttcaaagaaatgggtagcaggttggccggggaggtaattgccttcctgaagaagaaaatggataagctttctagatatggaggctgcaaagagctgaagttaagttttgtcggccattccatcgggaacatcatcattagaagtgccctggcagaacctgcattgcagccatacttgaagaacctctacacttacatgtcaatatcagggcctcacttgggttactgtgatgatcaagacccccacaatacatacttctataagctttgcaagttgaaaacattggagaacttcaaaaatatcatattgttatcatcaccacaggatggctatgtaccatatcactcagcgagaatggagctctgcccagccgcatcatcggacacctcaaagaagggtcaagtcttcacagaaatgctcaacaattgcttggatcagatccgtgcgccctcatctgacacccggacgttcatgcgctgcgatgtgaattttgaccagtccaaccacggacggagcctgaacaccatgattggcagggcagcccacatcgagttccttgagaccgacatctacgccaagttcatcatgtggtccttccctgacctgttccgatgacagacaacgccgctcgtctctgtaatgtctctgtaatactgctgcataccaaacctacaaaccgatagcgcacactactgagtactgaccaggcaaggaaaagtaagcttgcataaaggctcccccagaatccaacaccgccacaggcagagtagcgctgtaaagatcctagaagcaacggtttttccagcttgctagatctgattctgtataaatagttgattctttcgtcattccattcatagtgctgtagatgtgcacctttgctgtgaatttataatcctttgtcggcttgtgtatctaacgcttcggtttaggatgtgctgacaatcagtgagcttatgtccaaataagccccctttcttaatgtttggttttagtcaccttggtctttgtgctgctgtaaatccagggtgttgtttctgtttggtgaaatgactgctacatgaatatctggttctggcatcttgccatagccggatcttgcttctgctaaggttattcctatcagggatatataggattggaaaaaaatatgaaagattttgatttatttgggatttaaactcatggattgggtggtgttgagag

SEQ ID NO: 13147 - DNA, 3499 bp, Zea Mays
acaccgcttgccctccccgatctccgcacgctccggccagcgggacccaacggacagccagccgaacatatcccccctacgctggcgccgtcgcacgcgccgccactaggtgtcacccgtccttgcgccgccgccgcatccttcgactttcgatctgcgagctagcgattctccgctgaggagtggggcccatccctccggagcccaaccccagggcatccgcccgcccccgccgccgtggctcaggccccacgcgtcatccccgcgacggacaacgtagtcacgcaggtggagcgcggtccactcccccccccccccccccccccgcgcttcgcctccgctgagaccgcgccctgctggtgcgagtacccgggagcttccaaaccctagggccgggcatcgagcgagcgagggggtgagcgcggagcccaggcatgccttgccgcccgcggggatccaggcagtgatgcgcggatcggcgcggcgggggcggcccggaagctcggccgcatgaggtgcctcgtcggcggcggcgtccaggacagcccgcgcgcagcggccaaaagagtatcgccggcgtcgtggcggctggacgccgccacagcggaggcggacgcggggagagctgaggccaagggggtcaggttctgcgtcaggccgccggacgtcatggagacggtgcacgaggtggccatttacatccaccgcttccacaacctcgatctgtttcagcaaggatggtatcagatgaagattagtgcaatgtgggaggaaggtggcaacaaaacaccggcttcacctgccagggtcgtgcaatatgaaggcatttggaaaatagatgacgtcgacaatagcttccacacacagccgtttcggatcaagtatgccagacaagatatctatctgtcagttatggtgtcgttcaacatattcaacattgaagaggagggtccagcagcctcggcggtgatgttgaagtttgagctgatgtatgccccaacactagagaacgggtctgagcttcaagcttctagtgtcacatcttcagcagctgtgcatgaatttaggatcccccacagagcactcctgggtctacactcctactgtccagttcattttgatgcgttccactctgtgcttgttgatctgacattacacatagtgtacctgaaagctggtgcaactaaaccatcattgaaggtaccggaccaaggtttaggtcctacatcatatcatattgtcaaggcattattaacttctagaaagttgttgctggaagaactgaagaaaatcagtggtgctattggtaagacagtagaggaattagatgttgctgacttgaatcttggtagatatgagtcatttaatccatcaaaatctggattaccaaattctagtaaagtgttccctgcaactggcaagggtgtgggacagttgactggagttttacatgatttcttggagaaaaacaacgatatggttaatggtacagatgattctatgctgtatactcttccccaggaagagttgtttgaactatttctaactctgagcggacaacttttcacttatatggaatgcatttttgaaatttcatagggtaaataaaacaaagatattggagtacttgcacgatgcttgggctattgacaggaaggcagaatggtcaatatggactgttcactcaaaaattgagatccctcatcgctatttgcggagtatgaatgatgaatcatctcaccgtcattcacttcttagagtttctggatcaaggaagttccatgacgatcctgcacagaactctgcttcacgggctgaactacaccggaaaagcatagcacaaatgaagatcaatacacaatctgttcaagatatgcatatatatgctgatccttcacatgttcctgttgttcttatagaacaacatgtcatggttgttccacagcatagttccagcaaggatttggcttcgaatgcttctgaacaaaaggatactattgtgctacctaaactacaaggagagcctctggtacccaaaagtagtgttggtaaaaaaagtgggcgcatcttgcgagctgtcatttttgtgcatggttttcagggccaccatttggatttacgtcttgttagaaaccaatggcttctattggaccctggagctgattgcctaatgtctgaggctaatgaagataaaacatctggagacttcaaagaaatgggtagcaggttggccggggaggtaattgccttcctgaagaagaaaatggataagctttctagatatggaggctgcaaagagctgaagttaagttttgtcggccattccatcgggaacatcatcattagaagtgccctggcagaacctgcattgcagccatacttgaagaacctctacacttacatgtcaatatcagggcctcacttgggttactggtacagttcaaattctttgttcaattctggactctggctgctgaaaaagctcaagaatgctcaatgcatccatcaactcactttcagtgatgatcaagacccccacaatacatacttctataagctttgcaagttgaaaacattggagaacttcaaaaatatcatattgttatcatcaccacaggatggctatgtaccatatcactcagcgagaatggagctctgcccagccgcatcatcggacacctcaaagaagggtcaagtcttcacagaaatgctcaacaattgcttggatcagatccgtgcgccctcatctgacacccggacgttcatgcgctgcgatgtgaattttgaccagtccaaccacggacggagcctgaacaccatgattggcagggcagcccacatcgagttccttgagaccgacatctacgccaagttcatcatgtggtccttccctgacctgttccgatgacagacaacgccgctcgtctctgtaatgtctctgtaatactgctgcataccaaacctacaaaccgatagcgcacactactgagtactgaccaggcaaggaaaagtaagcttgcataaaggctcccccagaatccaacaccgccacaggcagagtagcgctgtaaagatcctagaagcaacggtttttccagcttgctagatctgattctgtataaatagttgattctttcgtcattccattcatagtgctgtagatgtgcacctttgctgtgaatttataatcctttgtcggcttgtgtatctaacgcttcggtttaggatgtgctgacaatcagtgagcttatgtccaaataagccccctttcttaatgtttggttttagtcaccttggtctttgtgctgctgtaaatccagggtgttgtttctgtttggtgaaatgactgctacatgaatatctggttctggcatcttgccatagccggatcttgcttctgctaaggttattcctatcagggatatataggattggaaaaaaatatgaaagattttgatttatttgggatttaaactcatggattgggtggtgttgagag

SEQ ID NO: 13148 - DNA, 3212 bp, Zea Mays
cttgccctccccgatctccgcacgctccggccagcgggacccaacggacagccagccgaacatatcccccctacgctggcgccgtcgcacgcgccgccactaggtgtcacccgtccttgcgccgccgccgcatccttcgactttcgatctgcgagctagcgattctccgctgaggagtggggcccatccctccggagcccaaccccagggcatccgcccgcccccgccgccgtggctcaggccccacgcgtcatccccgcgacggacaacgtagtcacgcaggtggagcgcggtccactcccccccccccccccccccccgcgcttcgcctccgctgagaccgcgccctgctggtgcgagtacccgggagcttccaaaccctagggccgggcatcgagcgagcgagggggtgagcgcggagcccaggcatgccttgccgcccgcggggatccaggcagtgatgcgcggatcggcgcggcgggggcggcccggaagctcggccgcatgaggtgcctcgtcggcggcggcgtccaggacagcccgcgcgcagcggccaaaagagtatcgccggcgtcgtggcggctggacgccgccacagcggaggcggacgcggggagagctgaggccaagggggtcaggttctgcgtcaggccgccggacgtcatggagacggtgcacgaggtggccatttacatccaccgcttccacaacctcgatctgtttcagcaaggatggtatcagatgaagattagtgcaatgtgggaggaaggtggcaacaaaacaccggcttcacctgccagggtcgtgcaatatgaagcttctgatgttggtgcggatgatgcattaggcatttggaaaatagatgacgtcgacaatagcttccacacacagccgtttcggatcaagtatgccagacaagatatctatctgtcagttatggtgtcgttcaacatattcaacattgaagaggagcagcctcggcggtgatgttgaagtttgagctgatgtatgccccaacactagagaacgggtctgagcttcaagcttctagtgtcacatcttcagcagctgtgcatgaatttaggatcccccacagagcactcctgggtctacactcctactgtccagttcattttgatgcgttccactctgtgcttgttgatctgacattacacatagtgtacctgaaagctggtgcaactaaaccatcattgaaggtaccggaccaaggtttaggtcctacatcatatcatattgtcaaggcattattaacttctagaaagttgttgctggaagaactgaagaaaatcagtggtgctattggtaagacagtagaggaattagatgttgctgacttgaatcttggtagatatgagtcatttaatccatcaaaatctggattaccaaattctagtaaagtgttccctgcaactggcaagggtgtgggacagttgactggagttttacatgatttcttggagaaaaacaacgatatggttaatggtacagatgattctatgctggtaaataaaacaaagatattggagtacttgcacgatgcttgggctattgacaggaaggcagaatggtcaatatggactgttcactcaaaaattgagatccctcatcgctatttgcggagtatgaatgatgaatcatctcaccgtcattcacttcttagagtttctggatcaaggaagttccatgacgatcctgcacagaactctgcttcacgggctgaactacaccggaaaagcatagcacaaatgaagaacaacatgtcatggttgttccacagcatagttccagcaaggatttggcttcgaatgcttctgaacaaaaggatactattgtgctacctaaactacaaggagagcctctggtacccaaaagtagtgttgggccaccatttggatttacgtcttgttagaaaccaatggcttctattggaccctggagctgattgcctaatgtctgaggctaatgaagataaaacatctggagacttcaaagaaatgggtagcaggttggccggggaggtaattgccttcctgaagaagaaaatggataagctttctagatatggaggctgcaaagagctgaagttaagttttgtcggccattccatcgggaacatcatcattagaagtgccctggcagaacctgcattgcagccatacttgaagaacctctacacttacatgtcaatatcagggcctcacttgggttactgtgatgatcaagacccccacaatacatacttctataagctttgcaagttgaaaacattggagaacttcaaaaatatcatattgttatcatcaccacaggatggctatgtaccatatcactcagcgagaatggagctctgcccagccgcatcatcggacacctcaaagaagggtcaagtcttcacagaaatgctcaacaattgcttggatcagatccgtgcgccctcatctgacacccggacgttcatgcgctgcgatgtgaattttgaccagtccaaccacggacggagcctgaacaccatgattggcagggcagcccacatcgagttccttgagaccgacatctacgccaagttcatcatgtggtccttccctgacctgttccgatgacagacaacgccgctcgtctctgtaatgtctctgtaatactgctgcataccaaacctacaaaccgatagcgcacactactgagtactgaccaggcaaggaaaagtaagcttgcataaaggctcccccagaatccaacaccgccacaggcagagtagcgctgtaaagatcctagaagcaacggtttttccagcttgctagatctgattctgtataaatagttgattctttcgtcattccattcatagtgctgtagatgtgcacctttgctgtgaatttataatcctttgtcggcttgtgtatctaacgcttcggtttaggatgtgctgacaatcagtgagcttatgtccaaataagccccctttcttaatgtttggttttagtcaccttggtctttgtgctgctgtaaatccagggtgttgtttctgtttggtgaaatgactgctacatgaatatctggttctggcatcttgccatagccggatcttgcttctgctaaggttattcctatcagggatatataggattggaaaaaaatatgaaagattttgatttatttgggatttaaactcatggattgggtggtgttgagag

SEQ ID NO: 13149 - DNA, 3515 bp, Zea Mays
cttgccctccccgatctccgcacgctccggccagcgggacccaacggacagccagccgaacatatcccccctacgctggcgccgtcgcacgcgccgccactaggtgtcacccgtccttgcgccgccgccgcatccttcgactttcgatctgcgagctagcgattctccgctgaggagtggggcccatccctccggagcccaaccccagggcatccgcccgcccccgccgccgtggctcaggccccacgcgtcatccccgcgacggacaacgtagtcacgcaggtggagcgcggtccactcccccccccccccccccccccgcgcttcgcctccgctgagaccgcgccctgctggtgcgagtacccgggagcttccaaaccctagggccgggcatcgagcgagcgagggggtgagcgcggagcccaggcatgccttgccgcccgcggggatccaggcagtgatgcgcggatcggcgcggcgggggcggcccggaagctcggccgcatgaggtgcctcgtcggcggcggcgtccaggacagcccgcgcgcagcggccaaaagagtatcgccggcgtcgtggcggctggacgccgccacagcggaggcggacgcggggagagctgaggccaagggggtcaggttctgcgtcaggccgccggacgtcatggagacggtgcacgaggtggccatttacatccaccgcttccacaacctcgatctgtttcagcaaggatggtatcagatgaagattagtgcaatgtgggaggaaggtggcaacaaaacaccggcttcacctgccagggtcgtgcaatatgaaggtggattgtgcagcttctgatgttggtgcggatgatgcattaggcatttggaaaatagatgacgtcgacaatagcttccacacacagccgtttcggatcaagtatgccagacaagatatctatctgtcagttatggtgtcgttcaacatattcaacattgaagaggagcagcctcggcggtgatgttgaagtttgagctgatgtatgccccaacactagagaacgggtctgagcttcaagcttctagtgtcacatcttcagcagctgtgcatgaatttaggatcccccacagagcactcctgggtctacactcctactgtccagttcattttgatgcgttccactctgtgcttgttgatctgacattacacatagtgtacctgaaagctggtgcaactaaaccatcattgaaggtaccggaccaaggtttaggtcctacatcatatcatattgtcaaggcattattaacttctagaaagttgttgctggaagaactgaagaaaatcagtggtgctattggtaagacagtagaggaattagatgttgctgacttgaatcttggtagatatgagtcatttaatccatcaaaatctggattaccaaattctagtaaagtgttccctgcaactggcaagggtgtgggacagttgactggagttttacatgatttcttggagaaaaacaacgatatggttaatggtacagatgattctatgctgtatactcttccccaggaagagttgtttgaactatttctaactctgagcggacaacttttcacttatatggaatgcatttttgaaatttcatagggtaaataaaacaaagatattggagtacttgcacgatgcttgggctattgacaggaaggcagaatggtcaatatggactgttcactcaaaaattgagatccctcatcgctatttgcggagtatgaatgatgaatcatctcaccgtcattcacttcttagagtttctggatcaaggaagttccatgacgatcctgcacagaactctgcttcacgggctgaactacaccggaaaagcatagcacaaatgaagatcaatacacaatctgttcaagatatgcatatatatgctgatccttcacatgttcctgttgttcttatagaacaacatgtcatggttgttccacagcatagttccagcaaggatttggcttcgaatgcttctgaacaaaaggatactattgtgctacctaaactacaaggagagcctctggtacccaaaagtagtgttggtaaaaaaagtgggcgcatcttgcgagctgtcatttttgtgcatggttttcagggccaccatttggatttacgtcttgttagaaaccaatggcttctattggaccctggagctgattgcctaatgtctgaggctaatgaagataaaacatctggagacttcaaagaaatgggtagcaggttggccggggaggtaattgccttcctgaagaagaaaatggataagctttctagatatggaggctgcaaagagctgaagttaagttttgtcggccattccatcgggaacatcatcattagaagtgccctggcagccatacttgaagaacctctacacttacatgtcaatatcagggcctcacttgggttactggtacagttcaaattctttgttcaattctggactctggctgctgaaaaagctcaagaatgctcaatgcatccatcaactcactttcagtgatgatcaagacccccacaatacatacttctataagctttgcaagttgaaaacattggagaacttcaaaaatatcatattgttatcatcaccacaggatggctatgtaccatatcactcagcgagaatggagctctgcccagccgcatcatcggacacctcaaagaagggtcaagtcttcacagaaatgctcaacaattgcttggatcagatccgtgcgccctcatctgacacccggacgttcatgcgctgcgatgtgaattttgaccagtccaaccacggacggagcctgaacaccatgattggcagggcagcccacatcgagttccttgagaccgacatctacgccaagttcatcatgtggtccttccctgacctgttccgatgacagacaacgccgctcgtctctgtaatgtctctgtaatactgctgcataccaaacctacaaaccgatagcgcacactactgagtactgaccaggcaaggaaaagtaagcttgcataaaggctcccccagaatccaacaccgccacaggcagagtagcgctgtaaagatcctagaagcaacggtttttccagcttgctagatctgattctgtataaatagttgattctttcgtcattccattcatagtgctgtagatgtgcacctttgctgtgaatttataatcctttgtcggcttgtgtatctaacgcttcggtttaggatgtgctgacaatcagtgagcttatgtccaaataagccccctttcttaatgtttggttttagtcaccttggtctttgtgctgctgtaaatccagggtgttgtttctgtttggtgaaatgactgctacatgaatatctggttctggcatcttgccatagccggatcttgcttctgctaaggttattcctatcagggatatataggattggaaaaaaatatgaaagattttgatttatttgggatttaaactcatggattgggtggtgttgagag

SEQ ID NO: 13150 - DNA, 3445 bp, Zea Mays
tacgctggcgccgtcgcacgcgccgccactaggtgtcacccgtccttgcgccgccgccgcatccttcgactttcgatctgcgagctagcgattctccgctgaggagtggggcccatccctccggagcccaaccccagggcatccgcccgcccccgccgccgtggctcaggccccacgcgtcatccccgcgacggacaacgtagtcacgcaggtggagcgcggtccactcccccccccccccccccccccgcgcttcgcctccgctgagaccgcgccctgctggtgcgagtacccgggagcttccaaaccctagggccgggcatcgagcgagcgagggggtgagcgcggagcccaggcatgccttgccgcccgcggggatccaggcagtgatgcgcggatcggcgcggcgggggcggcccggaagctcggccgcatgaggtgcctcgtcggcggcggcgtccaggacagcccgcgcgcagcggccaaaagagtatcgccggcgtcgtggcggctggacgccgccacagcggaggcggacgcggggagagctgaggccaagggggtcaggttctgcgtcaggccgccggacgtcatggagacggtgcacgaggtggccatttacatccaccgcttccacaacctcgatctgtttcagcaaggatggtatcagatgaagattagtgcaatgtgggaggaaggtggcaacaaaacaccggcttcacctgccagggtcgtgcaatatgaagcttctgatgttggtgcggatgatgcattaggcatttggaaaatagatgacgtcgacaatagcttccacacacagccgtttcggatcaagtatgccagacaagatatctatctgtcagttatggtgtcgttcaacatattcaacattgaagaggagcagcctcggcggtgatgttgaagtttgagctgatgtatgccccaacactagagaacgggtctgagcttcaagcttctagtgtcacatcttcagcagctgtgcatgaatttaggatcccccacagagcactcctgggtctacactcctactgtccagttcattttgatgcgttccactctgtgcttgttgatctgacattacacatagtgtacctgaaagctggtgcaactaaaccatcattgaaggtaccggaccaaggtttaggtcctacatcatatcatattgtcaaggcattattaacttctagaaagttgttgctggaagaactgaagaaaatcagtggtgctattggtaagacagtagaggaattagatgttgctgacttgaatcttggtagatatgagtcatttaatccatcaaaatctggattaccaaattctagtaaagtgttccctgcaactggcaagggtgtgggacagttgactggagttttacatgatttcttggagaaaaacaacgatatggttaatggtacagatgattctatgctgtatactcttccccaggaagagttgtttgaactatttctaactctgagcggacaacttttcacttatatggaatgcatttttgaaatttcatagggtaaataaaacaaagatattggagtacttgcacgatgcttgggctattgacaggaaggcagaatggtcaatatggactgttcactcaaaaattgagatccctcatcgctatttgcggagtatgaatgatgaatcatctcaccgtcattcacttcttagagtttctggatcaaggaagttccatgacgatcctgcacagaactctgcttcacgggctgaactacaccggaaaagcatagcacaaatgaagatcaatacacaatctgttcaagatatgcatatatatgctgatccttcacatgttcctgttgttcttatagaacaacatgtcatggttgttccacagcatagttccagcaaggatttggcttcgaatgcttctgaacaaaaggatactattgtgctacctaaactacaaggagagcctctggtacccaaaagtagtgttggtaaaaaaagtgggcgcatcttgcgagctgtcatttttgtgcatggttttcagggccaccatttggatttacgtcttgttagaaaccaatggcttctattggaccctggagctgattgcctaatgtctgaggctaatgaagataaaacatctggagacttcaaagaaatgggtagcaggttggccggggaggtaattgccttcctgaagaagaaaatggataagctttctagatatggaggctgcaaagagctgaagttaagttttgtcggccattccatcgggaacatcatcattagaagtgccctggcagaacctgcattgcagccatacttgaagaacctctacacttacatgtcaatatcagggcctcacttgggttactggtacagttcaaattctttgttcaattctggactctggctgctgaaaaagctcaagaatgctcaatgcatccatcaactcactttcagtgatgatcaagacccccacaatacatacttctataagctttgcaagttgaaaacattggagaacttcaaaaatatcatattgttatcatcaccacaggatggctatgtaccatatcactcagcgagaatggagctctgcccagccgcatcatcggacacctcaaagaagggtcaagtcttcacagaaatgctcaacaattgcttggatcagatccgtgcgccctcatctgacacccggacgttcatgcgctgcgatgtgaattttgaccagtccaaccacggacggagcctgaacaccatgattggcagggcagcccacatcgagttccttgagaccgacatctacgccaagttcatcatgtggtccttccctgacctgttccgatgacagacaacgccgctcgtctctgtaatgtctctgtaatactgctgcataccaaacctacaaaccgatagcgcacactactgagtactgaccaggcaaggaaaagtaagcttgcataaaggctcccccagaatccaacaccgccacaggcagagtagcgctgtaaagatcctagaagcaacggtttttccagcttgctagatctgattctgtataaatagttgattctttcgtcattccattcatagtgctgtagatgtgcacctttgctgtgaatttataatcctttgtcggcttgtgtatctaacgcttcggtttaggatgtgctgacaatcagtgagcttatgtccaaataagccccctttcttaatgtttggttttagtcaccttggtctttgtgctgctgtaaatccagggtgttgtttctgtttggtgaaatgactgctacatgaatatctggttctggcatcttgccatagccggatcttgcttctgctaaggttattcctatcagggatatataggattggaaaaaaatatgaaagattttgatttatttgggatttaaactcatggattgggtggtgttgagag

SEQ ID NO: 13151 - DNA, 3392 bp, Zea Mays
tacgctggcgccgtcgcacgcgccgccactaggtgtcacccgtccttgcgccgccgccgcatccttcgactttcgatctgcgagctagcgattctccgctgaggagtggggcccatccctccggagcccaaccccagggcatccgcccgcccccgccgccgtggctcaggccccacgcgtcatccccgcgacggacaacgtagtcacgcaggtggagcgcggtccactcccccccccccccccccccccgcgcttcgcctccgctgagaccgcgccctgctggtgcgagtacccgggagcttccaaaccctagggccgggcatcgagcgagcgagggggtgagcgcggagcccaggcatgccttgccgcccgcggggatccaggcagtgatgcgcggatcggcgcggcgggggcggcccggaagctcggccgcatgaggtgcctcgtcggcggcggcgtccaggacagcccgcgcgcagcggccaaaagagtatcgccggcgtcgtggcggctggacgccgccacagcggaggcggacgcggggagagctgaggccaagggggtcaggttctgcgtcaggccgccggacgtcatggagacggtgcacgaggtggccatttacatccaccgcttccacaacctcgatctgtttcagcaaggatggtatcagatgaagattagtgcaatgtgggaggaaggtggcaacaaaacaccggcttcacctgccagggtcgtgcaatatgaagcttctgatgttggtgcggatgatgcattaggcatttggaaaatagatgacgtcgacaatagcttccacacacagccgtttcggatcaagtatgccagacaagatatctatctgtcagttatggtgtcgttcaacatattcaacattgaagaggagcagcctcggcggtgatgttgaagtttgagctgatgtatgccccaacactagagaacgggtctgagcttcaagcttctagtgtcacatcttcagcagctgtgcatgaatttaggatcccccacagagcactcctgggtctacactcctactgtccagttcattttgatgcgttccactctgtgcttgttgatctgacattacacatagtgtacctgaaagctggtgcaactaaaccatcattgaaggtaccggaccaaggtttaggtcctacatcatatcatattgtcaaggcattattaacttctagaaagttgttgctggaagaactgaagaaaatcagtggtgctattggtaagacagtagaggaattagatgttgctgacttgaatcttggtagatatgagtcatttaatccatcaaaatctggattaccaaattctagtaaagtgttccctgcaactggcaagggtgtgggacagttgactggagttttacatgatttcttggagaaaaacaacgatatggttaatggtacagatgattctatgctgtatactcttccccaggaagagttgtttgaactatttctaactctgagcggacaacttttcacttatatggaatgcatttttgaaatttcatagggtaaataaaacaaagatattggagtacttgcacgatgcttgggctattgacaggaaggcagaatggtcaatatggactgttcactcaaaaattgagatccctcatcgctatttgcggagtatgaatgatgaatcatctcaccgtcattcacttcttagagtttctggatcaaggaagttccatgacgatcctgcacagaactctgcttcacgggctgaactacaccggaaaagcatagcacaaatgaagatcaatacacaatctgttcaagatatgcatatatatgctgatccttcacatgttcctgttgttcttatagaacaacatgtcatggttgttccacagcatagttccagcaaggatttggcttcgaatgcttctgaacaaaaggatactattgtgctacctaaactacaaggagagcctctggtacccaaaagtagtgttgggccaccatttggatttacgtcttgttagaaaccaatggcttctattggaccctggagctgattgcctaatgtctgaggctaatgaagataaaacatctggagacttcaaagaaatgggtagcaggttggccggggaggtaattgccttcctgaagaagaaaatggataagctttctagatatggaggctgcaaagagctgaagttaagttttgtcggccattccatcgggaacatcatcattagaagtgccctggcagaacctgcattgcagccatacttgaagaacctctacacttacatgtcaatatcagggcctcacttgggttactggtacagttcaaattctttgttcaattctggactctggctgctgaaaaagctcaagaatgctcaatgcatccatcaactcactttcagtgatgatcaagacccccacaatacatacttctataagctttgcaagttgaaaacattggagaacttcaaaaatatcatattgttatcatcaccacaggatggctatgtaccatatcactcagcgagaatggagctctgcccagccgcatcatcggacacctcaaagaagggtcaagtcttcacagaaatgctcaacaattgcttggatcagatccgtgcgccctcatctgacacccggacgttcatgcgctgcgatgtgaattttgaccagtccaaccacggacggagcctgaacaccatgattggcagggcagcccacatcgagttccttgagaccgacatctacgccaagttcatcatgtggtccttccctgacctgttccgatgacagacaacgccgctcgtctctgtaatgtctctgtaatactgctgcataccaaacctacaaaccgatagcgcacactactgagtactgaccaggcaaggaaaagtaagcttgcataaaggctcccccagaatccaacaccgccacaggcagagtagcgctgtaaagatcctagaagcaacggtttttccagcttgctagatctgattctgtataaatagttgattctttcgtcattccattcatagtgctgtagatgtgcacctttgctgtgaatttataatcctttgtcggcttgtgtatctaacgcttcggtttaggatgtgctgacaatcagtgagcttatgtccaaataagccccctttcttaatgtttggttttagtcaccttggtctttgtgctgctgtaaatccagggtgttgtttctgtttggtgaaatgactgctacatgaatatctggttctggcatcttgccatagccggatcttgcttctgctaaggttattcctatcagggatatataggattggaaaaaaatatgaaagattttgatttatttgggatttaaactcatggattgggtggtgttgagag

SEQ ID NO: 13152 - DNA, 3314 bp, Zea Mays
cacgcgccgccactaggtgtcacccgtccttgcgccgccgccgcatccttcgactttcgatctgcgagctagcgattctccgctgaggagtggggcccatccctccggagcccaaccccagggcatccgcccgcccccgccgccgtggctcaggccccacgcgtcatccccgcgacggacaacgtagtcacgcaggtggagcgcggtccactcccccccccccccccccccccgcgcttcgcctccgctgagaccgcgccctgctggtgcgagtacccgggagcttccaaaccctagggccgggcatcgagcgagcgagggggtgagcgcggagcccaggcatgccttgccgcccgcggggatccaggcagtgatgcgcggatcggcgcggcgggggcggcccggaagctcggccgcatgaggtgcctcgtcggcggcggcgtccaggacagcccgcgcgcagcggccaaaagagtatcgccggcgtcgtggcggctggacgccgccacagcggaggcggacgcggggagagctgaggccaagggggtcaggttctgcgtcaggccgccggacgtcatggagacggtgcacgaggtggccatttacatccaccgcttccacaacctcgatctgtttcagcaaggatggtatcagatgaagattagtgcaatgtgggaggaaggtggcaacaaaacaccggcttcacctgccagggtcgtgcaatatgaagcttctgatgttggtgcggatgatgcattaggcatttggaaaatagatgacgtcgacaatagcttccacacacagccgtttcggatcaagtatgccagacaagatatctatctgtcagttatggtgtcgttcaacatattcaacattgaagaggagcagcctcggcggtgatgttgaagtttgagctgatgtatgccccaacactagagaacgggtctgagcttcaagcttctagtgtcacatcttcagcagctgtgcatgaatttaggatcccccacagagcactcctgggtctacactcctactgtccagttcattttgatgcgttccactctgtgcttgttgatctgacattacacatagtgtacctgaaagctggtgcaactaaaccatcattgaaggtacacaggtaccggaccaaggtttaggtcctacatcatatcatattgtcaaggcattattaacttctagaaagttgttgctggaagaactgaagaaaatcagtggtgctattggtaagacagtagaggaattagatgttgctgacttgaatcttggtagatatgagtcatttaatccatcaaaatctggattaccaaattctagtaaagtgttccctgcaactggcaagggtgtgggacagttgactggagttttacatgatttcttggagaaaaacaacgatatggttaatggtacagatgattctatgctgtatactcttccccaggaagagttgtttgaactatttctaactctgagcggacaacttttcacttatatggaatgcatttttgaaatttcatagggtaaataaaacaaagatattggagtacttgcacgatgcttgggctattgacaggaaggcagaatggtcaatatggactgttcactcaaaaattgagatccctcatcgctatttgcggagtatgaatgatgaatcatctcaccgtcattcacttcttagagtttctggatcaaggaagttccatgacgatcctgcacagaactctgcttcacgggctgaactacaccggaaaagcatagcacaaatgaagaacaacatgtcatggttgttccacagcatagttccagcaaggatttggcttcgaatgcttctgaacaaaaggatactattgtgctacctaaactacaaggagagcctctggtacccaaaagtagtgttgggccaccatttggatttacgtcttgttagaaaccaatggcttctattggaccctggagctgattgcctaatgtctgaggctaatgaagataaaacatctggagacttcaaagaaatgggtagcaggttggccggggaggtaattgccttcctgaagaagaaaatggataagctttctagatatggaggctgcaaagagctgaagttaagttttgtcggccattccatcgggaacatcatcattagaagtgccctggcagaacctgcattgcagccatacttgaagaacctctacacttacatgtcaatatcagggcctcacttgggttactggtacagttcaaattctttgttcaattctggactctggctgctgaaaaagctcaagaatgctcaatgcatccatcaactcactttcagtgatgatcaagacccccacaatacatacttctataagctttgcaagttgaaaacattggagaacttcaaaaatatcatattgttatcatcaccacaggatggctatgtaccatatcactcagcgagaatggagctctgcccagccgcatcatcggacacctcaaagaagggtcaagtcttcacagaaatgctcaacaattgcttggatcagatccgtgcgccctcatctgacacccggacgttcatgcgctgcgatgtgaattttgaccagtccaaccacggacggagcctgaacaccatgattggcagggcagcccacatcgagttccttgagaccgacatctacgccaagttcatcatgtggtccttccctgacctgttccgatgacagacaacgccgctcgtctctgtaatgtctctgtaatactgctgcataccaaacctacaaaccgatagcgcacactactgagtactgaccaggcaaggaaaagtaagcttgcataaaggctcccccagaatccaacaccgccacaggcagagtagcgctgtaaagatcctagaagcaacggtttttccagcttgctagatctgattctgtataaatagttgattctttcgtcattccattcatagtgctgtagatgtgcacctttgctgtgaatttataatcctttgtcggcttgtgtatctaacgcttcggtttaggatgtgctgacaatcagtgagcttatgtccaaataagccccctttcttaatgtttggttttagtcaccttggtctttgtgctgctgtaaatccagggtgttgtttctgtttggtgaaatgactgctacatgaatatctggttctggcatcttgccatagccggatcttgcttctgctaaggttattcctatcagggatatataggattggaaaaaaatatgaaagattttgatttatttgggatttaaactcatggattgggtggtgttgagag

SEQ ID NO: 13153 - DNA, 2894 bp, Zea Mays
attacttagagcatatctaacaatgtatgtataattgtctgtattcctttcaatgttacctcaatagtagtcaaaatgtgcaagcccaaggatacatttccattttgtgataaagtggtgatgatgaactacggaaaagtgaaaacacaactaaacttctgatgttggtgcggatgatgcattaggcatttggaaaatagatgacgtcgacaatagcttccacacacagccgtttcggatcaagtatgccagacaagatatctatctgtcagttatggtgtcgttcaacatattcaacattgaagaggaggttggcattttgacatatcacctttgatttgaattaacattactatagctttattaaagcctgctatatttgttcaagggtccagcagcctcggcggtgatgttgaagtttgagctgatgtatgccccaacactagagaacgggtctgagcttcaagcttctagtgtcacatcttcagcagctgtgcatgaatttaggatcccccacagagcactcctgggtctacactcctactgtccagttcattttgatgcgttccactctgtgcttgttgatctgacattacacatagtgtacctgaaagctggtgcaactaaaccatcattgaaggtacacaggtaccggaccaaggtttaggtcctacatcatatcatattgtcaaggcattattaacttctagaaagttgttgctggaagaactgaagaaaatcagtggtgctattggtaagacagtagaggaattagatgttgctgacttgaatcttggtagatatgagtcatttaatccatcaaaatctggattaccaaattctagtaaagtgttccctgcaactggcaagggtgtgggacagttgactggagttttacatgatttcttggagaaaaacaacgatatggttaatggtacagatgattctatgctgtatactcttccccaggaagagttgtttgaactatttctaactctgagcggacaacttttcacttatatggaatgcatttttgaaatttcatagggtaaataaaacaaagatattggagtacttgcacgatgcttgggctattgacaggaaggcagaatggtcaatatggactgttcactcaaaaattgagatccctcatcgctatttgcggagtatgaatgatgaatcatctcaccgtcattcacttcttagagtttctggatcaaggaagttccatgacgatcctgcacagaactctgcttcacgggctgaactacaccggaaaagcatagcacaaatgaagatcaatacacaatctgttcaagatatgcatatatatgctgatccttcacatgttcctgttgttcttatagaacaacatgtcatggttgttccacagcatagttccagcaaggatttggcttcgaatgcttctgaacaaaaggatactattgtgctacctaaactacaaggagagcctctggtacccaaaagtagtgttgggccaccatttggatttacgtcttgttagaaaccaatggcttctattggaccctggagctgattgcctaatgtctgaggctaatgaagataaaacatctggagacttcaaagaaatgggtagcaggttggccggggaggtaattgccttcctgaagaagaaaatggataagctttctagatatggaggctgcaaagagctgaagttaagttttgtcggccattccatcgggaacatcatcattagaagtgccctggcagaacctgcattgcagccatacttgaagaacctctacacttacatgtcaatatcagggcctcacttgggttactggtacagttcaaattctttgttcaattctggactctggctgctgaaaaagctcaagaatgctcaatgcatccatcaactcactttcagtgatgatcaagacccccacaatacatacttctataagctttgcaagttgaaaacattggagaacttcaaaaatatcatattgttatcatcaccacaggatggctatgtaccatatcactcagcgagaatggagctctgcccagccgcatcatcggacacctcaaagaagggtcaagtcttcacagaaatgctcaacaattgcttggatcagatccgtgcgccctcatctgacacccggacgttcatgcgctgcgatgtgaattttgaccagtccaaccacggacggagcctgaacaccatgattggcagggcagcccacatcgagttccttgagaccgacatctacgccaagttcatcatgtggtccttccctgacctgttccgatgacagacaacgccgctcgtctctgtaatgtctctgtaatactgctgcataccaaacctacaaaccgatagcgcacactactgagtactgaccaggcaaggaaaagtaagcttgcataaaggctcccccagaatccaacaccgccacaggcagagtagcgctgtaaagatcctagaagcaacggtttttccagcttgctagatctgattctgtataaatagttgattctttcgtcattccattcatagtgctgtagatgtgcacctttgctgtgaatttataatcctttgtcggcttgtgtatctaacgcttcggtttaggatgtgctgacaatcagtgagcttatgtccaaataagccccctttcttaatgtttggttttagtcaccttggtctttgtgctgctgtaaatccagggtgttgtttctgtttggtgaaatgactgctacatgaatatctggttctggcatcttgccatagccggatcttgcttctgctaaggttattcctatcagggatatataggattggaaaaaaatatgaaagattttgatttatttgggatttaaactcatggattgggtggtgttgagag

SEQ ID NO: 13154 - DNA, 2825 bp, Zea Mays
atgtgcaagcccaaggatacatttccattttgtgataaagtggtgatgatgaactacggaaaagtgaaaacacaactaaagcatttggaaaatagatgacgtcgacaatagcttccacacacagccgtttcggatcaagtatgccagacaagatatctatctgtcagttatggtgtcgttcaacatattcaacattgaagaggagggtccagcagcctcggcggtgatgttgaagtttgagctgatgtatgccccaacactagagaacgggtctgagcttcaagcttctagtgtcacatcttcagcagctgtgcatgaatttaggatcccccacagagcactcctgggtctacactcctactgtccagttcattttgatgcgttccactctgtgcttgttgatctgacattacacatagtgtacctgaaagctggtgcaactaaaccatcattgaaggtacacaggtaccggaccaaggtttaggtcctacatcatatcatattgtcaaggcattattaacttctagaaagttgttgctggaagaactgaagaaaatcagtggtgctattggtaagacagtagaggaattagatgttgctgacttgaatcttggtagatatgagtcatttaatccatcaaaatctggattaccaaattctagtaaagtgttccctgcaactggcaagggtgtgggacagttgactggagttttacatgatttcttggagaaaaacaacgatatggttaatggtacagatgattctatgctgtatactcttccccaggaagagttgtttgaactatttctaactctgagcggacaacttttcacttatatggaatgcatttttgaaatttcatagggtaaataaaacaaagatattggagtacttgcacgatgcttgggctattgacaggaaggcagaatggtcaatatggactgttcactcaaaaattgagatccctcatcgctatttgcggagtatgaatgatgaatcatctcaccgtcattcacttcttagagtttctggatcaaggaagttccatgacgatcctgcacagaactctgcttcacgggctgaactacaccggaaaagcatagcacaaatgaagatcaatacacaatctgttcaagatatgcatatatatgctgatccttcacatgttcctgttgttcttatagaacaacatgtcatggttgttccacagcatagttccagcaaggatttggcttcgaatgcttctgaacaaaaggatactattgtgctacctaaactacaaggagagcctctggtacccaaaagtagtgttggtaaaaaaagtgggcgcatcttgcgagctgtcatttttgtgcatggttttcagggccaccatttggatttacgtcttgttagaaaccaatggcttctattggaccctggagctgattgcctaatgtctgaggctaatgaagataaaacatctggagacttcaaagaaatgggtagcaggttggccggggaggtaattgccttcctgaagaagaaaatggataagctttctagatatggaggctgcaaagagctgaagttaagttttgtcggccattccatcgggaacatcatcattagaagtgccctggcagaacctgcattgcagccatacttgaagaacctctacacttacatgtcaatatcagggcctcacttgggttactgtgatgatcaagacccccacaatacatacttctataagctttgcaagttgaaaacattggagaacttcaaaaatatcatattgttatcatcaccacaggttattcccttttctcatctcaaatagtaatttacttgtgtacacggaatttgttttgctgcactaaatgatttggccccaatccctatatagtccttattgcatgtcatgacttgcgagcaatgcacatgtttttctttctttcaaggatggctatgtaccatatcactcagcgagaatggagctctgcccagccgcatcatcggacacctcaaagaagggtcaagtcttcacagaaatgctcaacaattgcttggatcagatccgtgcgccctcatctgacacccggacgttcatgcgctgcgatgtgaattttgaccagtccaaccacggacggagcctgaacaccatgattggcagggcagcccacatcgagttccttgagaccgacatctacgccaagttcatcatgtggtccttccctgacctgttccgatgacagacaacgccgctcgtctctgtaatgtctctgtaatactgctgcataccaaacctacaaaccgatagcgcacactactgagtactgaccaggcaaggaaaagtaagcttgcataaaggctcccccagaatccaacaccgccacaggcagagtagcgctgtaaagatcctagaagcaacggtttttccagcttgctagatctgattctgtataaatagttgattctttcgtcattccattcatagtgctgtagatgtgcacctttgctgtgaatttataatcctttgtcggcttgtgtatctaacgcttcggtttaggatgtgctgacaatcagtgagcttatgtccaaataagccccctttcttaatgtttggttttagtcaccttggtctttgtgctgctgtaaatccagggtgttgtttctgtttggtgaaatgactgctacatgaatatctggttctggcatcttgccatagccggatcttgcttctgctaaggttattcctatcagggatatataggattggaaaaaaatatgaaagattttgatttatttgggatttaaactcatggattgggtggtgttgagag

SEQ ID NO: 13155 - DNA, 876 bp, Zea Mays
aatcaataaaatataatatagtaaaatataacataatgggtactaatacttttggagaaacgtaaacaactaaacatgtaagtaaatcagagttgcatacattttttcggtcctcgtaccacgatcatacacaagcacatgcatacacacacgtatacatacgatagattacgtagccacgcttattcgtgcatcacacgagcgcatacatacgtacgcgcgcacaacacggcgggcgctcgatatcactctcacacgcacgcgtagcacacggggagggacgacgatacgggaggatcaatcagccgaagaagtggtgcttcttctcgccgccggcctcctcggcctccttgtggtccttcttcttctcgtggtgctcgtggaaggcgaagccgccggagccgacggccgccgccgtgctgcttgtgcttgtgctccttctcctccttcttgtactcgtcgtactcgttctcgcccgtggacaccacctccgtcaccgtggcctccgtgtactcggcggactcgccgtacccgccggcggcgagctgctcctcgtccttcttgtggtggaacaggtggtggtggtggtgcttctcctccgccatggataatgaaacgagctagaagagggatgaccggccttaattagcttgttggagggagagcaagtgacaattggatcgacagctgttcttgcttgttgcttggcagttgctcatcgtcttatatagccggatggaggggccctgtggactgagctggcatggcattatggacggtggtggaaatcagtacgcgtatcattattatcaaaattcagacatgattaattagaagcgatatgcaccgtctacagaacatctttatattatatac

SEQ ID NO: 13156 - DNA, 1225 bp, Zea Mays
catttgaataaataaacattaattcaaaagcaatagtataaagatacgggtttgcaagaatgcatggaaatcaagaaaaaaaactatagaagaggggaaaaaatgaaatgtctataccttccattccattatcttgctgggatgtatgcatgcaaccaccaattttggaaatattttcttcagtatcatgtatgagttgttgcagaagcaggtgcaccatattccacagattcatgtatgctttcctgccagaacaaagactctaggccaaatggtgattcttctgcatttgataaatggctatcaacagcttgaatgtcatgatgttcctgaggctgtttactcttatctaaattttcctttgcattgtcaccagattctgacccaggcatcatttctactggatcaattgtccgtctcctctttgaagaccttccctttaaagtttcggactgcacaactatttcagtgtgatccatgctcgtcttttcaacaccattaagtgcaacagatttacgtgttgatctcctcatagtaagttttgacaatttttcctcatgaagaccactgttttgttcctcaagcaacactgtggcaacagatctccttgatcgcctaattggttcctttagtttctgttccttctcattatcttgagatttaccgctttggatattgttctcaagcatatcaggtagaacagatttacgtgatgagcgcctaacaggttgcttcacaattaattgtttctccacatctttctctttctcgtgcaattctgagacaacagatcttcgtctcaatcccctaacaggttctttagttgccggtttgttcgcgtccaccacactgttgttaacctggacaactctatttctcaaagacctggtgacaggagcatcatttctaggcacatctgaaaccgtaggcagctctacatttgtttgtgcatctccattcttcctcctcttgttctcaaccacagtaggtgacattacaaccggtgctattgagcgagatcttgtaatcctagccggtacttccacctgagtagaagtctgaacgccagctgcttctcccctccctctcttcggttcaacaagaggaggcaacacagcagcagccaccgccaagcttgatcttcttgtaactctggacgaagctccaacctgagcgctgagaacaacacccttatcattctcctggttcttgcacttgcgcttcc

SEQ ID NO: 13157 - DNA, 1229 bp, Zea Mays
agcaggtgcaccatattccacagattcatgtatgctttcctgccagaacaaagactctaggccaaatggtgattcttctgcatttgataaatggctatcaacagcttgaatgtcatgatgttcctgaggctgtttactcttatctaaattttcctttgcattgtcaccagattctgacccaggtaccacttcatgtatactctgcacggtgtaaatctcattagtcggtgttactgttacaagcaatggacctgaagagaactcttctcttgtggcattaacctgacaactttcttgaattctgctagtagacttattgtactcatgagtagctttgtgtgtgtctattgttgcttccctgataatcatgtcatcatttgcctccttgacaggcatcatttctactggatcaattgtccgtctcctctttgaagaccttccctttaaagtttcggactgcacaactatttcagtgtgatccatgctcgtcttttcaacaccattaagtgcaacagatttacgtgttgatctcctcatagtaagttttgacaatttttcctcatgaagaccactgttttgttcctcaagcaacactgtggcaacagatctccttgatcgcctaattggttcctttagtttctgttccttctcattatcttgagatttaccgctttggatattgttctcaagcatatcaggtagaacagatttacgtgatgagcgcctaacaggttgcttcacaattaattgtttctccacatctttctctttctcgtgcaattctgagacaacagatcttcgtctcaatcccctaacaggttctttagttgccggtttgttcgcgtccaccacactgttgttaacctggacaactctatttctcaaagacctggtgacaggagcatcatttctaggcacatctgaaaccgtaggcagctctacatttgtttgtgcatctccattcttcctcctcttgttctcaaccacagtaggtgacattacaaccggtgctattgagcgagatcttgtaatcctagccggtacttccacctgagtagaagtctgaacgccagctgcttctcccctccctctcttcggttcaacaagaggaggcaacacagcagcagccaccgccaagcttgatcttcttgtaactctggacgaagctccaacctgagcgctgagaacaacacccttatcattctcctggttcttgcacttgcgcttcc

SEQ ID NO: 13158 - DNA, 1527 bp, Zea Mays
ccaccgcccggacgcctaggcgacgccttaaaaacagaggttgtacctttggcagtctcttcagctactatgtcaatatcatgttgcagacttttggtgtagagagcagtggacatgatgccagttaggttcttttctccagactcaatggcatttgcttccaagccaactctcccttctccagatacagggctttgctctacacgatctacaacagtgaagttaattgataagccatctggtgattttgcaaggacaaaaactgtctttcagtatataacaagacattaatggataaaactaattacaacatcataaaatcaataaggttgtcatataccagcttttgaacatccaaactagatcaataaattataattgtgatgatgcttgtctacaggagataaattgaacaaagctaaatcctacagatttggcaatgcagagatattaaactaacaactgtcatgccattagcacacatgctagcctcacctccactgatcaaagctttgtcatctgaggcaacacaattgtgtggtactagtcctgcaatgcatgatgattgatctaattccccacttcttgtttcagataaatggctatcaacagcttgaatgtcatgatgttcctgaggctgtttactcttatctaaattttcctttgcattgtcaccagattctgacccaggcatcatttctactggatcaattgtccgtctcctctttgaagaccttccctttaaagtttcggactgcacaactatttcagtgtgatccatgctcgtcttttcaacaccattaagtgcaacagatttacgtgttgatctcctcatagtaagttttgacaatttttcctcatgaagaccactgttttgttcctcaagcaacactgtggcaacagatctccttgatcgcctaattggttcctttagtttctgttccttctcattatcttgagatttaccgctttggatattgttctcaagcatatcaggtagaacagatttacgtgatgagcgcctaacaggttgcttcacaattaattgtttctccacatctttctctttctcgtgcaattctgagacaacagatcttcgtctcaatcccctaacaggttctttagttgccggtttgttcgcgtccaccacactgttgttaacctggacaactctatttctcaaagacctggtgacaggagcatcatttctaggcacatctgaaaccgtaggcagctctacatttgtttgtgcatctccattcttcctcctcttgttctcaaccacagtaggtgacattacaaccggtgctattgagcgagatcttgtaatcctagccggtacttccacctgagtagaagtctgaacgccagctgcttctcccctccctctcttcggttcaacaagaggaggcaacacagcagcagccaccgccaagcttgatcttcttgtaactctggacgaagctccaacctgagcgctgagaacaacacccttatcattctcctggttcttgcacttgcgcttcc

SEQ ID NO: 13159 - DNA, 1509 bp, Zea Mays
ccgctctcccgttttctataattgcgaaaatatcccgaatccgtggcttcccttccctggcgcgcgagtgacgagcgtgcgcagaagctagccaagcgatgccgctcctcttccccgccacgccgccgctaccgctgtgccgcgccgcgcgcgtctcacgccgcgccacggcctccgtggcgtccgcggccaggagctcgtcgtcgtcctcggcctcgttcgacgcggccgccttcgaggccgagcggctgcgcctggacgccgcggcgcgggccgggatggagtccaccgccgcggcagcggaggccggcccgcgggcctggaagtgggcgatacggaagcgggtgtgggacgcgctcgaggctgagggcatcgcgcgggacccgcgccccgtccaccaccgcatccccaacttcgacggcgcccccgccgccgcagacgcgttggggaggcttgacatatttcagaagtcccattgtgtaaaggtcaatcctgacacacctcagaagcaagttcggttcttaacattgtcaggtgataaaaagctgttgactccgcaacctcggctaaggacaggatttttctcagttatggactctcagatgatacctgttgggtgcattcctgaagcatgcacttctgttggtgcagctaaatatgggaggccaattggtttagatgaaagccttaaggtggatttgattgtgattgggtcagtggcagttgatccaagttcaggagcacggttagggaagggagagggatttgcagagctggaatatggaatgcttcgctatatgggagctatagatgattcaaccatgatagtaactactgtgcatgacaagcagttagttgatgacattccagtggagaagctgctagttcatgatgtgccagttgacattatctgcacccctactcaggtcatcttcacgaagactacgatcccaaagccacaagggatttactgggaaaagttatctccagaaaaattgggccaaatccgaattctaagagagctgaagcaacgtatagagcaagagacaggaactatgcttccttgtggaccttcggagaagctaccgccaacagctcagagaaagcagaggtggcagcggcgacgatgagacttttaaatgactgccccgtgcgttgcgacggcttacaacaatacccatgtaaactatccaccaaaaaaatttcaatattttttgtttattgtctccgctctccgtgtaatatttttttttgatttggctaactggtgttattatttactctatccaatatatcttgttacaacacaaccaatgaaatgagcgattagaagagagttcacaacgactgactgaacgaacaaatattataaaatgatataattccaccatacaaagaccaaataagaaaaaatttgtaagctcaagtttctaaaataagtcacatgaactcaaacttataaaaaagataaatcaaaatatggagtgattactaaagtcagacatcaat

SEQ ID NO: 13160 - DNA, 2217 bp, Zea Mays
cgaaaatatcccgaatccgtggcttcccttccctggcgcgcgagtgacgagcgtgcgcagaagctagccaagcgatgccgctcctcttccccgccacgccgccgctaccgctgtgccgcgccgcgcgcgtctcacgccgcgccacggcctccgtggcgtccgcggccaggagctcgtcgtcgtcctcggcctcgttcgacgcggccgccttcgaggccgagcggctgcgcctggacgccgcggcgcgggccgggatggagtccaccgccgcggcagcggaggccggcccgcgggcctggaagtgggcgatacggaagcgggtgtgggacgcgctcgaggctgagggcatcgcgcgggacccgcgccccgtccaccaccgcatccccaacttcgacggcgcccccgccgccgcagacgcgttggggaggcttgacatatttcagaagtcccattgtgtaaaggtcaatcctgacacacctcagaagcaagttcggttcttaacattgtcaggagagtgcgagccatttattgaacaggaaagagtatccaagtgtacaacaccactcacacaagacagtaggtcctagaaaaggtttcaaatgtccctatagccctgactccctgagtgcgcactgtaaggctccctcctctgctgttcacaccagcaagcttgtgctcagagaaaaattaccaaagagttaagtcttcctctatgctgtttgtccaccatcttgattgcatggcaccaccatcatggaagctaactctgtcagtttgaaaatctagtgcttttaagaccaatttttgcagaataagtaaccacacctgcacctcccttgaagttgcgccaggttactgtagttgcttttctggtgtaaggtcgtatgatcaagcgtgctctgaattagtcagtggagcatgatatactaggtcgattcatgcttattgctgcatagttaatttctcgttgtaatgcaccagtatgtaattgtatcattctgtttcctgattaacttcataagttaatagcacttgatctctcaatgaatttcatgctgcaaaccaaagcatatactggttggttagtgtttcaggttttctgtacattttttctagctttcgatcagatgtacccattctattaaggacaaacactgcaatcatgctaaacttcttgcctgagaatttgaaaatgatttgtttgcttctccttttgattcggtgctactttttgtcatctaggtgataaaaagctgttgactccgcaacctcggctaaggacaggatttttctcagttatggactctcagatgatacctgttgggtgcattcctgaagcatgcacttctgttggtgcagctaaatatgggaggccaattggtttagatgaaagccttaaggtggatttgattgtgattgggtcagtggcagttgatccaagttcaggagcacggttagggaagggagagggatttgcagagctggaatatggaatgcttcgctatatgggagctatagatgattcaaccatgatagtaactactgtgcatgacaagcagttagttgatgacattccagtggagaagctgctagttcatgatgtgccagttgacattatctgcacccctactcaggtcatcttcacgaagactacgatcccaaagccacaagggatttactgggaaaagttatctccagaaaaattgggccaaatccgaattctaagagagctgaagcaacgtatagagcaagagacaggaactatgcttccttgtggaccttcggagaagctaccgccaacagctcagagaaagcagaggtggcagcggcgacgatgagacttttaaatgactgccccgtgcgttgcgacggcttacaacaatacccatgtaaactatccaccaaaaaaatttcaatattttttgtttattgtctccgctctccgtgtaatatttttttttgatttggctaactggtgttattatttactctatccaatatatcttgttacaacacaaccaatgaaatgagcgattagaagagagttcacaacgactgactgaacgaacaaatattataaaatgatataattccaccatacaaagaccaaataagaaaaaatttgtaagctcaagtttctaaaataagtcacatgaactcaaacttataaaaaagataaatcaaaatatggagtgattactaaagtcagacatcaat

SEQ ID NO: 13161 - DNA, 1663 bp, Zea Mays
cccgaatccgtggcttcccttccctggcgcgcgagtgacgagcgtgcgcagaagctagccaagcgatgccgctcctcttccccgccacgccgccgctaccgctgtgccgcgccgcgcgcgtctcacgccgcgccacggcctccgtggcgtccgcggccaggagctcgtcgtcgtcctcggcctcgttcgacgcggccgccttcgaggccgagcggctgcgcctggacgccgcggcgcgggccgggatggagtccaccgccgcggcagcggaggccggcccgcgggcctggaagtgggcgatacggaagcgggtgtgggacgcgctcgaggctgagggcatcgcgcgggacccgcgccccgtccaccaccgcatccccaacttcgacggcgcccccgccgccgcagacgcgttggggaggcttgacatatttcagaagtcccattgtgtaaaggtcaatcctgacacacctcagaagcaagttcggttcttaacattgtcaggagagtgcgagccatttattgaacaggaaagagtatccaagtgtacaacaccactcacacaagacagtaggtcctagaaaaggtttcaaatgtccctatagccctgactccctgagtgcgcactgtaaggctccctcctctgctgttcacaccagcaagcttgtgctcagagaaaaattaccaaagagtgataaaaagctgttgactccgcaacctcggctaaggacaggatttttctcagttatggactctcagatgatacctgttgggtgcattcctgaagcatgcacttctgttggtgcagctaaatatgggaggccaattggtttagatgaaagccttaaggtggatttgattgtgattgggtcagtggcagttgatccaagttcaggagcacggttagggaagggagagggatttgcagagctggaatatggaatgcttcgctatatgggagctatagatgattcaaccatgatagtaactactgtgcatgacaagcagttagttgatgacattccagtggagaagctgctagttcatgatgtgccagttgacattatctgcacccctactcaggtcatcttcacgaagactacgatcccaaagccacaagggatttactgggaaaagttatctccagaaaaattgggccaaatccgaattctaagagagctgaagcaacgtatagagcaagagacaggaactatgcttccttgtggaccttcggagaagctaccgccaacagctcagagaaagcagaggtggcagcggcgacgatgagacttttaaatgactgccccgtgcgttgcgacggcttacaacaatacccatgtaaactatccaccaaaaaaatttcaatattttttgtttattgtctccgctctccgtgtaatatttttttttgatttggctaactggtgttattatttactctatccaatatatcttgttacaacacaaccaatgaaatgagcgattagaagagagttcacaacgactgactgaacgaacaaatattataaaatgatataattccaccatacaaagaccaaataagaaaaaatttgtaagctcaagtttctaaaataagtcacatgaactcaaacttataaaaaagataaatcaaaatatggagtgattactaaagtcagacatcaat

SEQ ID NO: 13162 - DNA, 2093 bp, Zea Mays
cttcccttccctggcgcgcgagtgacgagcgtgcgcagaagctagccaagcgatgccgctcctcttccccgccacgccgccgctaccgctgtgccgcgccgcgcgcgtctcacgccgcgccacggcctccgtggcgtccgcggccaggagctcgtcgtcgtcctcggcctcgttcgacgcggccgccttcgaggccgagcggctgcgcctggacgccgcggcgcgggccgggatggagtccaccgccgcggcagcggaggccggcccgcgggcctggaagtgggcgatacggaagcgggtgtgggacgcgctcgaggctgagggcatcgcgcgggacccgcgccccgtccaccaccgcatccccaacttcgacggcgcccccgccgccgcagacgcgttggggaggcttgacatatttcagaagtcccattgtgtaaaggtcaatcctgacacacctcagaagcaagttcggttcttaacattgtcaggagagtgcgagccatttattgaacaggaaagagtatccaagtgtacaacaccactcacacaagacagtaggtcctagaaaaggtttcaaatgtccctatagccctgactccctgagtgcgcactgtaaggctccctcctctgctgttcacaccagcaagcttgtgctcagagaaaaattaccaaagagttaagtcttcctctatgctgtttgtccaccatcttgattgcatggcaccaccatcatggaagctaactctgtcagtttgaaaatctagtgcttttaagaccaatttttgcagaataagtaaccacacctgcacctcccttgaagttgcgccaggttactgtagttgcttttctggtgtaaggtcgtatgatcaagcgtgctctgaattagtcagtggagcatgatatactaggtcgattcatgcttattgctgcatagttaatttctcgttgtaatgcaccagtatgtaattgtatcattctgtttcctgattaacttcataagttaatagcacttgatctctcaatgaatttcatgctgcaaaccaaagcatatactggttggttagtgtttcaggttttctgtacattttttctagctttcgatcagatgtacccattctattaaggacaaacactgcaatcatgctaaacttcttgcctgagaatttgaaaatgatttgtttgcttctccttttgattcggtgctactttttgtcatctaggtgataaaaagctgttgactccgcaacctcggctaaggacaggatttttctcagttatggactctcagatgatacctgttgggtgcattcctgaagcatgcacttctgttggtgcagctaaatatgggaggccaattggtttagatgaaagccttaaggtggatttgattgtgattgggtcagtggcagttgatccaagttcaggagcacggttagggaagggagagggatttgcagagctggaatatggaatgcttcgctatatgggagctatagatgattcaaccatgatagtaactactgtgcatgacaagcagttagttgatgacattccagtggagaagctgctagttcatgatgtgccagttgacattatctgcacccctactcaggtcatcttcacgaagactacgatcccaaagccacaagggatttactgggaaaagttatctccagaaaaattgggccaaatccgaattctaagagagctgaagcaacgtatagagcaagagacaggaactatgcttccttgtggaccttcggagaagctaccgccaacagctcagagaaagcagaggtggcagcggcgacgatgagacttttgtatgcttctcttaactgtttcttttactcaataaagagctatgtgcacccttttctttcttagggcaaatcaaggtcacaattcaaaactgctagcattagactataggaacattaccagatgtaatagaaatgccaaaaaaaactttgtttgcacttaagaggcaatgaggatagatagtatagctctttccacacatatttaatttctttgcaagtatgaagttccatttggaaagtggtacttaaaatttgtatcttggatgtagc

SEQ ID NO: 13163 - DNA, 1548 bp, Zea Mays
cttcccttccctggcgcgcgagtgacgagcgtgcgcagaagctagccaagcgatgccgctcctcttccccgccacgccgccgctaccgctgtgccgcgccgcgcgcgtctcacgccgcgccacggcctccgtggcgtccgcggccaggagctcgtcgtcgtcctcggcctcgttcgacgcggccgccttcgaggccgagcggctgcgcctggacgccgcggcgcgggccgggatggagtccaccgccgcggcagcggaggccggcccgcgggcctggaagtgggcgatacggaagcgggtgtgggacgcgctcgaggctgagggcatcgcgcgggacccgcgccccgtccaccaccgcatccccaacttcgacggcgcccccgccgccgcagacgcgttggggaggcttgacatatttcagaagtcccattgtgtaaaggtcaatcctgacacacctcagaagcaagttcggttcttaacattgtcaggagagtgcgagccatttattgaacaggaaagagtatccaagtgtacaacaccactcacacaagacagtaggtcctagaaaaggtttcaaatgtccctatagccctgactccctgagtgcgcactgtaaggctccctcctctgctgttcacaccagcaagcttgtgctcagagaaaaattaccaaagagtgataaaaagctgttgactccgcaacctcggctaaggacaggatttttctcagttatggactctcagatgatacctgttgggtgcattcctgaagcatgcacttctgttggtgcagctaaatatgggaggccaattggtttagatgaaagccttaaggtggatttgattgtgattgggtcagtggcagttgatccaagttcaggagcacggttagggaagggagagggatttgcagagctggaatatggaatgcttcgctatatgggagctatagatgattcaaccatgatagtaactactgtgcatgacaagcagttagttgatgacattccagtggagaagctgctagttcatgatgtgccagttgacattatctgcacccctactcaggtcatcttcacgaagactacgatcccaaagccacaagggatttactgggaaaagttatctccagaaaaattgggccaaatccgaattctaagagagctgaagcaacgtatagagcaagagacaggaactatgcttccttgtggaccttcggagaagctaccgccaacagctcagagaaagcagaggtggcagcggcgacgatgagacttttgtatgcttctcttaactgtttcttttactcaataaagagctatgtgcacccttttctttcttagggcaaatcaaggtcacaattcaaaactgctagcattagactataggaacattaccagatgtaatagaaatgccaaaaaaaactttgtttgcacttaagaggcaatgaggatagatagtatagctctttccacacatatttaatttctttgcaagtatgaagttccatttggaaagtggtacttaaaatttgtatcttggatgtagc

SEQ ID NO: 13164 - DNA, 1346 bp, Zea Mays
cttcccttccctggcgcgcgagtgacgagcgtgcgcagaagctagccaagcgatgccgctcctcttccccgccacgccgccgctaccgctgtgccgcgccgcgcgcgtctcacgccgcgccacggcctccgtggcgtccgcggccaggagctcgtcgtcgtcctcggcctcgttcgacgcggccgccttcgaggccgagcggctgcgcctggacgccgcggcgcgggccgggatggagtccaccgccgcggcagcggaggccggcccgcgggcctggaagtgggcgatacggaagcgggtgtgggacgcgctcgaggctgagggcatcgcgcgggacccgcgccccgtccaccaccgcatccccaacttcgacggcgcccccgccgccgcagacgcgttggggaggcttgacatatttcagaagtcccattgtgtaaaggtcaatcctgacacacctcagaagcaagttcggttcttaacattgtcagctaaatatgggaggccaattggtttagatgaaagccttaaggtggatttgattgtgattgggtcagtggcagttgatccaagttcaggagcacggttagggaagggagagggatttgcagagctggaatatggaatgcttcgctatatgggagctatagatgattcaaccatgatagtaactactgtgcatgacaagcagttagttgatgacattccagtggagaagctgctagttcatgatgtgccagttgacattatctgcacccctactcaggtcatcttcacgaagactacgatcccaaagccacaagggatttactgggaaaagttatctccagaaaaattgggccaaatccgaattctaagagagctgaagcaacgtatagagcaagagacaggaactatgcttccttgtggaccttcggagaagctaccgccaacagctcagagaaagcagaggtggcagcggcgacgatgagacttttaaatgactgccccgtgcgttgcgacggcttacaacaatacccatgtaaactatccaccaaaaaaatttcaatattttttgtttattgtctccgctctccgtgtaatatttttttttgatttggctaactggtgttattatttactctatccaatatatcttgttacaacacaaccaatgaaatgagcgattagaagagagttcacaacgactgactgaacgaacaaatattataaaatgatataattccaccatacaaagaccaaataagaaaaaatttgtaagctcaagtttctaaaataagtcacatgaactcaaacttataaaaaagataaatcaaaatatggagtgattactaaagtcagacatcaat

SEQ ID NO: 13165 - DNA, 1426 bp, Zea Mays
cttcccttccctggcgcgcgagtgacgagcgtgcgcagaagctagccaagcgatgccgctcctcttccccgccacgccgccgctaccgctgtgccgcgccgcgcgcgtctcacgccgcgccacggcctccgtggcgtccgcggccaggagctcgtcgtcgtcctcggcctcgttcgacgcggccgccttcgaggccgagcggctgcgcctggacgccgcggcgcgggccgggatggagtccaccgccgcggcagcggaggccggcccgcgggcctggaagtgggcgatacggaagcgggtgtgggacgcgctcgaggctgagggcatcgcgcgggacccgcgccccgtccaccaccgcatccccaacttcgacggcgcccccgccgccgcagacgcgttggggaggcttgacatatttcagaagtcccattgtgtaaaggtcaatcctgacacacctcagaagcaagttcggttcttaacattgtcaggtgataaaaagctgttgactccgcaacctcggctaaggacaggatttttctcagttatggactctcagatgatacctgttgggtgcattcctgaagcatgcacttctgttggtgcagctaaatatgggaggccaattggtttagatgaaagccttaaggtggatttgattgtgattgggtcagtggcagttgatccaagttcaggagcacggttagggaagggagagggatttgcagagctggaatatggaatgcttcgctatatgggagctatagatgattcaaccatgatagtaactactgtgcatgacaagcagttagttgatgacattccagtggagaagctgctagttcatgatgtgccagttgacattatctgcacccctactcagggatttactgggaaaagttatctccagaaaaattgggccaaatccgaattctaagagagctgaagcaacgtatagagcaagagacaggaactatgcttccttgtggaccttcggagaagctaccgccaacagctcagagaaagcagaggtggcagcggcgacgatgagacttttaaatgactgccccgtgcgttgcgacggcttacaacaatacccatgtaaactatccaccaaaaaaatttcaatattttttgtttattgtctccgctctccgtgtaatatttttttttgatttggctaactggtgttattatttactctatccaatatatcttgttacaacacaaccaatgaaatgagcgattagaagagagttcacaacgactgactgaacgaacaaatattataaaatgatataattccaccatacaaagaccaaataagaaaaaatttgtaagctcaagtttctaaaataagtcacatgaactcaaacttataaaaaagataaatcaaaatatggagtgattactaaagtcagacatcaat

SEQ ID NO: 13166 - DNA, 353 bp, Zea Mays
gctcagagaaaaattaccaaagagtgataaaaagctgttgactccgcaacctcggctaaggacaggatttttctcagttatggactctcagatgatacctgttgggtgcattcctgaagcatgcacttctgttggtgcagctaaatatgggaggccaattggtttagatgaaagccttaaggtggatttgattgtgattgggtcagtggcagttgatccaagttcaggagcacggttagggaagggagagggatttgcagagctggaatatggaatgcttcgctatatgggagctatagatgattcaaccatgatagtaactactgaaaaccaaggcttgatggatgtcaggg

SEQ ID NO: 13167 - DNA, 1675 bp, Zea Mays
aacagtgacatccaaaccgtgccattttttcgagcggcttgagccacaacagccccactctgtctgagtgtctgtgcctgcctgtgcaaagtagggtttccaccgggacacaggccgcctccatcccatggcgcgcgccgccgcctccaggctcgccgccgtggcgaactcttcctctacgcgcgagttgttcgcccgccacctcgccgccgctgccgcctcggcgtggaccgcaccgccgcgtctgcctgaaccagggagggagcggcggagcccgggctggtggtgtccgagcaggtcgtttcatgccacaaggcgggtgtatacaagggattactatgatgtgcttggagtaagcaaggatgcttctgcaccggatataaagaaggcatattatgcgctcgcaaagaagttccatcctgatactaataaagatgctgatgcagaaaaaacatttcaagaagttaaccgtgcctatgaggttttgaaggacaatgacaagcgtgaaatatatgatcagcttggaccagaagcatacgagcgtcaagcgtcaggtggtgaccctggagggccgggttttcctcggggtaacccatttggtgacatctttggtgatatctttgataatgcatacagaggtggccaagatgtcaaggtttctgttgaactatcattcatggaagctgtccaaggttgcagaaaaaccattacatggaagtggcgtcccccctggaactgtgcctaaaacatgtaaaacatgtaaaggctctggcgcgatatacatgcagaagggtatatttactgtcgaatgtacttgctccctgtgcaatgggagcgggaaaattgtcaagagtttttgcaagacttgcaaaggagaacaggtagtgaaggggaaaacgtcagtcaagctagatatagccgcagtgacgataatgacatcatgaaggtttttggtaagggtggtgcagatgttgaccgaaataagcctggtgacctttatgttactatcaaggtcagagaggaccctacttttcgaagagaaggcatccatgtgcatgttgattctgttttaagcattgctcaggctgtcctaggtggaactgtcacggtaccaaccctcactggaaatgttacagtcaaggttcgtcaaggtacccaacctggagagaaggtcgtcctccggggcaaaggaataaaagcgaggaactcgccagtgtttgggaatcagtatgtacacttcaatatcagggttccgacggatgtgacgcaaaggcagagggagctgatagatgagttcgataaagaggagtgcgcagaccgggaaagacctgcggttgcctccggatgaagtttttggttcaaccattaattagttttagcaccacactagtttgatgccctcaatttctccaacccgccataaggtgctgtaggcaccaaaagcttattgtaacatttgaatcttatatagcatctacccagtgtgtaacgtatacattacgcgctaaattattgtaccattttcgatttttaaacagaaaagatagcgggggttgtcttcactcttcagtaacattcttttgggggtgtggttgtgtgccaagaatgaagagaggggatattggcaggagaaagtgtttttgaatttaatacgaatgtcatggtaccaattttg

SEQ ID NO: 13168 - DNA, 1436 bp, Zea Mays
cactgctaggggatgacttggaccttcctccagttttgctcatctcattttgcctctgtgatacctacaactagttggttaggcacttgcacacctgaatcagttcccctgcagctgactgcatgctcgcaaagaagttccatcctgatactaataaagatgctgatgcagaaaaaacatttcaagaagttaaccgtgcctatgaggttttgaaggacaatgacaagcgtgaaatatatgatcagcttggaccagaagcatacgagcgtcaagcgtcaggtggtgaccctggagggccgggttttcctcggggtaacccatttggtgacatctttggtgatatctttgataatgcatacagaggtggccaagatgtcaaggtttctgttgaactatcattcatggaagctgtccaaggttgcagaaaaaccattacgtacgaagctgatactttttgtggaacttgcaatggaagtggcgtcccccctggaactgtgcctaaaacatgtaaaacatgtaaaggctctggcgcgatatacatgcagaagggtatatttactgtcgaatgtacttgctccctgtgcaatgggagcgggaaaattgtcaagagtttttgcaagacttgcaaaggagaacaggtagtgaaggggaaaacgtcagtcaagctagatatagccgcaggaagtgacgataatgacatcatgaaggtttttggtaagggtggtgcagatgttgaccgaaataagcctggtgacctttatgttactatcaaggtcagagaggaccctacttttcgaagagaaggcatccatgtgcatgttgattctgttttaagcattgctcaggctgtcctaggtggaactgtcacggtaccaaccctcactggaaatgttacagtcaaggttcgtcaaggtacccaacctggagagaaggtcgtcctccggggcaaaggaataaaagcgaggaactcgccagtgtttgggaatcagtatgtacacttcaatatcagggttccgacggatgtgacgcaaaggcagagggagctgatagatgagttcgataaagaggagtgcgcagaccgggaaagacctgcggttgcctccggatgaagtttttggttcaaccattaattagttttagcaccacactagtttgatgccctcaatttctccaacccgccataaggtgctgtaggcaccaaaagcttattgtaacatttgaatcttatatagcatctacccagtgtgtaacgtatacattacgcgctaaattattgtaccattttcgatttttaaacagaaaagatagcgggggttgtcttcactcttcagtaacattcttttgggggtgtggttgtgtgccaagaatgaagagaggggatattggcaggagaaagtgtttttgaatttaatacgaatgtcatggtaccaattttg

SEQ ID NO: 13169 - DNA, 1459 bp, Zea Mays
gatatgggattttgaaaaacaacactatggtaatgtggagaaagtattggatacaattttgctcatctcattttgcctctgtgatacctacaactagttggttaggcacttgcacacctgaatcagttcccctgcagctgactgcatgctcgcaaagaagttccatcctgatactaataaagatgctgatgcagaaaaaacatttcaagaagttaaccgtgcctatgaggttttgaaggacaatgacaagcgtgaaatatatgatcagcttggaccagaagcatacgagcgtcaagcgtcaggtggtgaccctggagggccgggttttcctcggggtaacccatttggtgacatctttggtgatatctttgataatgcatacagaggtggccaagatgtcaaggtttctgttgaactatcattcatggaagctgtccaaggttgcagaaaaaccattacgtacgaagctgatactttttgtggaacttgcaatggaagtggcgtcccccctggaactgtgcctaaaacatgtaaaacatgtaaaggctctggcgcgatatacatgcagaagggtatatttactgtcgaatgtacttgctccctgtgcaatgggagcgggaaaattgtcaagagtttttgcaagacttgcaaaggagaacaggtagtgaaggggaaaacgtcagtcaagctagatatagccgcaggaagtgacgataatgacatcatgaaggtttttggtaagggtggtgcagatgttgaccgaaataagcctggtgacctttatgttactatcaaggtcagagaggaccctacttttcgaagagaaggcatccatgtgcatgttgattctgttttaagcattgctcaggctgtcctaggtggaactgtcacggtaccaaccctcactggaaatgttacagtcaaggttcgtcaaggtacccaacctggagagaaggtcgtcctccggggcaaaggaataaaagcgaggaactcgccagtgtttgggaatcagtatgtacacttcaatatcagggttccgacggatgtgacgcaaaggcagagggagctgatagatgagttcgataaagaggagtgcgcagaccgggaaagacctgcggttgcctccggatgaagtttttggttcaaccattaattagttttagcaccacactagtttgatgccctcaatttctccaacccgccataaggtgctgtaggcaccaaaagcttattgtaacatttgaatcttatatagcatctacccagtgtgtaacgtatacattacgcgctaaattattgtaccattttcgatttttaaacagaaaagatagcgggggttgtcttcactcttcagtaacattcttttgggggtgtggttgtgtgccaagaatgaagagaggggatattggcaggagaaagtgtttttgaatttaatacgaatgtcatggtaccaattttg

SEQ ID NO: 13170 - DNA, 872 bp, Zea Mays
attggttatggtcgttccattgagtgcacttagttctttaggggagtttttgcaagacttgcaaaggagaacaggtagtgaaggggaaaacgtcagtcaagctagatatagccgcaggaagtgacgataatgacatcatgaaggtttttggtaagggtggtgcagatgttgaccgaaataagcctggtgacctttatgttactatcaaggtcagagaggaccctacttttcgaagagaaggcatccatgtgcatgttgattctgttttaagcattgctcaggctgtcctaggtggaactgtcacggtaccaaccctcactggaaatgttacagtcaaggttcgtcaaggtacccaacctggagagaaggtcgtcctccggggcaaaggaataaaagcgaggaactcgccagtgtttgggaatcagtatgtacacttcaatatcagggttccgacggatgtgacgcaaaggcagagggagctgatagatgagttcgataaagaggagtgcgcagaccgggaaagacctgcggttgcctccggatgaagtttttggttcaaccattaattagttttagcaccacactagtttgatgccctcaatttctccaacccgccataaggtgctgtaggcaccaaaagcttattgtaacatttgaatcttatatagcatctacccagtgtgtaacgtatacattacgcgctaaattattgtaccattttcgatttttaaacagaaaagatagcgggggttgtcttcactcttcagtaacattcttttgggggtgtggttgtgtgccaagaatgaagagaggggatattggcaggagaaagtgtttttgaatttaatacgaatgtcatggtaccaattttg

SEQ ID NO: 13171 - DNA, 620 bp, Zea Mays
tgtcaacccaatcacaaagccaaaaataggctgtcctaggtggaactgtcacggtaccaaccctcactggaaatgttacagtcaaggttcgtcaaggtacccaacctggagagaaggtcgtcctccggggcaaaggaataaaagcgaggaactcgccagtgtttgggaatcagtatgtacacttcaatatcagggttccgacggatgtgacgcaaaggcagagggagctgatagatgagttcgataaagaggagtgcgcagaccgggaaagacctgcggttgcctccggatgaagtttttggttcaaccattaattagttttagcaccacactagtttgatgccctcaatttctccaacccgccataaggtgctgtaggcaccaaaagcttattgtaacatttgaatcttatatagcatctacccagtgtgtaacgtatacattacgcgctaaattattgtaccattttcgatttttaaacagaaaagatagcgggggttgtcttcactcttcagtaacattcttttgggggtgtggttgtgtgccaagaatgaagagaggggatattggcaggagaaagtgtttttgaatttaatacgaatgtcatggtaccaattttg

SEQ ID NO: 13172 - DNA, 1692 bp, Zea Mays
ggcgactggcgagagaaccaaaccggaatgtgtgacgactgacgactgaggtctgacgaggcgtaaacctcgctgactcgccctgccgccgccccgccccgcccgcgcgttctccgccgtcgtccccggaaggtttttgcctcagggcatgtggatctgttagttcacctgctgcaagcaagtatagctatagggttgaccagtgcagaagtatgaatccttactttgttgggattcttgtccccgtcgcggtctccctgctgctccgcaagaggagaaaggcccaaaggatgaggggagtgccagttgaggttggtggggagcctggatatgcagtccgtaactatcgttttgaacaacctgttgagacacactgggagggggtgtccacacttgctgatctgtttgagcaatcttgcaaagagtatgtatacatgccactccttggcacaaggaagctcatttcaagggaaactgaagcagcacctggtgggagatcgtttgagaagctgcatctgggcgagtatgagtggaagtgttatgcagagtgcttcaagagcgtttgcaacttttcatctggactaattagagtaggtcaccagaagaatgaacgtgttgctatttttgctgagacacgggctgagtggcagattgggttgcaggcatgcttcagacaaaacattacagttgtcaccatctatgcctcattgggggaggaagctttgtgtcactcactaaatgagactgaggtcactactgtagtttgtggtcagaaagaactaaaaaagttgattgatataagtgggcaacttgacactgtcaagcgtgttgtctatatcaatgaggaaggcatctcaactgaagtttctttagctcaaaactgcactagctggatagttgaatcatttgaggaagtaactaggttaggagctgaagcacctgttgaagcaaacatgcctctaccttccgatgttgcggtgataatgtacacaagtggtagcaccggattgcccaagggagttatgatgacccaccgcaacgtcctggctacactctcagcagtcatgaccattgtgcctgcacttggcagtaaagatatatacttggcctaccttccacttgcacacattcttgagttggcagcagaggcactaatggctgctgttggggcctcaataggatatggatcacctttgaccctgattgatacatccaataaaataaaaaagggaactctaggtgatgcttctgcactaaagccaacattgatgactgctgtacctgctatacttgatcgtattcgtgatggtgtcaggaaaaaggtggatacaaagggtggtatagcaaagcaattgtttgacattgcctataaccgtcggcttgctgcaatcaatggaagttggcttggtgcctggggactggagaaactcttgtgggatacacttgtgtttggaaaggtgcgtgctattttgggaggaaagattcggtttgtactttcaggtggagcacctctatctggagatactcagagatttatcaatatatgccttggggctccaatagggcaaggttatggtctgactgaaacttgtgctggagggacattttcagagtatgatgacacatctgtcggtcgtgttggtgctccactaccttgttcgtatattaagtgaatgagttcttactgttgac

SEQ ID NO: 13173 - DNA, 2313 bp, Zea Mays
agagaaccaaaccggaatgtgtgacgactgacgactgaggtctgacgaggcgtaaacctcgctgactcgccctgccgccgccccgccccgcccgcgcgttctccgccgtcgtccccggaaggtttttgcctcagggcatgtggatctgttagttcacctgctgcaagcaagtatagctatagggttgaccagtgcagaagtatgaatccttactttgttgggattcttgtccccgtcgcggtctccctgctgctccgcaagaggagaaaggcccaaaggatgaggggagtgccagttgaggttggtggggagcctggatatgcagtccgtaactatcgttttgaacaacctgttgagacacactgggagggggtgtccacacttgctgatctgtttgagcaatcttgcaaagagtatgtatacatgccactccttggcacaaggaagctcatttcaagggaaactgaagcagcacctggtgggagatcgtttgagaagctgcatctgggcgagtatgagtggaagtgttatgcagagtgcttcaagagcgtttgcaacttttcatctggactaattagagtaggtcaccagaagaatgaacgtgttgctatttttgctgagacacgggctgagtggcagattgggttgcaggcatgcttcagacaaaacattacagttgtcaccatctatgcctcattgggggaggaagctttgtgtcactcactaaatgagactgaggtcactactgtagtttgtggtcagaaagaactaaaaaagttgattgatataagtgggcaacttgacactgtcaagcgtgttgtctatatcaatgaggaaggcatctcaactgaagtttctttagctcaaaactgcactagctggatagttgaatcatttgaggaagtaactaggttaggagctgaagcacctgttgaagcaaacatgcctctaccttccgatgttgcggtgataatgtacacaagtggtagcaccggattgcccaagggagttatgatgacccaccgcaacgtcctggctacactctcagcagtcatgaccattgtgcctgcacttggcagtaaagatatatacttggcctaccttccacttgcacacattcttgagttggcagcagaggcactaatggctgctgttggggcctcaataggatatggatcacctttgaccctgattgatacatccaataaaataaaaaagggaactctaggtgatgcttctgcactaaagccaacattgatgactgctgtacctgctatacttgatcgtattcgtgatggtgtcaggaaaaaggtggatacaaagggtggtatagcaaagcaattgtttgacattgcctataaccgtcggcttgctgcaatcaatggaagttggcttggtgcctggggactggagaaactcttgtgggatacacttgtgtttggaaaggtgcgtgctattttgggaggaaagattcggtttgtactttcaggtggagcacctctatctggagatactcagagatttatcaatatatgccttggggctccaatagggcaaggttatggtctgactgaaacttgtgctggagggacattttcagagtatgatgacacatctgtcggtcgtgttggtgctccactaccttgttcgtatattaagttgattgactggcctgagggtggatacttgactgctgatttaccaatgcctcggggagaaattgtcattggaggtccaaatataactaaaggctatttcaagaatgaagctaaaacaaatgaagtctacaaggatgatgagaaaggtatgcgatggttctattctggagacatcggacggttccatccagatggctgccttgaaatcattgaccgtaagaaagatatcgtgaagcttcaacatggcgaatatgtatctctcgggaaggtagaggctgctttgattgtgagcccatatgtggagaacattatgatccatgctgatcctttccacaattactgtgttgctctcgtggtggctgcacacattgagctggaaagctgggcttcgcagcaaggaatcaaatacaacgatttctcagatttgtgccagaagcaagaggctgttaaagaagtgcttggatctttagcaaaggctgcgaagcaagcgcgacttgagaagtttgagataccagtcaaaatcaagctgataccagagccatggacccccgagtcgggactcgtcactgctgccctcaaactcaagagggaggtgatcaggaagacgtacgagaacgatctggctgagttggaggataaaggtcgatggcgacgg

SEQ ID NO: 13174 - DNA, 2560 bp, Zea Mays
gtgtgacgactgacgactgaggtctgacgaggcgtaaacctcgctgactcgccctgccgccgccccgccccgcccgcgcgttctccgccgtcgtccccggaaggtttttgcctcagggcatgtggatctgttagttcacctgctgcaagcaagtatagctatagggttgaccagtgcagaagtatgaatccttactttgttgggattcttgtccccgtcgcggtctccctgctgctccgcaagaggagaaaggcccaaaggatgaggggagtgccagttgaggttggtggggagcctggatatgcagtccgtaactatcgttttgaacaacctgttgagacacactgggagggggtgtccacacttgctgatctgtttgagcaatcttgcaaagagtatgtatacatgccactccttggcacaaggaagctcatttcaagggaaactgaagcagcacctggtgggagatcgtttgagaagctgcatctgggcgagtatgagtggaagtgttatgcagagtgcttcaagagcgtttgcaacttttcatctggactaattagagtaggtcaccagaagaatgaacgtgttgctatttttgctgagacacgggctgagtggcagattgggttgcaggcatgcttcagacaaaacattacagttgtcaccatctatgcctcattgggggaggaagctttgtgtcactcactaaatgagactgaggtcactactgtagtttgtggtcagaaagaactaaaaaagttgattgatataagtgggcaacttgacactgtcaagcgtgttgtctatatcaatgaggaaggcatctcaactgaagtttctttagctcaaaactgcactagctggatagttgaatcatttgaggaagtaactaggttaggagctgaagcacctgttgaagcaaacatgcctctaccttccgatgttgcggtgataatgtacacaagtggtagcaccggattgcccaagggagttatgatgacccaccgcaacgtcctggctacactctcagcagtcatgaccattgtgcctgcacttggcagtaaagatatatacttggcctaccttccacttgcacacattcttgagttggcagcagaggatatggatcacctttgaccctgattgatacatccaataaaataaaaaagggaactctaggtgatgcttctgcactaaagccaacattgatgactgctgtacctgctatacttgatcgtattcgtgatggtgtcaggaaaaaggtggatacaaagggtggtatagcaaagcaattgtttgacattgcctataaccgtcggcttgctgcaatcaatggaagttggcttggtgcctggggactggagaaactcttgtgggatacacttgtgtttggaaaggtgcgtgctattttgggaggaaagattcggtttgtactttcaggtggagcacctctatctggagatactcagagatttatcaatatatgccttggggctccaatagggcaaggttatggtctgactgaaacttgtgctggagggacattttcagagtatgatgacacatctgtcggtcgtgttggtgctccactaccttgttcgtatattaagttgattgactggcctgagggtggatacttgactgctgatttaccaatgcctcggggagaaattgtcattggaggtccaaatataactaaaggctatttcaagaatgaagctaaaacaaatgaagtctacaaggatgatgagaaaggtatgcgatggttctattctggagacatcggacggttccatccagatggctgccttgaaatcattgaccgtaagaaagatatcgtgaagcttcaacatggcgaatatgtatctctcgggaaggtagaggctgctttgattgtgagcccatatgtggagaacattatgatccatgctgatcctttccacaattactgtgttgctctcgtggtggctgcacacattgagctggaaagctgggcttcgcagcaaggaatcaaatacaacgatttctcagatttgtgccagaagcaagaggctgttaaagaagtgcttggatctttagcaaaggctgcgaagcaagcgcgacttgagaagtttgagataccagtcaaaatcaagctgataccagagccatggacccccgagtcgggactcgtcactgctgccctcaaactcaagagggaggtgatcaggaagacgtacgagaacgatctggctgagttgtacgcatgatggttctactctttttgatacgtttagtgtggaaaatgtgtagagtgtcaatgtcacgctgagatctatggtaatttgataccgattatcgttctgggattattattattattttgttcagttagaggagatatataaaccttgaagttttgagttatatggcttctcttgatgccgagaagctatattgcgatgattcctatgtgtttaggatataacgctttcgaattcttattgcgcttgttcatctcgtaccttgaggtaactactggtattgctgtctatagaattgtatgtacggtttcggtgta

SEQ ID NO: 13175 - DNA, 2061 bp, Zea Mays
gtgtgacgactgacgactgaggtctgacgaggcgtaaacctcgctgactcgccctgccgccgccccgccccgcccgcgcgttctccgccgtcgtccccggaaggcatgcttcagacaaaacattacagttgtcaccatctatgcctcattgggggaggaagctttgtgtcactcactaaatgagactgaggtcactactgtagtttgtggtcagaaagaactaaaaaagttgattgatataagtgggcaacttgacactgtcaagcgtgttgtctatatcaatgaggaaggcatctcaactgaagtttctttagctcaaaactgcactagctggatagttgaatcatttgaggaagtaactaggttaggagctgaagcacctgttgaagcaaacatgcctctaccttccgatgttgcggtgataatgtacacaagtggtagcaccggattgcccaagggagttatgatgacccaccgcaacgtcctggctacactctcagcagtcatgaccattgtgcctgcacttggcagtaaagatatatacttggcctaccttccacttgcacacattcttgagttggcagcagaggcactaatggctgctgttggggcctcaataggatatggatcacctttgaccctgattgatacatccaataaaataaaaaagggaactctaggtgatgcttctgcactaaagccaacattgatgactgctgtacctgctatacttgatcgtattcgtgatggtgtcaggaaaaaggtggatacaaagggtggtatagcaaagcaattgtttgacattgcctataaccgtcggcttgctgcaatcaatggaagttggcttggtgcctggggactggagaaactcttgtgggatacacttgtgtttggaaaggtgcgtgctattttgggaggaaagattcggtttgtactttcaggtggagcacctctatctggagatactcagagatttatcaatatatgccttggggctccaatagggcaaggttatggtctgactgaaacttgtgctggagggacattttcagagtatgatgacacatctgtcggtcgtgttggtgctccactaccttgttcgtatattaagttgattgactggcctgagggtggatacttgactgctgatttaccaatgcctcggggagaaattgtcattggaggtccaaatataactaaaggctatttcaagaatgaagctaaaacaaatgaagtctacaaggatgatgagaaaggtatgcgatggttctattctggagacatcggacggttccatccagatggctgccttgaaatcattgaccgtaagaaagatatcgtgaagcttcaacatggcgaatatgtatctctcgggaaggtagaggctgctttgattgtgagcccatatgtggagaacattatgatccatgctgatcctttccacaattactgtgttgctctcgtggtggctgcacacattgagctggaaagctgggcttcgcagcaaggaatcaaatacaacgatttctcagatttgtgccagaagcaagaggctgttaaagaagtgcttggatctttagcaaaggctgcgaagcaagcgcgacttgagaagtttgagataccagtcaaaatcaagctgataccagagccatggacccccgagtcgggactcgtcactgctgccctcaaactcaagagggaggtgatcaggaagacgtacgagaacgatctggctgagttgtacgcatgatggttctactctttttgatacgtttagtgtggaaaatgtgtagagtgtcaatgtcacgctgagatctatggtaatttgataccgattatcgttctgggattattattattattttgttcagttagaggagatatataaaccttgaagttttgagttatatggcttctcttgatgccgagaagctatattgcgatgattcctatgtgtttaggatataacgctttcgaattcttattgcgcttgttcatctcgtaccttgaggtaactactggtattgctgtctatagaattgtatgtacggtttcggtgta

SEQ ID NO: 13176 - DNA, 2498 bp, Zea Mays
atcaggttgagcacctgagatggaaagtggtcccacatcagacacagtgactgcagcttactcgtgttgccttcccacacctaaccccgctcggctccggtgctccactcctcccattcccagctaggctacctccaaggctccaaccatgtattcctatcccatcacaaccaagccaccaagatctgctaggacctagggctaccaggtgccagccttgccttcgatgcgggagcaggagcgccgctccccgccgatggagacgacaaggacggcttccaacgagccccagctgccagaatcaggcccaacaactgggcgatctgcggcggccatggcgaccggcgacatggccggcggtggcgctggcgagggggagcggggccccgacagcgtcctcccatcctcgccatgggtggctctgctgtccgtcgtcggctcccacattgccagaccggaattccagcgtaagccacgcagccatgcgccccgcgccgcgccggcccgcccgtggggctccaagttccccgctctcccaccggttgcgccggccaagatgaagccgacgaggaaggtaaggcataagcgccgccagcgcgtgcaccgtgccccgccgcttccggcggcggccatgaagaggctggcgaagaagcgggcgagggtgtgcacgctgtgcggcacaacccagacgccgtcgtggaggacttcgccggccgaccggctggtcatgctctgcaacgcctgcgggatccgagccaggacttccggggcggcgccgccggagcaggtgcacgtgcacgtgcacctccccacgccggcgacgacggtcgtcgtctccgatccagagcaaccggccccgctggagatcctccagggctcggagtacgagcacctccccacggcggcgacagtcgtcgtctccgcgcaagagcagccgcccccgcaggaggagatccagcagcgctcggagtccccgccggacagcccgtacctgaactccatgctggatttcgacgtgtacctgctgaagaggacacaccccaggcgcgagaagtctcctccgccgccgcctcctccgacggcgggaataaccgcggcggcgctggccccgccgccgaagggcaagaaagacaagcagaagaaaaaatggtgcctacactgcggcaccacctggagcctgcagtggaggacggggccgatgggcgtcagcacgctgtgcaacgcgtgcggcgtgcgctacaggcagggccgcctggtgccggagtaccggcctagggcgagccccacgttcgaccagtcggagcactcctacaagcaccgcaaggtgctccagctccgcgagatgcaggaccgcccggcgccaccggcagcgtttcggcctagcgggaacagaaagaagcgccgcaagggcaaggagcagcagcagcaccagcctgcacaagctcgcagtcgcagcgaagagcaggaccagcagcctgcgcaaccagccgcggtggcggtgctccaggtccgcaagaagagcgataagggcaaagcgcagcgcctgcctgatccgcaaccggcgttgcggctcaagcttcgcaaggagctcagggggaaacagcagcacctgcttcctcctcttcctccccctcctcctccacctgcgctgccgccgcatgctggttatgattatgacatgtcatcgtactcgtacctgcctctaccaccggcgttgcagcacgccgccggtgatgatgacgacatggagatggagcagcagcacctggtgcttctgccgccggcggcgtttcttctgcgcgctggtgatgagatggcgcagtacctgcctcctccgcctcctccaccggagctgccgcacgctgctgctgatgacgacatggagatggagtggcgcctgctgtctcttccgccggcgctgccgcacgccaccgatgagctgatggtgggtgagccgatgccgatccccccgctggacccgttcctgttcgacgggccggccgcgccaaggatcatcgacgacgacgacgacgacgagcccgccaccgtgatcgtgatcgacgacgacgagcccgcccccgtgatcgtggtcgacgacgacgacgacgacgtgcccgtcaccgtgatcgtggtcgacgacgactagctagctagctagcgcgtgcgctagaggctagcgataataataagggatcaatctagctgagccgtgatatggcatgttcgtctgcgaaactctacatctctggggcttcatgactccagtccagtcttctatttgctttctttcgcgcgcagaactccagagtcttcttgcccatgtaataatacagtgagaggtggccaaaacgggagggcgagacgtgatctgtagactgtaggtgcagtcctgagtgctgagaagaagaaatcgatctgaggtctgtctcgtttactctaggtctaggtaccaactgaagaatggacaatcctttgcttgttttactgtatcattatca

SEQ ID NO: 13177 - DNA, 2477 bp, Zea Mays
ggttgagcacctgagatggaaagtggtcccacatcagacacagtgactgcagcttactcgtgttgccttcccacacctaaccccgctcggctccggtgctccactcctcccattcccagctaggctacctccaaggctccaaccatgtattcctatcccatcacaaccaagccaccaagatctgctaggacctagggctaccaggtgccagccttgccttcgatgcgggagcaggagcgccgctccccgccgatggagacgacaaggacggcttccaacgagccccagctgccagaatcaggcccaacaactgggcgatctgcggcggccatggcgaccggcgacatggccggcggtggcgctggcgagggggagcggggccccgacagcgtcctcccatcctcgccatgggtggctctgctgtccgtcgtcggctcccacattgccagaccggaattccagcgtaagccacgcagccatgcgccccgcgccgcgccggcccgcccgtggggctccaagttccccgctctcccaccggttgcgccggccaagatgaagccgacgaggaaggtaaggcataagcgccgccagcgcgtgcaccgtgccccgccgcttccggcggcggccatgaagaggctggcgaagaagcgggcgagggtgtgcacgctgtgcggcacaacccagacgccgtcgtggaggacttcgccggccgaccggctggtcatgctctgcaacgcctgcgggatccgagccaggacttccggggcggcgccgccggagcaggtgcacgtgcacgtgcacctccccacgccggcgacgacggtcgtcgtctccgatccagagcaaccggccccgctggagatcctccagggctcggagtacgagcacctccccacggcggcgacagtcgtcgtctccgcgcaagagcagccgcccccgcaggaggagatccagcagcgctcggagtccccgccggacagcccgtacctgaactccatgctggatttcgacgtgtacctgctgaagaggacacaccccaggcgcgagaagtctcctccgccgccgcctcctccgacggcgggaataaccgcggcggcgctggccccgccgccgaagggcaagaaagacaagcagaagaaaaaatggtgcctacactgcggcaccacctggagcctgcagtggaggacggggccgatgggcgtcagcacgctgtgcaacgcgtgcggcgtgcgctacaggcagggccgcctggtgccggagtaccggcctagggcgagccccacgttcgaccagtcggagcactcctacaagcaccgcaaggtgctccagctccgcgagatgcaggaccgcccggcgccaccggcagcgtttcggcctagcgggaacagaaagaagcgccgcaagggcaaggagcagcagcagcaccagcctgcacaagctcgcagtcgcagcgaagagcaggaccagcagcctgcgcaaccagccgcggtggcggtgctccaggtccgcaagaagagcgataagggcaaagcgcagcgcctgcctgatccgcaaccggcgttgcggctcaagcttcgcaaggagctcagggggaaacagcagcacctgcttcctcctcttcctccccctcctcctccacctgcgctgccgccgcatgctgtcatcgtactcgtacctgcctctaccaccggcgttgcagcacgccgccggtgatgatgacgacatggagatggagcagcagcacctggtgcttctgccgccggcggcgtttcttctgcgcgctggtgatgagatggcgcagtacctgcctcctccgcctcctccaccggagctgccgcacgctgctgctgatgacgacatggagatggagtggcgcctgctgtctcttccgccggcgctgccgcacgccaccgatgagctgatggtgggtgagccgatgccgatccccccgctggacccgttcctgttcgacgggccggccgcgccaaggatcatcgacgacgacgacgacgacgagcccgccaccgtgatcgtgatcgacgacgacgagcccgcccccgtgatcgtggtcgacgacgacgacgacgacgtgcccgtcaccgtgatcgtggtcgacgacgactagctagctagctagcgcgtgcgctagaggctagcgataataataagggatcaatctagctgagccgtgatatggcatgttcgtctgcgaaactctacatctctggggcttcatgactccagtccagtcttctatttgctttctttcgcgcgcagaactccagagtcttcttgcccatgtaataatacagtgagaggtggccaaaacgggagggcgagacgtgatctgtagactgtaggtgcagtcctgagtgctgagaagaagaaatcgatctgaggtctgtctcgtttactctaggtctaggtaccaactgaagaatggacaatcctttgcttgttttactgtatcattatca

SEQ ID NO: 13178 - DNA, 417 bp, Zea Mays
tacaaaatcatttaaccccaaactccgtacattgcttaactgcatccagcacaaggcattacagcctgtccacccgattttccgctattgtgtgacattgttctgtcaggacaggggtaacactagaagctccaagttcctaaataggaaaacaaaacagacttagaagtagacaatgaataagaagacccaaaatgtatgtaacatacaatacatttctctataagccaatccgcacgtccgcctttcagtgtccttggatatctcttcaactcacactggatgaggtcataggggaatgggcagagctgctcaactctacatatagcaacatcagtgcgctccgtcttccttctttcttcatccagttcgtagtacacctttccagagcaaagaactagacggttaattccctcc

SEQ ID NO: 13179 - DNA, 3523 bp, Zea Mays
caacaatttttttttttttgcgtcgccgcctgggattcctcccccgtctctccacctgcgttccccacgccggccctcacctgcgctcccctgcctcccccgcctggcgtatcagcagcgcgaccatgccggccaatcaaaagagctcccacgcttcccagtacgttctgtccaggccgaagccgccagttctatccagcaacaggtgtttaacaaccacactgaaaatacaaatttaggtactgatatgttggatcaagcagcactaatcattaagaagtgtcatggacttccccttgcaatatctgcaataggtggattcctagctaataagcccaaaactgctactgaatggaggaaggtcaatgatcgcatcagggctgaattggacatgaatccggaacttaggagtataaagacagttcttatgaggagctatgacggtttaccataccatctcaagtccgctttcttatacatgtccatatttccagaagattacaaaattaagcggaaacgtttgataaggagatggattgctgagggttactgtagaggaatgcatggcatgagtgcagaagaagttggtgacagatattttgaggagcttttggataggagcatgatcctgctgttggaagaggacactaagtatggtggggccattgattcttgtcagcttcatgatatcatccgtgaaatatgcatactaaaggctagggaggaaaaccttgcttttactctggaggaagggtgttgtttgagcgacgcacaaggtacaatacgtcatcttgctataggcagcaactggaaaagagataaagatgtactggtggagagcatgctggacttgtcgcatgtgcggtcattgaccgtgtttggagaatggaaaccattttttatttctgataagatgaggtttctcagagtgctcgatttgggtgatacatttgggttaagagatcgtcatcttgatcagattggccagctccttcacctgaagtacctgtctatacgaggatgttacgatatctgctgccttccaagttgtttgggaatgaaatctgaggcacctccaaactctggatgtaaaagctgtctcattccagatttcgagaatcacctgatatatgaccccagatctgtatcccatgatgccatgccgaggatagtccaagatgcttttcttttgtggcatagtgaaatgtcagatggctccagacgagtaagggagtatgttcccatgagaaagaataattgctgcacatctttgctataccacatccgtatgggtctactacggttcatctttggcttgtcaatttgctatttctgctggaggccagaagctatgggtgcaggtttcaacaggcgagatgtattcaacttcaacatgatatccaccttaaatatgattctatttgggggcgttaaagctcctagaggaatcaggaaactgaaagccctgcacacactaggagttgtcgatgtttcacggagcaagaccgctctgaaagaacttgaagagcttactcagctacgtaagcttgctgtggctggggtgcacagcaaatacagcaacaagttctggtctgtcatttccgctaacaagcaactccgatctctgtcagtgaagggtttagggttagatagttgtttcggtggggatttgttgccaccaatacaccttgagagcctcaagctggaaggcaagctggtcagaataaatgagtggatccataagcttcagaatctatccaagttgcagctgtataataccaaaattgactcagctgatcccatgcaagctattggacagctaccaaatcttacaatgctgactctgtgtcatggttcttttatggacaacagcgagctccttttccatggtccatcttctttcccggagctcatggtgctgaagctcaaagacgtagattgcgagatagtatcttttaaagaacaggcaatgccgaagctcgagctgatacacgctgattttcaggggggaatttgtgggctagcatttctcgcgagcctcaaggaaattcggctgggtactagaaccagagacacattgaagaaagatctgcagaagcagctcacaggagatctagaacgtatgaagaaaattaacactttgtacaggtgcaaggttctgatgagcaagatttccccagcaactcggattattcgtctgaggatccaagagccacttcaaccaaggtttagccctattctttgctcatgctttgtttctttgatggactcagcagactccatagccgacaaggcaattggaaggatgcaagagatttccgacaagatattttccgtagcgagggaaacaatccggcctggacgcgggttgacctcatttgatgctaccaaactacgtgtagctttggaggagatagcttgcatgctggagcaagactccctggtgttgcaagagcatttggacatcgtgaacaactttaacatcccggttgacagcagctatgaaccttctaccttgtcgtcaccacccccatctgacgacgacctgactccacattgggactttacggagcatttcgaaaacttctggggagttgaatatgactccgatcagatgccttcgtttagtgacaatgatatggacaagtccggcaaagtgattgctaagtgggatagtagagcaaccaaaattttcacagaaatttgtgtagaagaggtcaatgctcgcaacaggccacaacaattcctaaatgcagaagggtatgctaacctgataaggaagttcaaggaacgcactggtcgcacttacaccagggatcaaatgaagaataggtgggactcgttgaagagaatgttcacccagtggaaaactcttaatgaaagggctacaggtcttggtcgagaccctcatactggttcaatcagtgcgccagatgagtggtgggcgaagcaaaatgaagactacgaattggtgcaggcaatgccaggttgtattatgttcaaaacaggccccctagagaatgaggacgagctaaaggttatgtttggacccattgtctgcacaaatgaaagaaccctggttcctggcgtggaggacgctaattcatcatctgatgatcatttggaccacacttttggtgggggtgaaaacagcacacctgacccctgcacaaatacaactggtaagcgtaagatgcgccatgattcccctaaaccaaagaagaaaaaagattcgagggaagagtacatgaaaagacttgtggaggcttttgagtcccgctcaatgaccacgaacaagtccattacctcttctgagaatgacccggtccgattagagattaaaaagcagttgcttcaagtaaaggaagatggatcacctgaagggagcgaactacatttgtttgcgactcatcttctgattcataagaagtatagagatgtttttgcaaacttggagacaaaagaaggaagaatcgcttggcttcgcaatgcttacgagttagaaactaagaagaccacttag

SEQ ID NO: 13180 - DNA, 4161 bp, Zea Mays
atgtcctttccgctcccgtcccttccgctcccgtcccttccgctcccgtcccctgaccttccacctccggccgacgcctcagcccctccaacccacagcctcacgccggtcatcctcccaaggccggcggccacccaacctgctaccccggcgtcggcctcctctcctctcttcgcccagtctgtagcggttcttcctggtggccgttcaaaggcacaacgatggttgtgggacgtcggtctcgccgtcgaagtccctgcccccctcttcccttgcacccccagacccgttcctgttgatttacgtgggaagtgcttcaactgtttctcaccgtcccaccgtgcggctgactgtggcagtttggtgcggtgcttccattgccgcctgcctgggcatcgggtgcgcgcgtgtccacgtcggaagaagactctgcatcacccagcgaaggtgttggtgtggcgtccagttcccaggaaggtcgtcccggagaaagttcctctctgtgatatggaaggtgtttcgcgggtcggcggtgatggtgatggaatgaagaagatgaagcgcactcgccgtggacagaggcgtcgaaggatggaccgggaggacttgggcgcacctggtcgggtctcatcattggcttcttcttccttgccttcggtggtgcacccccctcgctcgcatatccttaagcattcaaggttgatcgaccaggcggaggaggattttcagcgtgctctgatcgtcaatgttcttggccaagagggttctgactgcgccgctgtgattttggaggcgctcgcctcgaagtatggtcttgaggctgatgcgctccaaatccgacgtgctgcgtccaacttgtacctggctttcttcccctccgtggaacacgctgttcgcgccttggctggtggacattcctttcaataccccccctccggctgcatcttaggaggtggtcacgtcaggcatcagcttctggtggagggattacatccggattctgttgatgggacggatttgtcagttctgaaactgaaggcttggggtttctctatggattgcttgccctctcgctatgatctccatgttgaagagccgacgtctattggtgaagatggatcctgcttccctcgcacattgatttactccgtttcggtgaaggtgactactccggttgcattgccggttgaggagcagcctctgttttcctccccggatgatgatgaagatcgggatagcaagcatcagcgtcagaggaagcaccttccaaatcatcagttctctgcggtccggacctccgttcatgcacggttgggaccacgtatcactccttatgggggaggtggaacagttgatgccgctcctcttccaaattcctcggttgatgagttgcaggcgcctgttcactccgtccctggcaatccttcatctcctgcattaggggcgccaattattgccaatattagaccccttcctgcttcagttggggattctgtagtttccaccgttcctttggaatcaacatttaatttggaggagcaatctgagtcaagatttctggtttcttcatgggactacaatatcagggccaaacctccctgcttcaaggtttatgctcgtaaaaaaatctcggttcagctagcacagtctgaggagattggaacttctactcctttgcagaaatttaaagatggaattacaaaacagatcaatggaatcctgccagcccctatccaaccagtcaaacgaaagagaaagctgattcctagcaatttcaaccaaaggcgaagcaggagggtggccaagataccacctgaattaggctctccctctgctgcaaagccagctcattgttactatcctcttgagaaagtgtccatgaagctgaagagattgtccaaaagactacagtcttgggggcataaaatggtgggtaatgttgagactcaattgggtttggctcgcgaggtgttgcacagactggagattgcccaggatattaggaccctggctgtggaagaggtgtttaacaaccacactgaaaatacaaatttaggtactgatatgttggatcaagcagcactaatcattaagaagtgtcatggacttccccttgcaatatctgcaataggtggattcctagctaataagcccaaaactgctactgaatggaggaaggtcaatgatcgcatcagggctgaattggacatgaatccggaacttaggagtataaagacagttcttatgaggagctatgacggtttaccataccatctcaagtccgctttcttatacatgtccatatttccagaagattacaaaattaagcggaaacgtttgataaggagatggattgctgagggttactgtagaggaatgcatggcatgagtgcagaagaagttggtgacagatattttgaggagcttttggataggagcatgatcctgctgttggaagaggacactaagtatggtggggccattgattcttgtcagcttcatgatatcatccgtgaaatatgcatactaaaggctagggaggaaaaccttgcttttactctggaggaagggtgttgtttgagcgacgcacaaggtacaatacgtcatcttgctataggcagcaactggaaaagagataaagatgtactggtggagagcatgctggacttgtcgcatgtgcggtcattgaccgtgtttggagaatggaaaccattttttatttctgataagatgaggtttctcagagtgctcgatttgggtgatacatttgggttaagagatcgtcatcttgatcagattggccagctccttcacctgaagtacctgtctatacgaggatgttacgatatctgctgccttccaagttgtttgggaatgaaatctgaggcacctccaaactctggatgtaaaagctgtctcattccagatttcgagaatcacctgatatatgaccccagatctgtatcccatgatgccatgccgaggatagtccaagatgcttttcttttgtggcatagtgaaatgtcagatggctccagacgagtaagggagtatgttcccatgagaaagaataattgctgcacatctttgctataccacatccgtatgggtctactacggttcatctttggcttgtcaatttgctatttctgctggaggccagaagctatgggtgcaggtttcaacaggcgagatgtattcaacttcaacatgatatccaccttaaatatgattctatttgggggcgttaaagctcctagaggaatcaggaaactgaaagccctgcacacactaggagttgtcgatgtttcacggagcaagaccgctctgaaagaacttgaagagcttactcagctacgtaagcttgctgtggctggggtgcacagcaaatacagcaacaagttctggtctgtcatttccgctaacaagcaactccgatctctgtcagtgaagggtttagggttagatagttgtttcggtggggatttgttgccaccaatacaccttgagagcctcaagctggaaggcaagctggtcagaataaatgagtggatccataagcttcagaatctatccaagttgcagctgtataataccaaaattgactcagctgatcccatgcaagctattggacagctaccaaatcttacaatgctgactctgtgtcatggttcttttatggacaacagcgagctccttttccatggtccatcttctttcccggagctcatggtgctgaagctcaaagacgtagattgcgagatagtatcttttaaagaacaggcaatgccgaagctcgagctgatacacgctgattttcaggggggaatttgtgggctagcatttctcgcgagcctcaaggaaattcggctgggtactagaaccagagacacattgaagaaagatctgcagaagcagctcacaggagatctagaacgtgtcagtctgaagctgttgtaactgatccagccggcaggacaaacaccttgctgtttgtgacaacggttctgaggttggaccgttggaaaaggtccagactagggggtggaaaaggtccagactgatcccgttctgccatttctacattcaacctgctcaaattcgtatttgcagttatcccaatcgttttcgcattttttttatgtatttggcaaatttgag

SEQ ID NO: 13181 - DNA, 1625 bp, Zea Mays
gatcattcaccgctctactaccacctgcccggtcttcctgaatcctgcccagttaacaccaccatcagttcagttgagcatgtcgtcgccggcggccgtgctcgtcagcaatggcgccatctccccgcacgcccctccttcctcgactccactccgggcgcctacgccactgcccctggaaccctcctctggtcgacaccccacctcggccgcctcgccgaatttgccacgctcctttcccgttcccaccccaacctgctcggcctccccctcccccgatcgctcgccctcgacctcgacttcctatccatccattctctcgtgaacccctccgtacgggtcgccatctgcgagatgcgcactaggatacccatgaccaggacgaggatttggcgctcacggccctgatcaggggagccgatcccatttctggcggtggcgggcccagcctcgacgtcgtccacgtgggtacgtataccccgccggtattcggagagtcggggaagggacgccgccgctgccagccaagatccggaagagcttggaaaagatgaggccctcctggggtcactgagctcttgctgactaatgaaggggatcacattcttgaaggcgctgtcacaaacttctttgttgtctgccaacaaacaagtccaacttctaagacaccttcttgtgattttttttaccgatacaatatgaaggagaatccttctgcacttatactgatgaatgccaatgatattatagagttctcagtactcatcacttaactagtattatgctgtttttgttcctcagaaccgagaaatgagtataaccatccatgtaatggcaaccacaagtgaaggagagggacgcgagaggaaaggaaaattctcgaatcaaacaatgcctactaagtttgaagtgcaaacagcgccattgagtgatggagttcttgggattatacgtcagatagtgatagagtaaatattctttgatactctgaattccgcgtgctttggctttatcatcttatatgattttggagagagtgaagaaaatttcaggatactgtatactgataaagtagctgagaggcatcttatgcttgctttgagattaccttgtttgatctcatacttttgcactctgtactttctgcactaggtccagtgacatatgctagacctaataatcgcatactaaaggagttgcgtaagagggagtgattgacgttgttatcctgactgagttatcatgagttagagataattaccaaatgctgatgccttgcaacatatgctgtatttctttggaacagggtgtgccatgatattggaatcccagtacgagaaatctcacaactgcaaactactgaaagcagtaccatatgtttgtcatttgttcagaaacaatattatttgcacctgcaagtctgcaggcgagctccaacgacgaacactggcgtccaaacgagtccccccggcgagcaggcgagctccaacgcggcaagagggcgatcttcggcgcagggaactccggcgcgggcggcggctgggtgcccgccggaaacaaatagatcgctcaaagcaaagtcaggggtagcattggaaatagaaaaatacgaatacttgccggtg

SEQ ID NO: 13182 - DNA, 1636 bp, Zea Mays
ccaccatcagttcagttgagcatgtcgtcgccggcggccgtgctcgtcagcaatggcgccatctccccgcacgcccctccttcctcgactccactccgggcgcctacgccactgcccctggaaccctcctctggtcgacaccccacctcggccgcctcgccgaatttgccacgctcctttcccgttcccaccccaacctgctcggcctccccctcccccgatcgctcgccctcgacctcgacttcctatccatccattctctcgtgaacccctccgtacgggtcgccatctgcgagatgcgcactaggatacccatgaccaggacgaggatttggcgctcacggccctgatcaggggagccgatcccatttctggcggtggcgggcccagcctcgacgtcgtccacgtgggtacgtataccccgccggtattcggagagtcggggaagggacgccgccgctgccagccaagatccggaagagcttggaaaagatgaggccctcctggggtcactgagctcttgctgactaatgaaggggatcacattcttgaaggcgctgtcacaaacttctttgttgtctgccaacaaacaagtccaacttctaagacaccttcttgtgattttttttaccgatacaatatgaaggagaatccttctgcacttatactgatgaatgccaatgatattatagagttctcagtactcatcacttaactagtattatgctgtttttgttcctcagaaccgagaaatgagtataaccatccatgtaatggcaaccacaagtgaaggtcatatgcattttcctttcgcaatttttttcaccatttcagatccttctactctactatttacgtctgctgctgctgctgctgccttaatcattgtcctatcatcatataaacgcacttactgattaattgtctgggctaaaatgacaacccttggtgccttcctatgagtggattctaggatgtccaagcctccaaggaattaccagatgtctctacgcttttcagattttattgttgtatttacctgatgtctctagaatcacccgcagcatatagccagccacatggatcttcactactagtggtgtttactgcaatttctaaacttaaacaagtgcattgtcattttggaattttgaatattttttttacttctgtacaataactgatgtatttctccataggagagggacgcgagaggaaaggaaaattctcgaatcaaacaatgcctactaagtttgaagtgcaaacagcgccattgagtgatggagttcttgggattatacgtcagatagtgatagaggtgtgccatgatattggaatcccagtacgagaaatctcacaactgcaaactactgaaagcagtaccatatgtttgtcatttgttcagaaacaatattatttgcacctgcaagtctgcaggcgagctccaacgacgaacactggcgtccaaacgagtccccccggcgagcaggcgagctccaacgcggcaagagggcgatcttcggcgcagggaactccggcgcgggcggcggctgggtgcccgccggaaacaaatagatcgctcaaagcaaagtcaggggtagcattggaaatagaaaaatacgaatacttgccggtg

SEQ ID NO: 13183 - DNA, 1687 bp, Zea Mays
ccatcagttcagttgagcatgtcgtcgccggcggccgtgctcgtcagcaatggcgccatctccccgcacgcccctccttcctcgactccactccgggcgcctacgccactgcccctggaaccctcctctggtcgacaccccacctcggccgcctcgccgaatttgccacgctcctttcccgttcccaccccaacctgctcggcctccccctcccccgatcgctcgccctcgacctcgacttcctatccatccattctctcgtgaacccctccgtacgggtcgccatctgcgagatgcgcactaggatacccatgaccaggacgaggatttggcgctcacggccctgatcaggggagccgatcccatttctggcggtggcgggcccagcctcgacgtcgtccacgtgggtacgtataccccgccggtattcggagagtcggggaagggacgccgccgctgccagccaattttggttgctgcctaagatggtgagctgatgttccattccttaccgcacgtaggatccggaagagcttggaaaagatgaggccctcctggggtcactgagctcttgctgactaatgaaggggatcacattcttgaaggcgctgtcacaaacttctttgttgtctgccaacaaacaagtccaacttctaagacaccttcttgtgattttttttaccgatacaatatgaaggagaatccttctgcacttatactgatgaatgccaatgatattatagagttctcagtactcatcacttaactagtattatgctgtttttgttcctcagaaccgagaaatgagtataaccatccatgtaatggcaaccacaagtgaaggtcatatgcattttcctttcgcaatttttttcaccatttcagatccttctactctactatttacgtctgctgctgctgctgctgccttaatcattgtcctatcatcatataaacgcacttactgattaattgtctgggctaaaatgacaacccttggtgccttcctatgagtggattctaggatgtccaagcctccaaggaattaccagatgtctctacgcttttcagattttattgttgtatttacctgatgtctctagaatcacccgcagcatatagccagccacatggatcttcactactagtggtgtttactgcaatttctaaacttaaacaagtgcattgtcattttggaattttgaatattttttttacttctgtacaataactgatgtatttctccataggagagggacgcgagaggaaaggaaaattctcgaatcaaacaatgcctactaagtttgaagtgcaaacagcgccattgagtgatggagttcttgggattatacgtcagatagtgatagaggtgtgccatgatattggaatcccagtacgagaaatctcacaactgcaaactactgaaagcagtaccatatgtttgtcatttgttcagaaacaatattatttgcacctgcaagtctgcaggcgagctccaacgacgaacactggcgtccaaacgagtccccccggcgagcaggcgagctccaacgcggcaagagggcgatcttcggcgcagggaactccggcgcgggcggcggctgggtgcccgccggaaacaaatagatcgctcaaagcaaagtcaggggtagcattggaaatagaaaaatacgaatacttgccggtg

SEQ ID NO: 13184 - DNA, 1280 bp, Zea Mays
ccatcagttcagttgagcatgtcgtcgccggcggccgtgctcgtcagcaatggcgccatctccccgcacgcccctccttcctcgactccactccgggcgcctacgccactgcccctggaaccctcctctggtcgacaccccacctcggccgcctcgccgaatttgccacgctcctttcccgttcccaccccaacctgctcggcctccccctcccccgatcgctcgccctcgacctcgacttcctatccatccattctctcgtgaacccctccgtacgggtcgccatctgcgagatgcgcactaggatacccatgaccaggacgaggatttggcgctcacggccctgatcaggggagccgatcccatttctggcggtggcgggcccagcctcgacgtcgtccacgtgggtacgtataccccgccggtattcggagagtcggggaagggacgccgccgctgccagccaattttggttgctgcctaagatggtgagctgatgttccattccttaccgcacgtaggatccggaagagcttggaaaagatgaggccctcctggggtcactgagctcttgctgactaatgaaggggatcacattcttgaaggcgctgtcacaaacttctttgttgtctgccaacaaacaagtccaacttctaagacaccttcttgtgattttttttaccgatacaatatgaaggagaatccttctgcacttatactgatgaatgccaatgatattatagagttctcagtactcatcacttaactagtattatgctgtttttgttcctcagaaccgagaaatgagtataaccatccatgtaatggcaaccacaagtgaaggagagggacgcgagaggaaaggaaaattctcgaatcaaacaatgcctactaagtttgaagtgcaaacagcgccattgagtgatggagttcttgggattatacgtcagatagtgatagaggtgtgccatgatattggaatcccagtacgagaaatctcacaactgcaaactactgaaagcagtaccatatgtttgtcatttgttcagaaacaatattatttgcacctgcaagtctgcaggcgagctccaacgacgaacactggcgtccaaacgagtccccccggcgagcaggcgagctccaacgcggcaagagggcgatcttcggcgcagggaactccggcgcgggcggcggctgggtgcccgccggaaacaaatagatcgctcaaagcaaagtcaggggtagcattggaaatagaaaaatacgaatacttgccggtg

SEQ ID NO: 13185 - DNA, 999 bp, Zea Mays
ctggtgctggtccgagcaagccttcggcggctcctcctccagcggcgacgacaacgcgggcgtgtgaccttggaacaaggcgacgtgcgcgaagagcttgtccttcctcgagaaactcgtcccgcaggagcacacccacctgtcccggcggccgcagtgcttctcgtgcgtcctcaggtcggccacgatggagaacttcttggcgtggcaccggccgcaggtgtggctcttctcgcagtggctccgcctgtagtggttcttcacgcacaggatggtcttgaggggctggaagcttttgtgcagcttgttccgcttgcaccccgcgaacgggcacgagtaccgccgcttcgccggctcctgctccgcgcccgggtccctcggcggcttggccagcgccgccgggctcttgtactcgtcgccgtgccctcgcatgtgcatccgcaggttcgcgtcccgcttgaaccctttcccgcagatggtgcaaaagtgcgtgtgcggcgccagtatctcgtcctcctccagctgcagcagctcgtacgagaggctgtctccgtccttggtaatttcctgctcctcgacaagaacgccgtcgtcgtcgacctcaatgccgccatcggtccatcccttgaacagctcctcatagtcttcagaaacggtcatcgcattaggcactaggctcgagcttgggccaacatggttagccatgtccacgtggccagcagggtgggggtggctgaggaacgacgagttcttcagtgacgggagcaggctgccggcggtggagatgagctgaactataaggcatgtcaggtccgcgttgaccacctgctgcttctgcttctgagccagcagctcgcctgcttggtggtggcactggacctgcacctgcccggcgttgtccaccattgtgcggatgacgtccttcacttgctgtatcttctcctcgatgaaggtgaggttgtctagcatcgtggccgggttccagtccatgtgcgggat

SEQ ID NO: 13186 - DNA, 1570 bp, Zea Mays
gtgaactacgacgcgcctaaatttatgccgtggcggttagggcagtgacaaaaggggaagcgagaccgccgccacatgcctcctggcctcctacctcgcggctgcctcctcctcgtcgttccccatcttcgccgccacttgccggcgctttgttctactcttcgaagcagccactcgcataagcgccccgcggttatcttctcccccgtacgtgccgtctccggctactccgccatggcggctggttcgccggagcagcagcagcggagcgttgtggtcaaggagactgtggagctcacggagacggaggagcgcatctttcgccgccttctcgaggttgttcgccacttcagtctcggcacgcagctccgcgtcgccggcggatgggtccgtgataagctattagggaaagactccgctgacattgacattgcccttgacaatatgacgggtcagaatttctgtgagaaagtaaatgagtactcaaagttgataggggagcagcagaaaggaatcggtgttatccaatgtaaccccgatcaatccaagcacttggaaactgctaggatgcttattcttgacatctggattgattttgttaacttgcggtctgaaacatatactgaaaacagccgtatccctacaatggagattggtactgccaaggaggacgcataccgcagggacttgacaattaatagcttgttctttaatatcaacaataactcggttgaagatttaactggaagaggtattgaggatctcaagaagggccttattgttactcctttacccgccaaagctaccttccttgatgacccacttagagttcttcgagcaataagattcgctgctagattcaactttacattagatgaagatttgaaggaagctgcatctgatgaaaaggtgaagtcagagcttggcacgaagattagtagagaacgtatcggtcacgagattgatctcatgatgtcagacaaacaccctgttaaagcaatgtgtgacatccgcgatttggggctattttatgttgtattttcttttcctgaaaaatccaaccctcctgtttttgacaagtgtgattggcagtgtgtttcacatattgaagcagcttgggatcttgcatattctattggcagctgtgtgttcagcagtggttctgactccaagtcgcaggatgagcgaagaaggctgtacttgtatagtgcattattcaaccccctccgaagtatgttctacctggacaaaagatctaagaaggtaacaataaagttgtgcatcatctgatttttctttttttttctaatgcaaggctctgaaaattttgtaatggttcagtttgtccatttgtgtcactaataagtcatttaaaagcaactatcaattggtacatttacttgatagtattatgctatattaactggagaggcaagcttgcagtgccatgactatttctttttttcagcatgcaacattatgtgcagtgttcttgatgctttttcttaatcatcataacacactttaactgtttaagcagccaaaaaaattatttgttatatctactagg

SEQ ID NO: 13187 - DNA, 1291 bp, Zea Mays
gtgaactacgacgcgcctaaatttatgccgtggcggttagggcagtgacaaaaggggaagcgagaccgccgccacatgcctcctggcctcctacctcgcggctgcctcctcctcgtcgttccccatcttcgccgccacttgccggcgctttgttctactcttcgaagcagccactcgcataagcgccccgcggttatcttctcccccgtacgtgccgtctccggctactccgccatggcggctggttcgccggagcagcagcagcggagcgttgtggtcaaggagactgtggagctcacggagacggaggagcgcatctttcgccgccttctcgaggttgttcgccacttcagtctcggcacgcagctccgcgtcgccggcggatgggtccgtgataagctattagggaaagactccgctgacattgacattgcccttgacaatatgacgggtcagaatttctgtgagaaagtaaatgagtactcaaagttgataggggagcagcagaaaggaatcggtgttatccaatgtaaccccgatcaatccaagcacttggaaactgctaggatgcttattcttgacatctggattgattttgttaacttgcggtctgaaacatatactgaaaacagccgtatccctacaatggagattggtactgccaaggaggacgcataccgcagggacttgacaattaatagcttgttctttaatatcaacaataactcggttgaagatttaactggaagaggtattgaggatctcaagaagggccttattgttactcctttacccgccaaagctaccttccttgatgacccacttagagttcttcgagcaataagattcgctgctagattcaactttacattagatgaagatttgaaggaagctgcatctgatgaaaaggtgaagtcagagcttggcacgaagattagtagagaacgtatcggtcacgagattgatctcatgatgtcagacaaacaccctgttaaagcaatgtgtgacatccgcgatttggggctattttatgttgtattttcttttcctgaaaaatccaaccctcctgtttttgacaagtgtgattggcagtgtgtttcacatattgaagcagcttgggatcttgcatattctattggcagctgtgtgttcagcagtggttctgactccaagtcgcaggatgagcgaagaaggctgtacttgtatagtgcattattcaaccccctccgaagtatgttctacctggacaaaagatctaagaagggcaagcctggtgcagcggtgagagtcg

SEQ ID NO: 13188 - DNA, 2221 bp, Zea Mays
atttatgccgtggcggttagggcagtgacaaaaggggaagcgagaccgccgccacatgcctcctggcctcctacctcgcggctgcctcctcctcgtcgttccccatcttcgccgccacttgccggcgctttgttctactcttcgaagcagccactcgcataagcgccccgcggttatcttctcccccgtacgtgccgtctccggctactccgccatggcggctggttcgccggagcagcagcagcggagcgttgtggtcaaggagactgtggagctcacggagacggaggagcgcatctttcgccgccttctcgaggttgttcgccacttcagtctcggcacgcagctccgcgtcgccggcggatgggtccgtgataagggaaagactccgctgacattgacattgcccttgacaatatgacgggtcagaatttctgtgagaaagtaaatgagtactcaaagttgataggggagcagcagaaaggaatcggtgttatccaatgtaaccccgatcaatccaagcacttggaaactgctaggatgcttattcttgacatctggattgattttgttaacttgcggtctgaaacatatactgaaaacagccgtatccctacaatggagattggtactgccaaggaggacgcataccgcagggacttgacaattaatagcttgttctttaatatcaacaataactcggttgaagatttaactggaagaggtgagtttgatggtacaagttcaagtaatgttttacaatgttcatgctgctatgtcatcatgaaggtattgaggatctcaagaagggccttattgttactcctttacccgccaaagctaccttccttgatgacccacttagagttcttcgagcaataagattcgctgctagattcaactttacattagatgaagatttgaaggaagctgcatctgatgaaaaggtgaagtcagagcttggcacgaagattagtagagaacgtatcggtcacgagattgatctcatgatgtcagacaaacaccctgttaaagcaatgtgtgacatccgcgatttggggctattttatgttgtattttcttttcctgaaaaatccaaccctcctgtttttgacaagtgtgattggcagtgtgtttcacatattgaagcagcttgggatcttgcatattctattggcagctgtgtgttcagcagtggttctgactccaagtcgcaggatgagcgaagaaggctgtacttgtatagtgcattattcaaccccctccgaagtatgttctacctggacaaaagatctaagaaggctcctgtttctagctttattatcaaggactcgctaaagttgaaaaccagcgatgctgaaacggttgtcaacatacatgctgctagcgaaaagtttgctgagttgattcctctcctcgagtcaaacgctgacgtgtatgctctcaaagagaagctggaagatgagtaccttgagataccaggagacagcgtgaagcgtgtttttgcagggcttatactccgagaaataaaggagttttggcgggtggcgctgcttctatccattctcttctaccgagaaactggaactcctgctggcaccctcgacgagcaggacgagctgcgtcggaggaaagagaaatacatcagagcagagcgttccataaccgacctagatcttgacggggtgtggaagctgaagccgatactcgacgggaaatcgattatgggagtcatgcaggtcaagtccggaggtccactgataggaaaatggcaacaacgtgtgctgaagtggcagcttgcgcatccggacggaaccgtggacgagtgcgtcgagtggatgaagcagtcgcagtcaaaacgacagaaagtggagtccagcacctgataatcaaaattgacagtttggtcgtagtcagttttcagataggttagcaactgcctgccccttgcaaacagtttttttgcgtagacggtgaactcttgctgctaagacagccagttctcccttgttcgaaacctgtcctgaacgtagagtgagagacgaaagagagagagagagatggtaatctataatattaaaatatagcatgaatataattgtcctgagcacaaaaagaaatatagttgtcctgagctcgtagtatatatgtccataagcctcaaattggaaagacgataagccaccctcgcacttggcaagactgataagtgcctgctgga

SEQ ID NO: 13189 - DNA, 2307 bp, Zea Mays
ctcgtgccgcgcttcccaatcctctcctcgggccgcttccccatctgctgggctccgcccgccattaattcctgccgttcccatccatatcaagcttccccttcaaccccaagctcgctcacaggccatatcacatggtcccgctcgagccccgccgctgacgctgacggatgtccctcgcgggtgcgggtgcggccgcgttgcggaagcccgccacgtggcggcgcccgggcggccgcggggtggcgcggaggcgcgtcgcggtcgccgccctgctcctcgcgctcgcctacgccggggggctgctcatgttcctgctcgacgagaggctatccggcggctccgtgggcggggctgcggcgggaggcctgggtccgatggtgacggtggcttcctccgtccgccgccgccgccccctccctagccccgcggacgcgccccctcatgctcagcccgggtcggtgtaccgcagccacctcgtgttcgagcgtctcttgccggccatgcgcgacgacgccacgctcgcctcctccctctccgcctcggcctcgtggcgccgcaccatgctaatgacatcacattaccaaaattctggggacccatggatgccttgtgtcaacggtaggctgactcgatcagagttgccaccctcaaatggctatctcatgatagaagcaaatggcggtctaaatcaacaacggctttctgtctgtgatgctgttgctgtggccagcttgcttaatgcaactcttgtgatcccaacatttcatctgaacagtgtctggcgtgatcctagcaaatttggtgatatatttgacgaagatcatttcattgagacactcaaagaacatgtaagagttgtgaagaaacttcctgaagatgttttgctgcgcttcaatcataatatcagtagcataccaaatatgagaactaaagcctactcatctccaaaccactatgtgcaaaatgttcttccaaaactgcttgagttaggggctgtacgcatagccccattctcaaacagattagcccagtcagttccattgaacatccaggccttgaggtgtttggtaaactaccatgcattaagatttgctgaaccaataagaattctatctgatgaattggttggtcgaatgacaaaaaagagtttgttgactggtgggaagatatggtagccttttcatgctgtacatatgatggtggctggagggaaaaaactgaaatggacaatgctcgtgaaaggagctggagaggtaagtttcgtcggcatggtcgagtgataaaccctgaggcaaacagaagggacgggaagtgccctcttactcctttagaggttggcatgatgctaaggggcatgggattcgataatacaacctccctatatgttgcttcgggtaaaatatacaactctgaaaaatatatggctcctcttcgccagatgttccctcttttaacgacaaaggattctcttgctttgcctgaagaacttgctcaattcaaggggcattcgtctcagctagcagcgttagattacactgtctgcgtgcacagtgaagtgtttgtgacaactcaaggggggaacttccctcactttctgatggggcacaggcgctatatgtttgggggtaatgcaaagacaataaaaccagacaaacggaagctggtcttatcttttgatgatccaaatatcagatgggatcagttcaagcagaacatgcaggaaatactgcagcatagtgacatgaggagcattgcattgagaaaaccaaacgattcagtatatacattcccaatgcctgattgcatgtgtaagcaagatgggatgatataaccctgagagcatacatatgacaaatcctttttgtgtttttggttttgaaacataggtaggtttaggcaggtaggtatattgtacatttgtaacctgtaggtagtctcaccatatccatatgctagcaagagatttgttgattcatgttggttctacactttattctaatgtggtctgtatagaggtctagaggagatacatccaacacttgagagggcttctaacaaagtgagaggctgtaccttactccttgcttgtacgtgtaaaggcgtagcctaactacagaggcgaaagcaaaactttatcttgttcttggaatcttggcagttcactgttttgtttctgcagatgctgtgtgctctaggacatgcgcattaaggccattctcaatgtatagtttcatgcactgtttttaaggctattatatcaaatctgactaggaaacattgtattcagagttccatccttatgaa

SEQ ID NO: 13190 - DNA, 2364 bp, Zea Mays
caatcctctcctcgggccgcttccccatctgctgggctccgcccgccattaattcctgccgttcccatccatatcaagcttccccttcaaccccaagctcgctcacaggccatatcacatggtcccgctcgagccccgccgctgacgctgacggatgtccctcgcgggtgcgggtgcggccgcgttgcggaagcccgccacgtggcggcgcccgggcggccgcggggtggcgcggaggcgcgtcgcggtcgccgccctgctcctcgcgctcgcctacgccggggggctgctcatgttcctgctcgacgagaggctatccggcggctccgtgggcggggctgcggcgggaggcctgggtccgatggtgacggtggcttcctccgtccgccgccgccgccccctccctagccccgcggacgcgccccctcatgctcagcccgggtcggtgtaccgcagccacctcgtgttcgagcgtctcttgccggccatgcgcgacgacgccacgctcgcctcctccctctccgcctcggcctcgtggcgccgcaccatgctaatgacatcacattaccaaaattctggggacccatggatgccttgtgtcaacggtaggctgactcgatcagagttgccaccctcaaatggctatctcatgatagaagcaaatggcggtctaaatcaacaacggctttctgtctgtgatgctgttgctgtggccagcttgcttaatgcaactcttgtgatcccaacatttcatctgaacagtgtctggcgtgatcctagatcatttcattgagacactcaaagaacatgtaagagttgtgaagaaacttcctgaagatgttttgctgcgcttcaatcataatatcagtagcataccaaatatgagaactaaagcctactcatctccaaaccactatgtgcaaaatgttcttccaaaactgcttgagttaggggctgtacgcatagccccattctcaaacagattagcccagtcagttccattgaacatccaggccttgaggtgtttggtaaactaccatgcattaagatttgctgaaccaataagaattctatctgatgaattggttggtcgaatgacaaaaaagagtttgttgactggtgggaagtatgtctcggtgcatcttcgcttcgaagaggtttcaagtctcttatgcattcacaattatgtcatttttccatcctacttataccgtgtatgtttcaggatatggtagccttttcatgctgtacatatgatggtggctggagggaaaaaactgaaatggacaatgctcgtgaaaggagctggagaggtaagtttcgtcggcatggtcgagtgataaaccctgaggcaaacagaagggacgggaagtgccctcttactcctttagaggttggcatgatgctaaggggcatgggattcgataatacaacctccctatatgttgcttcgggtaaaatatacaactctgaaaaatatatggctcctcttcgccagatgttccctcttttaacgacaaaggattctcttgctttgcctgaagaacttgctcaattcaaggggcattcgtctcagctagcagcgttagattacactgtctgcgtgcacagtgaagtgtttgtgacaactcaaggggggaacttccctcactttctgatggggcacaggcgctatatgtttgggggtaatgcaaagacaataaaaccagacaaacggaagctggtcttatcttttgatgatccaaatatcagatgggatcagttcaagcagaacatgcaggaaatactgcagcatagtgacatgaggagcattgcattgagaaaaccaaacgattcagtatatacattcccaatgcctgattgcatgtgtaagcaagatgggatgatataaccctgagagcatacatatgacaaatcctttttgtgtttttggttttgaaacataggtaggtttaggcaggtaggtatattgtacatttgtaacctgtaggtagtctcaccatatccatatgctagcaagagatttgttgattcatgttggttctacactttattctaatgtggtctgtatagaggtctagaggagatacatccaacacttgagagggcttctaacaaagtgagaggctgtaccttactccttgcttgtacgtgtaaaggcgtagcctaactacagaggcgaaagcaaaactttatcttgttcttggaatcttggcagttcactgttttgtttctgcagatgctgtgtgctctaggacatgcgcattaaggccattctcaatgtatagtttcatgcactgtttttaaggctattatatcaaatctgactaggaaacattgtattcagagttccatccttatgaa

SEQ ID NO: 13191 - DNA, 2242 bp, Zea Mays
caatcctctcctcgggccgcttccccatctgctgggctccgcccgccattaattcctgccgttcccatccatatcaagcttccccttcaaccccaagctcgctcacaggccatatcacatggtcccgctcgagccccgccgctgacgctgacggatgtccctcgcgggtgcgggtgcggccgcgttgcggaagcccgccacgtggcggcgcccgggcggccgcggggtggcgcggaggcgcgtcgcggtcgccgccctgctcctcgcgctcgcctacgccggggggctgctcatgttcctgctcgacgagaggctatccggcggctccgtgggcggggctgcggcgggaggcctgggtccgatggtgacggtggcttcctccgtccgccgccgccgccccctccctagccccgcggacgcgccccctcatgctcagcccgggtcggtgtaccgcagccacctcgtgttcgagcgtctcttgccggccatgcgcgacgacgccacgctcgcctcctccctctccgcctcggcctcgtggcgccgcaccatgctaatgacatcacattaccaaaattctggggacccatggatgccttgtgtcaacggtaggctgactcgatcagagttgccaccctcaaatggctatctcatgatagaagcaaatggcggtctaaatcaacaacggctttctgtctgtgatgctgttgctgtggccagcttgcttaatgcaactcttgtgatcccaacatttcatctgaacagtgtctggcgtgatcctagcaaatttggtgatatatttgacgaagatcatttcattgagacactcaaagaacatgtaagagttgtgaagaaacttcctgaagatgttttgctgcgcttcaatcataatatcagtagcataccaaatatgagaactaaagcctactcatctccaaaccactatgtgcaaaatgttcttccaaaactgcttgagttaggggctgtacgcatagccccattctcaaacagattagcccagtcagttccattgaacatccaggccttgaggtgtttggtaaactaccatgcattaagatttgctgaaccaataagaattctatctgatgaattggttggtcgaatgacaaaaaagagtttgttgactggtgggaagtatgtctcggtgcatcttcgcttcgaagaggatatggtagccttttcatgctgtacatatgatggtggctggagggaaaaaactgaaatggacaatgctcgtgaaaggagctggagaggttggcatgatgctaaggggcatgggattcgataatacaacctccctatatgttgcttcgggtaaaatatacaactctgaaaaatatatggctcctcttcgccagatgttccctcttttaacgacaaaggattctcttgctttgcctgaagaacttgctcaattcaaggggcattcgtctcagctagcagcgttagattacactgtctgcgtgcacagtgaagtgtttgtgacaactcaaggggggaacttccctcactttctgatggggcacaggcgctatatgtttgggggtaatgcaaagacaataaaaccagacaaacggaagctggtcttatcttttgatgatccaaatatcagatgggatcagttcaagcagaacatgcaggaaatactgcagcatagtgacatgaggagcattgcattgagaaaaccaaacgattcagtatatacattcccaatgcctgattgcatgtgtaagcaagatgggatgatataaccctgagagcatacatatgacaaatcctttttgtgtttttggttttgaaacataggtaggtttaggcaggtaggtatattgtacatttgtaacctgtaggtagtctcaccatatccatatgctagcaagagatttgttgattcatgttggttctacactttattctaatgtggtctgtatagaggtctagaggagatacatccaacacttgagagggcttctaacaaagtgagaggctgtaccttactccttgcttgtacgtgtaaaggcgtagcctaactacagaggcgaaagcaaaactttatcttgttcttggaatcttggcagttcactgttttgtttctgcagatgctgtgtgctctaggacatgcgcattaaggccattctcaatgtatagtttcatgcactgtttttaaggctattatatcaaatctgactaggaaacattgtattcagagttccatccttatgaa

SEQ ID NO: 13192 - DNA, 1877 bp, Zea Mays
gctgtatactttgttaaacaaggaacctaatgcttgcagtttaagcctctttgttccaaacaagacaggcttcgaaatcggataccatcacctggaagtcaatcactaatgacatcacattaccaaaattctggggacccatggatgccttgtgtcaacggtaggctgactcgatcagagttgccaccctcaaatggctatctcatgatagaagcaaatggcggtctaaatcaacaacggctttctgtctgtgatgctgttgctgtggccagcttgcttaatgcaactcttgtgatcccaacatttcatctgaacagtgtctggcgtgatcctagcaaatttggtgatatatttgacgaagatcatttcattgagacactcaaagaacatgtaagagttgtgaagaaacttcctgaagatgttttgctgcgcttcaatcataatatcagtagcataccaaatatgagaactaaagcctactcatctccaaaccactatgtgcaaaatgttcttccaaaactgcttgagttaggggctgtacgcatagccccattctcaaacagattagcccagtcagttccattgaacatccaggccttgaggtgtttggtaaactaccatgcattaagatttgctgaaccaataagaattctatctgatgaattggttggtcgaatgacaaaaaagagtttgttgactggtgggaagtatgtctcggtgcatcttcgcttcgaagaggatatggtagccttttcatgctgtacatatgatggtggctggagggaaaaaactgaaatggacaatgctcgtgaaaggagctggagaggtaagtttcgtcggcatggtcgagtgataaaccctgaggcaaacagaagggacgggaagtgccctcttactcctttagaggttggcatgatgctaaggggcatgggattcgataatacaacctccctatatgttgcttcgggtaaaatatacaactctgaaaaatatatggctcctcttcgccagatgttccctcttttaacgacaaaggattctcttgctttgcctgaagaacttgctcaattcaaggggcattcgtctcagctagcagcgttagattacactgtctgcgtgcacagtgaagtgtttgtgacaactcaaggggggaacttccctcactttctgatggggcacaggcgctatatgtttgggggtaatgcaaagacaataaaaccagacaaacggaagctggtcttatcttttgatgatccaaatatcagatgggatcagttcaagcagaacatgcaggaaatactgcagcatagtgacatgaggagcattgcattgagaaaaccaaacgattcagtatatacattcccaatgcctgattgcatgtgtaagcaagatgggatgatataaccctgagagcatacatatgacaaatcctttttgtgtttttggttttgaaacataggtaggtttaggcaggtaggtatattgtacatttgtaacctgtaggtagtctcaccatatccatatgctagcaagagatttgttgattcatgttggttctacactttattctaatgtggtctgtatagaggtctagaggagatacatccaacacttgagagggcttctaacaaagtgagaggctgtaccttactccttgcttgtacgtgtaaaggcgtagcctaactacagaggcgaaagcaaaactttatcttgttcttggaatcttggcagttcactgttttgtttctgcagatgctgtgtgctctaggacatgcgcattaaggccattctcaatgtatagtttcatgcactgtttttaaggctattatatcaaatctgactaggaaacattgtattcagagttccatccttatgaa

SEQ ID NO: 13193 - DNA, 1821 bp, Zea Mays
ctctttgttccaaacaagacaggcttcgaaatcggataccatcacctggaagtcaatcactaatgacatcacattaccaaaattctggggacccatggatgccttgtgtcaacggtaggctgactcgatcagagttgccaccctcaaatggctatctcatgatagaagcaaatggcggtctaaatcaacaacggctttctgtctgtgatgctgttgctgtggccagcttgcttaatgcaactcttgtgatcccaacatttcatctgaacagtgtctggcgtgatcctagcaaatttggtgatatatttgacgaagatcatttcattgagacactcaaagaacatgtaagagttgtgaagaaacttcctgaagatgttttgctgcgcttcaatcataatatcagtagcataccaaatatgagaactaaagcctactcatctccaaaccactatgtgcaaaatgttcttccaaaactgcttgagttaggggctgtacgcatagccccattctcaaacagattagcccagtcagttccattgaacatccaggccttgaggtgtttggtaaactaccatgcattaagatttgctgaaccaataagaattctatctgatgaattggttggtcgaatgacaaaaaagagtttgttgactggtgggaagtatgtctcggtgcatcttcgcttcgaagagccttttcatgctgtacatatgatggtggctggagggaaaaaactgaaatggacaatgctcgtgaaaggagctggagaggtaagtttcgtcggcatggtcgagtgataaaccctgaggcaaacagaagggacgggaagtgccctcttactcctttagaggttggcatgatgctaaggggcatgggattcgataatacaacctccctatatgttgcttcgggtaaaatatacaactctgaaaaatatatggctcctcttcgccagatgttccctcttttaacgacaaaggattctcttgctttgcctgaagaacttgctcaattcaaggggcattcgtctcagctagcagcgttagattacactgtctgcgtgcacagtgaagtgtttgtgacaactcaaggggggaacttccctcactttctgatggggcacaggcgctatatgtttgggggtaatgcaaagacaataaaaccagacaaacggaagctggtcttatcttttgatgatccaaatatcagatgggatcagttcaagcagaacatgcaggaaatactgcagcatagtgacatgaggagcattgcattgagaaaaccaaacgattcagtatatacattcccaatgcctgattgcatgtgtaagcaagatgggatgatataaccctgagagcatacatatgacaaatcctttttgtgtttttggttttgaaacataggtaggtttaggcaggtaggtatattgtacatttgtaacctgtaggtagtctcaccatatccatatgctagcaagagatttgttgattcatgttggttctacactttattctaatgtggtctgtatagaggtctagaggagatacatccaacacttgagagggcttctaacaaagtgagaggctgtaccttactccttgcttgtacgtgtaaaggcgtagcctaactacagaggcgaaagcaaaactttatcttgttcttggaatcttggcagttcactgttttgtttctgcagatgctgtgtgctctaggacatgcgcattaaggccattctcaatgtatagtttcatgcactgtttttaaggctattatatcaaatctgactaggaaacattgtattcagagttccatccttatgaa

SEQ ID NO: 13194 - DNA, 1535 bp, Zea Mays
gaaaccgtaaaccgtgaatggccatcgaggtccaaaaatccatctggattctggagagaggagaccccaaaatcgcagcgcgcgaaaacgcaggagcaacccgcccactcgccaccaccgcccgcgcgcacggcggcgaccgatggccccgctcgtgccgatgtcgcagccatgggtggagaaataccggccgaggcaggtcaaggatgtggctcaccaggaggaggtgattcgggtgctcaacaacaccctccagaccgccgacctgccgcacatgctgttctacggcccgccggggacgggaaagaccaccaccgcactagccatcgcctaccagctctacggagctgtataagtcaagggttttggagctcaatgctagtgatgatcgtggaattaatgtggtgaggacgaaaatcaagaactttgctgctgttgctgttggtactgcacggaaagctggttatccctgcccaccttacaagattattatacttgacgaagcagattcaatgacagaagatgcccagaatgctttgaggcgtaccacagagacttactccaaagtgaccagattcttttttatatgcaactatatcagcaggataatagaaccacttgcatcaagatgtgcaaagtttaggttcaagcctctttcagaagaagtgatgagtagtcgcattatgcatatatgcaatgaagaaggcctcaatcttaatgctcaggcgatgtccacactgagtgtcatttctcaaggtgatcttcgtcgtgctataacctaccttcagagtgcagctcgcttatttggatcttctatctcttccagtgacctgatcagtgtttctggggttatccctgaagatgttgtcaagtcactgcttgcagcctgcagatctggtgaatttgacgtggcaaacaaggaagttagcagcattatagcagatgggtatccggtctcacagctgatggcacagtttctagatgttattgttagcgcggatgatattccagatgatcaaaaggcaaggatatgtaaaaagcttggggaaaccgataagtgcttggttgatggggcagatgagtatctacagctgctggatgtcgccagcgagactatccgctctcttttcaacatgccgcggacgctggtcttctaagagttcataaagaggaatggcggttccgatccttggcgaaaactttttcctgcctcttagatgccgcccaaggttaatctgcctcccctaccgctctgatgttggtagcttcggacgggttgaaaaagcgatgaactcagacttaaaatcccgctgaactgtgcctgtggatggatgcccaatatgacaatgaacatttctcagcgttcatcttgtgtgttatattccctcttctacttccgcctccagagtgcagcagttgacgttttttttttcgcactatggcattgcagtcagattttgttattgtgacttcttcgtggcacaggtcctataacaaagttacattttttgggtgcagtatataacaaggttgcg

SEQ ID NO: 13195 - DNA, 1533 bp, Zea Mays
gaaaccgtaaaccgtgaatggccatcgaggtccaaaaatccatctggattctggagagaggagaccccaaaatcgcagcgcgcgaaaacgcaggagcaacccgcccactcgccaccaccgcccgcgcgcacggcggcgaccgatggccccgctcgtgccgatgtcgcagccatgggtggagaaataccggccgaggcaggtcaaggatgtggctcaccaggaggaggtgattcgggtgctcaacaacaccctccagaccgccgacctgccgcacatgctgttctacggcccgccggggacgggaaagaccaccaccgcactagccatcgcctaccagctctacggtccagagctgtataagtcaagggttttggagctcaatgctagtgatgatcgtggaattaatgtggtgaggacgaaaatcaagaactttgctgctgttgctgttggtactgcacggaaagctggttatccctgcccaccttacaagattattatacttgacgaagcagattcaatgacagaagatgcccagaatgctttgaggcgtaccacagagacttactccaaagtgaccagattcttttttatatgcaactatatcagcaggataatagaaccacttgcatcaagatgtgcaaagtttaggttcaagcctctttcagaagaagtgatgagtagtcgcattatgcatatatgcaatgaagaaggcctcaatcttaatgctcaggcgatgtccacactgagtgtcatttctcaaggtgatcttcgtcgtgctataacctaccttcagagtgcagctcgcttatttggatcttctatctcttccagtgacctgatcagtgtttctggggttatccctgaagatgttgtcaagtcactgcttgcagcctgcagatctggtgaatttgacgtggcaaacaaggaagttagcagcattatagcagatgggtatccggtctcacagctgatggcacagatgttattgttagcgcggatgatattccagatgatcaaaaggcaaggatatgtaaaaagcttggggaaaccgataagtgcttggttgatggggcagatgagtatctacagctgctggatgtcgccagcgagactatccgctctcttttcaacatgccgcggacgctggtcttctaagagttcataaagaggaatggcggttccgatccttggcgaaaactttttcctgcctcttagatgccgcccaaggttaatctgcctcccctaccgctctgatgttggtagcttcggacgggttgaaaaagcgatgaactcagacttaaaatcccgctgaactgtgcctgtggatggatgcccaatatgacaatgaacatttctcagcgttcatcttgtgtgttatattccctcttctacttccgcctccagagtgcagcagttgacgttttttttttcgcactatggcattgcagtcagattttgttattgtgacttcttcgtggcacaggtcctataacaaagttacattttttgggtgcagtatataacaaggttgcg

SEQ ID NO: 13196 - DNA, 1969 bp, Zea Mays
ggaggacgaacaacacgtcagcactactcgcagtcccatcttcgccccccgcgacccgcccactatataaaacccgcctccccacccataggcccacaccaccaagaaaaataaattcagagaaaggaggaagggagactgggagaaacagacaggaaggagcccatccgcgtctgcctccacccctcggctcccagagtccccgctagccaagcccccacatggcaccaccgcccgcgggcctcgtgctcgtggctctgctcgcgctggtcctggcgctggcgctggcgccggcgccggcgcgcggggacaagccggcgaggggcggggcgtccagctccatcgccgccggggcggagacggagccgtcctccgccgtcttcccgctctacggcgacgtctacccgcacgggttgtactacgtggctatgaacatcggcaacccacccaagccatacttcctggacgtggactccggcagcgacctcacctggctgcagtgcgacgcgccctgcaggagctgcaacgaggtgccgcacccgctgtaccggccaacaaagagcaagctggtgccatgcgtgcaccggctgtgcgcttccctgcacaacgggctgaccgggaagcacagatgcgactcgccgcacgagcaatgcgactacgtgatcaagtacgcagaccaggggtcgtccaccggcgtgctcatcaacgacagcttcgcgctccgcctcaccaacggctctgtcgctcgccccagcgtcgccttcgggtgtggttacgaccagcaggtccgcagcggcgacctgagttcgcctaccgacggcgtgctggggctcgggaccggctcagtcagcttgctctcgcagctcaaacagcgtggcgtcaccaagaacgtggtcggccactgcctcagcctgaggggcggcgggttcctcttcttcggtgacgatctcgtgccttaccaacgcgcgacatggactcccatggctcgcagcgcgttccggaactactactcccctggctctgcaagcctgtacttcggcgaccggtcactgggcgtgagactggcgaaagtggtcttcgacagtggaagctcgttcacctacttcgctgcaaagccataccaagcacttgtcaccgctcttaaggatggcctgagcaggacgctggaagaggaacccgacacttcgctgcctctctgctggaaagggcaggaaccattcaagtctgtgcttgatgtgaggaaggagttcaagtctttggtgctcaacttcgccagtggcaagaagacgctcatggagatccctcctgagaactacctcattgtcacagaaaacgggaatgcctgtctgggcatcctcaacggatccgaaatcggtctcaaggacctgagcattattggagacattacgatgcaggatcacatggtgatatatgacaatgagaaagggaaaattggatggattcgtgcaccctgtgacagagcccccaacgacataaatacggttcatgggtttgaggaaggttactgttggcctcaattcctcccggggatcattggtcttcccaacgaagattgcccagcctattaccgttcaaacaaagagcgatttgccaaggcccaagggggaggccgctagaatgacagaaacagcagaaggatggtcacggaggctggtgtgtgttctttaggaaaggagagaaactagcccatgtaaacatcataatgttcatatgaaatataacgatgatcaccctgttacgagtacaatcttttcggaccttttctgtgtacattctttacttggttttctttctgttgatgtgatatatactcggttccaggtgtctcgcgactatgtgtgagtgtgatacgcaggcagcagattgtcttgttcttcagggtcgttgtgtggataacgtcaggaatttagacattttcagattcaatttaatctagaaatatagcacg

SEQ ID NO: 13197 - DNA, 1737 bp, Zea Mays
acacatgtgtgtgcagtgtagacgagcgcgtacgtaacttattgggaggttgcgcgtacggcaactcccgtcgcctccgcgctcccctaaccgcctcccccttgtctcatggtggaagtggaacaaccctccgcccgcgccgctgcgaagtgagaagggaaaacaagaaacgatcgagggaggggacgacggagcgagctagctagcggcgcggcgggcgtcgctcggcatggacgcggaggcggcggcggcggcggcggcgacggcggtggaggagagggagcggctgcggaggagcttcgcgtcggggaggacgcggccggcggcgtggcgggaggcgcagctgcgcggccttctgcgcatggccaccgagagggaggacgacatctgcgccgccctgcacgcggacctcgcgaaaccccttaccgagtgctacgtacacgagatatcgttggtcatttcttcgtgcaaatttgctctcaagaatctcaagaaatggatgaagccccgaaaggtccccggcgggctgctgaccttcccgtcggcggccagcgtcgcggcggagcctctcggcgtcgtgctcgtcatctccgcctggaactaccccttctgtaacagcagagtaggacgcatcgtcatgtcctacgctgccaagcacctgacgcccgtggtcttggagctcggtggcaaatgccctgtcgtcgtcgactccgacgtcaacctccacgtcgctgccaagaggatcgccgccggcaagtggggctgcaacagcggccaagcctgcgtctcgccggactacgtcgtcactaccaaatcgttcgcgccaaagctgctggagtccctgaagcgagtgctgttcgagttctacggggaggagccgctgcggtcgccggacctgtcgcgcgtcgtcaactccaaccacttcaacaggctcatggcgctcatggacgactactcggtctccggcaatgtcgcgttcggcggccagatcgacgagcggcggctaaggatcgccccgacgctgctgctggacgtcccgctcgactccgcgatgatgaaggaggagatcttcgggccgctgcttcccataatcacggtggacaagatcggcgagagcttcgctgtgatcaactccatgcccaagccgctggcagcttacctcttcagcaacgacgggcagctcaagcagcagttcgagaggaccgtctcggcgggagggatcatgttcaacgacaccggcatccacctgacaaacccgaacctgccgttcggaggagtcggggagagcggcatgggcgcctaccacggcgccttcagcttcgacgccttctcccacaggaaggccgtcctggaccgcagcttcctcggcgaggccagggccaggtacccgccgtacacgccggcgaagctcgccatcctcaggggcgtgctcaatggcagcccgcttgccacggttcaggcggctgcggggtgtacaggaggggcatcagctgactgactgactgaccccccttcatgcttattattaataataagcataaatattcaccgcatacacattgctgtgcttttattaaggttgttgtgagggcgaaaaatgtattgaccctttgcgtgtgcgcgtgcgtgtatagcaactattaataaaagaaaaaagtgatgttcatttcgtacagagtatactaaattaagatcacatcacgagttttaagcaaccgggctcatagcatttcaaaa

SEQ ID NO: 13198 - DNA, 1429 bp, Zea Mays
gatgccaacgcgtcgtcagctcacgcacgcgttcggcttcggcaagcccagcccatgacacgcacagtagcccacaaaatcatggcctgcctgccatgctggccatcgacccggtcgtgggggcattcgcggcgggcaacgccgtggcgctgaagccgtcggaggtggcgccggccacgtcgctgctgctggccgacctgctgccgcgctacgtggacccctcgtgcgtcagggtcgtgcagggcggcatcgcggagaccaccgcgctgctggagctccagtgggacaagatcttctacacaggtaacagcagagtaggacgcatcgtcatgtcctacgctgccaagcacctgacgcccgtggtcttggagctcggtggcaaatgccctgtcgtcgtcgactccgacgtcaacctccacgtcgctgccaagaggatcgccgccggcaagtggggctgcaacagcggccaagcctgcgtctcgccggactacgtcgtcactaccaaatcgttcgcgccaaagctgctggagtccctgaagcgagtgctgttcgagttctacggggaggagccgctgcggtcgccggacctgtcgcgcgtcgtcaactccaaccacttcaacaggctcatggcgctcatggacgactactcggtctccggcaatgtcgcgttcggcggccagatcgacgagcggcggctaaggatcgccccgacgctgctgctggacgtcccgctcgactccgcgatgatgaaggaggagatcttcgggccgctgcttcccataatcacggtggacaagatcggcgagagcttcgctgtgatcaactccatgcccaagccgctggcagcttacctcttcagcaacgacgggcagctcaagcagcagttcgagaggaccgtctcggcgggagggatcatgttcaacgacaccggcatccacctgacaaacccgaacctgccgttcggaggagtcggggagagcggcatgggcgcctaccacggcgccttcagcttcgacgccttctcccacaggaaggccgtcctggaccgcagcttcctcggcgaggccagggccaggtacccgccgtacacgccggcgaagctcgccatcctcaggggcgtgctcaatggcagcccgcttgccacggttcaggcggctgcggggtgtacaggaggggcatcagctgactgactgactgaccccccttcatgcttattattaataataagcataaatattcaccgcatacacattgctgtgcttttattaaggttgttgtgagggcgaaaaatgtattgaccctttgcgtgtgcgcgtgcgtgtatagcaactattaataaaagaaaaaagtgatgttcatttcgtacagagtatactaaattaagatcacatcacgagttttaagcaaccgggctcatagcatttcaaaa

SEQ ID NO: 13199 - DNA, 1626 bp, Zea Mays
gatttataaactttgttagcatcctctatgcatcaagtctcatgtgcacgcctccattagcctcgcattgacgcggtccgcaactcctctaaacccttcctctccctccggcgccggcgccgacatggccatccactacctcctccgccgcggggtctccggtggctcactgctccaccctatccgcggtctcttcctcgcctccaaggagcttgggaggcgtccgttgggctctgcggcggcgggagacgcagcggccgagctgaggggcgcgcgggaggacgtcaggcagctgctcaaggccacctcctgccatcccatcctggttcgattaggttggcatgatgctggtacatatgacaagaacattaccgagtggcccaagtgtggtggagctaatggtagcttgagattcgaagtcgagttgaagcatggggccaatgctggtcttgtgaatgctctgaagctgatccaacctatcaaggacaagttttcaggtgttacctatgcagatctgtttcagcttgccagcgccacagccattgaggaagcaggtggccccaaaattcctatgatctatggaagagttgatgttattgcccccgaacaatgcccaccagaggggaggcttcctgctgctggcccaccttcacccgcggaacatttgcgtgaagtattctacagaatgggcctgaacgacaaggaaatcgttgcactgtcaggagctcatacacttggacgtgcaagaccagagcgtagtggctggggtaaatcagaaacaaagtacactaaagatgggcctggtgcacctgggggacaatcttggacatctcattggctcaagtttgacaacagctatttcaagaaagacgagatgatcacctcctagttctgcctactgatgctgtgctgtttgaggattcctcattcaagatctatgctacaaaatatgccaaggatcaggacacatttttcgaggactacgctgaagctcatgccaaattgagcaatcttggggcaaagtttgacccgccaaagggtatctcactcgagtagttgtggatggaggtgactgaacaggaagggtcatgtttctttgcgtgaccattttcgaaggttggcaaggaaaagttattggggttgaatgatagctccacaaattggattcaccgattaaaggatttttttcttagcgtgccctgtttttttagtagtatcctacactatgaataaagcaacacctgtcatttcaagataaatatttgttacactaactaactgaaagcatccgaatcctaagtggtttcggtgattaatgacgacataagatcgttataactaacttatgctttattgagtccatttaagttaggtcacaataataatgattatttggtcaattaaggttttttatgcctccaggtatggatttcatttcggttttcaaagtatggataacaaggttgaagatacactagttttaagcgccaattaaagttgaaagacacttaggtcccgtttgttttctttcattcattgaggaattggaatcttactaatagaataggctattttttttaaaatgtgatattccatcacttttcaaagttatcatataagtctatc

SEQ ID NO: 13200 - DNA, 1287 bp, Zea Mays
gtgcacgcctccattagcctcgcattgacgcggtccgcaactcctctaaacccttcctctccctccggcgccggcgccgacatggccatccactacctcctccgccgcggggtctccggtggctcactgctccaccctatccgcggtctcttcctcgcctccaaggagcttgggaggcgtccgttgggctctgcggcggcgggagacgcagcggccgagctgaggggcgcgcgggaggacgtcaggcagctgctcaaggccacctcctgccatcccatcctggttcgattaggttggcatgatgctggtacatatgacaagaacattaccgagtggcccaagtgtggtggagctaatggtagcttgagattcgaagtcgagttgaagcatggggccaatgctggtcttgtgaatgctctgaagctgatccaacctatcaaggacaagttttcaggtgttacctatgcagatctgtttcagcttgccagcgccacagccattgaggaagcaggtggccccaaaattcctatgatctatggaagagttgatgttattgcccccgaacaatgcccaccagaggggaggcttcctgctgctggcccaccttcacccgcggaacatttgcgtgaagtattctacagaatgggcctgaacgacaaggaaatcgttgcactgtcaggagctcatacacttggacgtgcaagaccagagcgtagtggctggggtaaatcagaaacaaagtacactaaagatgggcctggtgcacctgggggacaatcttggacatctcattggctcaagtttgacaacagctatttcaaggctatcgaagaaagacgagatgatcacctcctagttctgcctactgatgctgtgctgtttgaggattcctcattcaagatctatgctacaaaatatgccaaggatcaggacacatttttcgaggactacgctgaagctcatgccaaattgagcaatcttggggcaaagtttgacccgccaaagggtatctcactcgagtagttgtggatggaggtgactgaacaggaagggtcatgtttctttgcgtgaccattttcgaaggtatggatttcatttcggttttcaaagtatggataacaaggttgaagatacactagttttaagcgccaattaaagttgaaagacacttaggtcccgtttgttttctttcattcattgaggaattggaatcttactaatagaataggctattttttttaaaatgtgatattccatcacttttcaaagttatcatataagtctatc

SEQ ID NO: 13201 - DNA, 115 bp, Zea Mays
ctgtgcggggtctggggaagggtatctttaagcggcaagccttacccgcataatatgcagaggctggggctcgaacccgggaccttccggttacagacggtaggctctaccgctg

SEQ ID NO: 13202 - DNA, 1459 bp, Zea Mays
acggattgaagccggtacaatacaacctgcgtaagtagccaggcccaatctcccagcccaaagtcccatcccattgctcgttctgtcccttcgttcacaacctcctccacgaccaaacgatccgggttccagcggcggcggcggcggcgaagatgatcataccggtgcgctgcttcacctgcggcaaggtgattgggaacaagtgggacctctacctcgacctcctccaggccgactactcggaaggggatgctctggatgctttggaattgttccgctactgctgcaggcgaatgctcatgacccatgttgacctcattgagaagttgctcaactacaacacactggagaagaccgagacaagttaagtgagcaagcatatcatgctctgaaagcactactgtttcgcagtatcatatatattgtaggcgtttgattggctcgtattattgcatcggccgtatgcatactcatgtgcttcgaggtatacaacggccgaaaatggccactcggtccgtcgtcgtcgcgaggctgtacctgtacgtgctgctattattcatctgggactggcatatagtacgttcagattcttcatgttttggcctgatcaggtgtatttttcaccggatctcagtacccgtttggcctgatcaggctatggcgatatgcagacgatgttcaactttactaatctctctctctttttttctgtccaaactgtattattgcatccgtttgtgaatgcacgaattcatttgcaaggaggaacaaaactgtgatcaaagaacaaagaatcaaagagaacgaccgacctatgtacagttgtacacacacacacaaaaatggcgcgcgatccccgcaactgggggatcgagcaggcggcggattcgttcggccgccggccggtcagccctcgaagctggacgagcggctccatctccccctgaggtactcctccaacgacacggcggcggcggcggcgaagatgatcataccggtgcgctgcttcacctgcggcaaggtgattgggaacaagtgggacctctacctcgacctcctccaggccgactactcggaaggggatgctctggatgctctggaactgttccgctactgctgcaggcgaatgctcatgacccatgttgacctcattgagaagttgctcaactacaacacactggagaagaccgagacaagttaagtgagcaagcatatcatgctctgaaagcactactgtttcgtagtatcatatatattgtaggcggtatgttgtttcttctctatcaggagaggattgttgtgagtgtgaacttgcttttgctctcgagcattcaaggactgacaagggcatgttgcatctatgttacgatgttggagattttaatcgatataacggctaactaatactctctgtgtctctgtcccaatttataattcgtttgacctttttacatcaagt

SEQ ID NO: 13203 - DNA, 1346 bp, Zea Mays
gattgaagccggtacaatacaacctgcgtaagtagccaggcccaatctcccagcccaaagtcccatcccattgctcgttctgtcccttcgttcacaacctcctccacgaccaaacgatccgggttccagcggcggcggcggcggcgaagatgatcataccggtgcgctgcttcacctgcggcaaggtgattgggaacaagtgggacctctacctcgacctcctccaggccgactactcggaaggggatgctctggatgctttggaattgttccgctactgctgcaggcgaatgctcatgacccatgttgacctcattgagaagttgctcaactacaacacactggagaagaccgagacaagttaagtgagcaagcatatcatgctctgaaagcactactgtttcgcagtatcatatatattgtaggcgtttgattggctcgtattattgcatcggccgtatgcatactcatgtgcttcgaggtatacaacggccgaaaatggccactcggtccgtcgtcgtcgcgaggtatatacaatggccactcggtcatgtgcttcgagctaggctgtacctcatttcgcttcgttgacttccacaataggctgtacctgtacgtgctgctattattcatctgggactggcatatagaggaacaaaactgtgatcaaagaacaaagaatcaaagagaacgaccgacctatgtacagttgtacacacacacacaaaaatggcgcgcgatccccgcaactgggggatcgagcaggcggcggattcgttcggccgccggccggtcagccctcgaagctggacgagcggctccatctccccctgaggtactcctccaacgacacggcggcggcggcggcgaagatgatcataccggtgcgctgcttcacctgcggcaaggtgattgggaacaagtgggacctctacctcgacctcctccaggccgactactcggaaggggatgctctggatgctctggaactgttccgctactgctgcaggcgaatgctcatgacccatgttgacctcattgagaagttgctcaactacaacacactggagaagaccgagacaagttaagtgagcaagcatatcatgctctgaaagcactactgtttcgtagtatcatatatattgtaggcggtatgttgtttcttctctatcaggagaggattgttgtgagtgtgaacttgcttttgctctcgagcattcaaggactgacaagggcatgttgcatctatgttacgatgttggagattttaatcgatataacggctaactaatactctctgtgtctctgtcccaatttataattcgtttgacctttttacatcaagt

SEQ ID NO: 13204 - DNA, 827 bp, Zea Mays
aacctgcgtaagtagccaggcccaatctcccagcccaaagtcccatcccattgctcgttctgtcccttcgttcacaacctcctccacgaccaaacgatccgggttccagcggcggcggcggcggcgaagatgatcataccggtgcgctgcttcacctgcggcaaggtgattgggaacaagtgggacctctacctcgacctcctccaggccgactactcggaaggggatgctctggatgctttggaattgttccgctactgctgcaggcgaatgctcatgacccatgttgacctcattgagaagttgctcaactacaacacactggagaagaccgagacaagttaagtgagcaagcatatcatgctctgaaagcactactgtttcgcagtatcatatatattgtaggcggtatgttgtctcttctctatcaggagaggattgttgtcagtgtgaacttgcttttgctcacgagcattcaaggactgacagtgcatgttgcatctatgccacgatgttggagattttaatcgatataataactgctaactaatactctctttgtctctgtcccaatttataattcgtttgacctttttacatcaagtttgattggctcgtattattgcatcggccgtatgcatactcatgtgcttcgaggtatacaacggccgaaaatggccactcggtccgtcgtcgtcgcgaggtatatacaatggccactcggtcatgtgcttcgagctaggctgtacctcatttcgcttcgttgacttccacaataggctgtacctgtacgtgctgctattattcatctgggactggcatataga

SEQ ID NO: 13205 - DNA, 866 bp, Zea Mays
caatctcccagcccaaagtcccatcccattgctcgttctgtcccttcgttcacaacctcctccacgaccaaacgatccgggttccagcggcggcggcggcggcgaagatgatcataccggtgcgctgcttcacctgcggcaaggtgattgggaacaagtgggacctctacctcgacctcctccaggccgactactcggaaggggatgctctggatgctttggaattgttccgctactgctgcaggcgaatgctcatgacccatgttgacctcattgagaagttgctcaactacaacacactggagaagaccgagacaagttaagtgagcaagcatatcatgctctgaaagcactactgtttcgcagtatcatatatattgtaggcggtatgttgtctcttctctatcaggagaggattgttgtcagtgtgaacttgcttttgctcacgagcattcaaggactgacagtgcatgttgcatctatgccacgatgttggagattttaatcgatataataactgctaactaatactctctttgtctctgtcccaatttataattcgtttgacctttttacatcaagtttgattggctcgtattattgcatcggccgtatgcatactcatgtgcttcgaggtatacaacggccgaaaatggccactcggtccgtcgtcgtcgcgaggtatatacaatggccactcggtcatgtgcttcgagctaggctgtacctgtacgtgctgctatgatttgatgcgtccgcatgtgcttcgcggtgcaacttgcgttgttcctaaatcatgcagcatttcgcttcgttgacttccacagcatttcgcttcgttgacttccacaataggctgtacctga

SEQ ID NO: 13206 - DNA, 828 bp, Zea Mays
ccaaagtcccatcccattgctcgttctgtcccttcgttcacaacctcctccacgaccaaacgatccgggttccagcggcggcggcggcggcgaagatgatcataccggtgcgctgcttcacctgcggcaaggtgattgggaacaagtgggacctctacctcgacctcctccaggccgactactcggaaggggatgctctggatgctttggaattgttccgctactgctgcaggcgaatgctcatgacccatgttgacctcattgagaagttgctcaactacaacacactggagaagaccgagacaagttaagtgagcaagcatatcatgctctgaaagcactactgtttcgcagtatcatatatattgtaggcggtatgttgtctcttctctatcaggagaggattgttgtcagtgtgaacttgcttttgctcacgagcattcaaggactgacagtgcatgttgcatctatgccacgatgttggagattttaatcgatataataactgctaactaatactctctttgtctctgtcccaatttataattcgtttgacctttttacatcaagtttgattggctcgtattattgcatcggccgtatgcatactcatgtgcttcgaggtatacaacggccgaaaatggccactcggtccgtcgtcgtcgcgaggtatatacaatggccactcggtcatgtgcttcgagctaggctgtacctcatttcgcttcgttgacttccacaataggctgtacctgtacgtgctgctattattcatctgggactggcatatagtacgttcagattcttcatgttttggcctgatcagga

SEQ ID NO: 13207 - DNA, 807 bp, Zea Mays
cccatcccattgctcgttctgtcccttcgttcacaacctcctccacgaccaaacgatccgggttccagcggcggcggcggcggcgaagatgatcataccggtgcgctgcttcacctgcggcaaggtgattgggaacaagtgggacctctacctcgacctcctccaggccgactactcggaaggggatgctctggatgctttggaattgttccgctactgctgcaggcgaatgctcatgacccatgttgacctcattgagaagttgctcaactacaacacactggagaagaccgagacaagttaagtgagcaagcatatcatgctctgaaagcactactgtttcgcagtatcatatatattgtaggcggtatgttgtctcttctctatcaggagaggattgttgtcagtgtgaacttgcttttgctcacgagcattcaaggactgacagtgcatgttgcatctatgccacgatgttggagattttaatcgatataataactgctaactaatactctctttgtctctgtcccaatttataattcgtttgacctttttacatcaagtttgattggctcgtattattgcatcggccgtatgcatactcatgtgcttcgaggtatacaacggccgaaaatggccactcggtccgtcgtcgtcgcgaggtatatacaatggccactcggtcatgtgcttcgagctaggctgtacctcatttcgcttcgttgacttccacaataggctgtacctgtacgtgctgctattattcatctgggactggcatatagaacaaaactgtgatcaaagaac

SEQ ID NO: 13208 - DNA, 1674 bp, Zea Mays
cgctctacagtttgcgcggccggtttgggttaggtgattgggaacaagtgggacctctacctcgacctcctccaggccgactactcggaaggggatgctctggatgctttggaattgttccgctactgctgcaggcgaatgctcatgacccatgttgacctcattgagaagttgctcaactacaacacactggagaagaccgagacaagttaagtgagcaagcatatcatgctctgaaagcactactgtttcgcagtatcatatatattgtaggcggtatgttgtctcttctctatcaggagaggattgttgtcagtgtgaacttgcttttgctcacgagcattcaaggactgacagtgcatgttgcatctatgccacgatgttggagattttaatcgatataataactgctaactaatactctctttgtctctgtcccaatttataattcgtttgacctttttacatcaagtttgattggctcgtattattgcatcggccgtatgcatactcatgtgcttcgaggtatacaacggccgaaaatggccactcggtccgtcgtcgtcgcgaggtatatacaatggccactcggtcatgtgcttcgagctaggctgtacctgtacgtgctgctatgatttgatgcgtccgcatgtgcttcgcggtgcaacttgcgttgttcctaaatcatgcagcatttcgcttcgttgacttccacagcatttcgcttcgttgacttccacaataggctgtacctgtacgtgctgctattattcatctgggactggcatatagtacgttcagattcttcatgttttggcctgatcaggtgtatttttcaccggatctcagtacccgtttggcctgatcaggctatggcgatatgcagacgatgttcaactttactaatctctctctctttttttctgtccaaactgtattattgcatccgtttgtgaatgcacgaattcatttgcaaggaggaacaaaactgtgatcaaagaacaaagaatcaaagagaacgaccgacctatgtacagttgtacacacacacacaaaaatggcgcgcgatccccgcaactgggggatcgagcaggcggcggattcgttcggccgccggccggtcagccctcgaagctggacgagcggctccatctccccctgaggtactcctccaacgacacggcggcggcggcggcgaagatgatcataccggtgcgctgcttcacctgcggcaaggtgattgggaacaagtgggacctctacctcgacctcctccaggccgactactcggaaggggatgctctggatgctctggaactgttccgctactgctgcaggcgaatgctcatgacccatgttgacctcattgagaagttgctcaactacaacacactggagaagaccgagacaagttaagtgagcaagcatatcatgctctgaaagcactactgtttcgtagtatcatatatattgtaggcggtatgttgtttcttctctatcaggagaggattgttgtgagtgtgaacttgcttttgctctcgagcattcaaggactgacaagggcatgttgcatctatgttacgatgttggagattttaatcgatataacggctaactaatactctctgtgtctctgtcccaatttataattcgtttgacctttttacatcaagt

SEQ ID NO: 13209 - DNA, 623 bp, Zea Mays
caataacctatgggagcgctcatcaggaccttccccttccccgctcggtctcgaacagatgccgtgggcgccgacttgccacagatcttgtgggccgttgcaaccgcctccgtgggtgcgcgcactcagatataaagctagctgggcaccgcgaacgccccctcaaccatcccatatctacgccattggggcctatgcgtcgctgtgccgtcgtgcagtctgtgcgatccgaggagagagagaaggtgagccacgaccgctgtaacaacgtcgctaggtctgggtgcctcaccactgttcgtggaggctttccagtgcggcttcatgtggggtcttcgtcgaccatggccgtaatggctcgctgatgtttagcttgccatagatccatctcgggtgtggggcatcgccatcaatctcgtcaaccccgaacacgaagaagaagtggaagccactgaagaggtaccaccacctttggaaacacaggctgagaactgtttctacttcgatatttgtggatctgagcctgactcgcccataaacaaaggcaagccccggtgcatttgccacccccttgtgttttaaaatctttctcacttgcttgatgcactaggtgataggtgttg

SEQ ID NO: 13210 - DNA, 520 bp, Zea Mays
taaagctagctgggcaccgcgaacgccccctcaaccatcccatatctacgccattggggcctatgcgtcgctgtgccgtcgtgcagtctgtgcgatccgaggagagagagaaggtgagccacgaccgctgtaacaacgtcgctaggtctgggtgcctcaccactgttcgtggaggctttccagtgcggcttcatgtggggtcttcgtcgaccatggccgtaatggctcgctgatgtttagcttgccatagatccatctcgggtgtggggcatcgccatcaatctcgtcaaccccggtgaggagacaacaaacttttgttgtaccaaggtggtgaaaagtgaagataatcaagaatgaagctgccggaggaccaggtcctccttaaaaacttttatgtaaagaacttaatgggaggagcttttacctcccaggtattgtaataatacttttctgcactcgcttatactctggtctgtattaaacgacttactcttacttttaaataaatgtaagtttatgt

SEQ ID NO: 13211 - DNA, 720 bp, Zea Mays
ccaccttcttctcttctgctcgctagctcccgccatcagcccatctccatttaagccggagctcacagcagtgcgcgcgcatgagtgcgtggtcgttagatgtatatatatgtgcatgcatgagctgctcgaggcttgcaagaaggtggcagatttgatcgatggcgatgccggtggagacggcggtgtgcatcgcgcgcaacgtgctcttgctgctggacgcttgggtctggacgtgcgtgctcgccgccgacggcgccgcgcgcctcctccggtcggccacgcactgatcgatcgatcgtcccccgccgccgattcacggccgtatgtgtctagatgcaaaacgaaagatatcatctgctccacccatatgacctcgtgagtcgatcgtcctcgtaatagtacagggctcgtcaagcatgtgtatagcaacgttagatatatattgaagtcgtccaggatcggagatatactctctttttttcaatacaagtaatgattttgaaacagctacttgttcacctttcttttatttatcatcttagaggatgacgacattgatgtgaagtaatatatgtaacagaaactagctagctgcagcattaattgggtatgaattccaatttctgcgccagtgtaccaatttctcgtgttcaatgaaaaaatgtatgatgatttgcgtttgtcgtgaacctgaaggggaaaaaaattgtacccttg

SEQ ID NO: 13212 - DNA, 262 bp, Zea Mays
aatgtagccacatccatacgccctccttgtacatcctttttatattccgcaaaccgctacgttacaaaaagaaataaaaatacaatgttgtctattagcgccccaagagagaacactagccaaaatacttgctctgtaaaataacaataaagttaataatcatcaaactttatttggaaccaagacgccaagacttattatacataatctaatcacacttattaattaaacctcgttaagctcctcccccttgaactcgtag

SEQ ID NO: 13213 - DNA, 1112 bp, Zea Mays
cagtacgagggccttgaggttgtcgtcggtgagtgggacctccagatctggtgacttctggactcggagcaggacgtcgacaaaatcctcttcacggtcaccagggatgcgctggcgcttgccgctgatgtgctcgtccacgatctcgtcgcagaccgcgcggaggtcggccaggcaactcttaagccggcggcggaggccagtgacggtgctagcgacaggctcgagctccgggaagaagtcgccgacggtgaagccggcgaagaggtcctgcgcctcggcgaggacgtcgccgagcttgtcgcccttgccgtgcgggaaccgccgcccgaacgcgacgcggcagagcacgtcgttggccaggttcaggaagcactcgctgaggtccacgggctgctgcgccggggaggtgttcttggtgaggcgcgcgaggaggcggcggagctccttcacccggacggcgccgtaggtcgccacgcggcgcgccgagaggagctcggagaccaccacccgccgcgccatgcggtggtagggccccgccggcgcgaacgtcacgtcggagcacccgaacgacaggaactggcccgacaggaggtgcggccgcgacgccagcgccgggtcgttggtggtcagcgcggcgcgtgccagctccggcttggagatcaccacggcccgcacgctgcccaggcgcagccgaagcagtggcgccttcatggtacgcgccagctcggccatcgcgtggtggggcatctcggacaacaggtggaggtgcccgatgacgggccaacccggcggcgacggaggcagccgctgcggcgaccggcgcctcgtcgtgtagtagacatacgcggcggagagcgccaggaggaggagggacgacacccatgacacgaggttcagctccatgcgggccgtcgatcagtggccacttcggtcacaagtttcgcttgtgtgctagtttggcttgttgctaaaaatgcgctgtggtgtttatatataaatactagatcaataggtaaaaaaaatgtaccacgttgactttagggttcgtggtaggtgaggaagtggagactgcgtgtttgaacaacagtttcagtttgcgtggagatgct

SEQ ID NO: 13214 - DNA, 1930 bp, Zea Mays
caaatcgaacccaccaccgaaagctgttgcaattacagactcgctgctttttcccggcctccctcactcacccgaattcgaaaaaccaatctgatacgcgtgctgcagatttccaccccaagggagtgtggcagctctcccacagatcctacccaaaccacaatctcgccgcggtctccaatgggagccgagccggtggacttctcgccgccgccgccgccggagccgacgctttcgccggagccggagatctccggcaaggacagaggagggaactggaaggcggacatgatgtcagctctcggggagtcggtttccttcggccgcttcctctcggagccgctcgaatgggggaagaggtccgccttcgcgcacaaccgctacctcgaggaggcggcggtgcaggcgcgcccgggctcagtcgcgcagaagaaggcattcttcgaggcgcactacgctaggaagaagcgcaagagcgaggaccacgccgccgccgccagtgatgatgttgcaggcggtgatggcgagctcgaggcggcagaggatggtggtgccgcgtcgtggtcgttgtctgctactgagtcttcctgcatgacggatgaaccaccggcaccagcagaggaagtgtgctgcggttgggaggaggacagagtggtggattgtggtggcagcgccagcgacaagccagtacacgtgccggaggagctcgcggacatcaccgatgccgttgggccctgttgcaggatggatgcgcccacggatgagacacagcacatggagggcggcgacgaagtggttggagcagttttgcccttgcagaagcaggatttgtgcatggatagtttgacggctgttgatgccactttgaaggatatcacagattctgtcaagagaaggaggatccagatggcgtccctgcttccaaagccggcaaagctcagctctccccccacagcaaagaaagggcagaattcctcagctaaaagaaggtcaatgcggcattctgcaaaggagaataactcacctcctagtgcaggcagtaacaagctaagaacaacttcgacccccaaaaagaggtcaacgctgtcagccttgcatatgtctatgagtttcccgagatgtgaatctggcaatacttccatggcgtcaagaaatcttggtaccacaatcgctgctaggattagcgagttggaacatgcaaatgcaaccaagcctgcagaaaaaaacactaagcctcatgatttgaggctaccaagaaagaaattttccagcgctttaccagaaattgctccaaggacatctcaagtcgatgaagaaagatcatcacatataatgaaaatcaaagaaaagctatttggttcaacatttccaacactgcatcagaaatatggtataaccaaagaaaaagagagaaagatcaacaatgaacatgggtttaaagaatcacgacatagcttttgcttcaaagccacgctgttgccaaatttctatcgaagcaataaacaaccaaaggatacaagtcatcaggctactcaagaaatcctaagttcttcgaagtctggccatctatcaagggatattaatcaagcacaccaaacgggtaaagatgcacaaacgagtaaagatgcatctgatgccaaacaaatatgttgtttcccccttagaaagatgtattagatctattttatttagtgtttccattatatattagcctattcttttcattcatattcagtgacctatttgggacacctaatatgtagcaaggttatcttttaagccagcttggaggataacattctcaatccatccaatctcatggcataatgtttgtggtggtaatctagactaacttttcatggctttgaagtgtaatggttttgttttgagacagtgaactttctaaagctattaatccttgtaataaaaa

SEQ ID NO: 13215 - DNA, 1813 bp, Zea Mays
caaatcgaacccaccaccgaaagctgttgcaattacagactcgctgctttttcccggcctccctcactcacccgaattcgaaaaaccaatctgatacgcgtgctgcagatttccaccccaagggagtgtggcagctctcccacagatcctacccaaaccacaatctcgccgcggtctccaatgggagccgagccggtggacttctcgccgccgccgccgccggagccgacgctttcgccggagccggagatctccggcaaggacagaggagggaactggaaggcggacatgatgtcagctctcggggagtcggtttccttcggccgcttcctctcggagccgctcgaatgggggaagaggtccgccttcgcgcacaaccgctacctcgaggaggcggcggtgcaggcgcgcccgggctcagtcgcgcagaagaaggcattcttcgaggcgcactacgctaggaagaagcgcaagagcgaggaccacgccgccgccgccagtgatgatgttgcaggcggtgatggcgagctcgaggcggcagaggatggtggtgccgcgtcgtggtcgttgtctgctactgagtcttcctgcatgacggatgaaccaccggcaccagcagaggaagtgtgctgcggttgggaggaggacagagtggtggattgtggtggcagcgccagcgacaagccagtacacgtgccggaggagctcgcggacatcaccgatgccgttgggccctgttgcaggatggatgcgcccacggatgagacacagcacatggagggcggcgacgaagtggttggagcagttttgcccttgcagaagcaggatttgtgcatggatagtttgacggctgttgatgccactttgaaggatatcacagattctgtcaagagaaggaggatccagatggcgtccctgcttccaaagccggcaaagctcagctctccccccacagcaaagaaagggcagaattcctcagctaaaagaaggtcaatgcggcattctgcaaaggagaataactcacctcctagtgcaggcagtaacaagctaagaacaacttcgacccccaaaaagaggtcaacgctgtcagccttgcatatgtctatgagtttcccgagatgtgaatctggcaatacttccatggcgtcaagaaatcttggtaccacaatcgctgctaggattagcgagttggaacatgcaaatgcaaccaagcctgcagaaaaaaacactaagcctcatgatttgaggctaccaagaaagaaattttccagcgctttaccagaaattgctccaaggacatctcaagtcgatgaagaaagatcatcacatataatgaaaatcaaagaaaagctatttggttcaacatttccaacactgcatcagaaatatggtataaccaaagaaaaagaggctactcaagaaatcctaagttcttcgaagtctggccatctatcaagggatattaatcaagcacaccaaacgggtaaagatgcacaaacgagtaaagatgcatctgatgccaaacaaatatgttgtttcccccttagaaagatgtattagatctattttatttagtgtttccattatatattagcctattcttttcattcatattcagtgacctatttgggacacctaatatgtagcaaggttatcttttaagccagcttggaggataacattctcaatccatccaatctcatggcataatgtttgtggtggtaatctagactaacttttcatggctttgaagtgtaatggttttgttttgagacagtgaactttctaaagctattaatccttgtaataaaaa

SEQ ID NO: 13216 - DNA, 1648 bp, Zea Mays
ctacattttttttgccaagtcagacattccacacctgtgtcaatgtcgggtaccaagtgcactttggagtgtctccaaaatatttaccgaatgacccaaaatggacaccaacacccacatgttgtccgtgaactcgatttggttcaagatagcccatggttcaagacagaagacataactggcttgacctcagggaactggttctcagtaccaataccaattgaatcttaacatatgttatcattaaggcattaacagaatttttagagaaaagaaaagagaaaacattcaaaagcttttcagtgcaagttaatcacagaaaatcaacaaactatcgccatgatgagaggtcacaaaccttgcattcctcctgagtgttgccttctgcaaaggtttcctttcttttatctttagaacccttcagaacctcaaaagttagtagggagcaatcaggtgacagtcgaacagaggttttagataaataaataaaaaaatcaatttatgaaccttccattaacagggttttgattaggaatgaatgtgtatacatatcatcatgccagtatagtataacaaaagttggttcactagctgtaagtttaaagcaaaggcactgccaaggaatcaaggatggagttgctctaagggcatgtacaatgcaagatgcttaaacacaggtgcttagggagagagaacgttgtcatatcactaggcattgatagagaagttcattcctacaatgcaaagttgcaaataggttcttagataagcttaaaccaatatgttaacacacattaagcattgatgctaacgtaagcatcgtatccaactcatagccggggccgccggtcagcaagagctcctcttaagaagtgtgcagacccctctcagctgggtgctaactagtgtgtggtcatggtcatgttgttgttttagctctagaggagttgtgttagtgtgttgtgtgttcaggaggtctctttcctctctgtgtatttggttctcttttcttaatgaaatgacatgcaactctcttgcgttgttcgaaaaaaagcatcgaatccgccttttaagaatcaggtgctaatggttggtgaagaaaaaaaaaaggtgttttcaagcacctccattgtacatgcttcaatttatccgcactgagagaacatgagttaacatgtttcctgggaatgcaggatgtcacaatacactagaaattcttaagaactaactgtatgcaccctgtgtcacactggcctgtacaaagccaagaaattgctgaaggggttgaatacatgatcccaaaccttttgggttgcgatatttgtctcgtctaacttcgtaaaatgaattgccttttcaggttcttcacaaacctgccaacataagatatgaaaatttaagtaccaaacttaattacatccactaagcaatctcaagcagtattcaaataatatctatgacaaccttttcctttggctctagtttcccccttttcatatcaataacctgcaatgggtaaaaacatataggtaaacgtaaaaagtggagttcaacaaatgtggaagaagtatgatcttttaaagttagtaatgaaagcaaagcaataggcatttcactggttcattagcatgtacagtgcaataatgct

SEQ ID NO: 13217 - DNA, 4955 bp, Zea Mays
accagggaggcggcgtagattgtagggatgagacgttgtagggcgtggctgggtatggtttgaagatgtcatggctgctggcgagagacagagcccgcccacgaacaactcggccttctgggatgccgaggttgcgggagtagcacatcactgcgttgaagcggtcggcgtagtcctgcactgtgaaggtgaacggaaggcgcgccagctcggagaggcgtgtaccccgcacggtcggcacaaagcggaggaagcacagctcatgaaagcgctcccatgagggcataccctcgtcctgctcaagggcatagtaccacgtctgggctgcgcctgtgaggtggtaggaggccagccatgtgcgatccgaggccatcgtccgctatcctcagaagaattgctcgcactgattgaggcagtggaggggatctgcagcgccgtcgtaggtggggaactccagcttgtagaagtgcagcagggcgagcccaggatttggatccggagcgacgccgtgggaatgcgtggccggaatgccatggtcatcgaacgacccatcgtacaccagggtgtcgtccaccccaccatagaataccccgctggtgctagagttgggtggcacggatggggttgggagagtggccatcgtgaattgggggcgtgtgtcaggggctcagggcgagggcgtatgatgggatggccgagggcggcatagatagaaggtggatggggacagtgacgctgggtgggcggatcaagcctagaaggggtagcggggccgatgccggtggcgtcggcaatgcatgcagcgacagcgggaggatggcatgggacatgtgccttagcggtggaaaattggtggagagaaaggcggtgatggccgcaacgaaacggccgagatcgataaccgcctaggccacggcttccagggtaaggggtggtgttgttgaggggggtgtgaggataggggttgtggcggtcaacggcggcgcagaggttgctggtggcgcggtggtggtgggtggaggacctgacatagccgataccagattgatatgattggagtccctaccagggaggcggcgtaggttgtagggatgagacgttgtagggcgtggctcggtatggtttgaagatgtcgtggctgttggcgagagacaaagcaagagatggcgctacagtaccatgctatagtactcgcgctacagtacccgcgggtactgttcacggggttaggctgccaacgagaggaagaaggggtggcggctagggctcccagctccctgagggaagccgacaacaaataggttgcttctgcttagtttccctaggtacaaactaggccatttatatagagatggcttccttctgctaagaccggttcgtaaccggatctcctatttttttactccaacacttatccactctatctctaactagatctcctatttcctctccctgatctaccttatctaatcctatttttactccaatacttatccaaactatctctaactagatctcctatttattctccctaatctgatctgctttatctaatactaagggcccgtttggtttgagggactaaccatttcagtcccatttagtccctactccctaaataggcaaacggtgagactaaaacagggactaaactgctttagtctctagtccctcaaggggtgactaaaagggactaaaccatattaattccacattttgccccttatttattctagttgcactaatggtgggaaaatgttaaggggcattttagtctcttataagtcagttaatgcgttatgaatacttttagtccatgcaaccaaacagggttgggactaaataaaccaaacaggccctaaactgattccttattgggatcggttggctgggccctggcctttctaatcataacaatatcagtatatcacatacttatttgggctacacggccagtcggattcactagcgattttcactagcaagtttcatagcaactcatggtctgactccctaatccctagtgattttcatgagtccaaacagtccctagaaatctagaatagtaccctgggaaaatagaaccaacagctagttacaaagaatacctactaattgatgaaggcagcatggaacaaggcatcttaaattaaagaaaaacacagaaaaaatacttaacaagctgccacgtgcagactcagtgccatgaaatacacacacagaataagtgccaaaccagaaataagtagtcgatgactcataaaaagaattgtaaacattattaaaaaatctctcatggcatcaggctacccaaaaaaatgttcatcaagcagatattcaatttgagttacaaaatgttttcttattccggtacagtcagaaacctcaatttgtttttctttatagggggggggaggtgtggtgctgaagacaacttaagtgtaaggtggatataaatggagatatggactatatgtccattgcccaacactagcctgtacatcttcaaatgaaagagcatgtatgaacaccctgtatttattcagatcgaatgcagtaatggtgtggagttccatgcgatgagatcgtcatccaaaaacatggaacagggacgtgaagaccctgtgtttcttcagagcgaatgcaatagtgacgtggagtttcaattcctgagattgtcatcccaaaacgtggatcagggatgaagtgggtcaatgcctgggttgatgcttaggatgcagttgggacgtcatcatgttgacaaccaggacattaggatccatgagggcaagtgggttcgtgaagttgacaaggctgccaatgtgccaatgcaggagacaaagacaaccatggccatggcagcacaacagcagcggcagcaatttcagaggtcaagagctagtgccaaaggaatgatgtcatatgtgactgatttgtcgttctctggtgctagctgatggctggtggcaagagatttcgagcagcggagacagtacacttcaggtaaggagagagaaacaaggagaagagagacggtggcggctggttgggtttacatgtggagcagccaaggctcaggattagggctgttttgggggctaaatgggccaggaaatgaaagctcaatagtagtgttaccgtaaatggatgtgtagtttgtttacatactgtttaaacactgtctgtttaaccaaccgtttatcccgtttaactgaccatgcagcccgtttaattggccatgtagcccaaataaagacgctaaatgataggtgtccaactgtttaactcttagtgtttaggtgaacattgctcaatagtttgtctatccgtcagtgcctttcaggcttaccatacttttacttagttatttttaagctgtgatgctataaaaattacttaattgttgtacacatgattaactgatgaacgagggccgttcaggacggtcccagaagtaattccttcatgttaccagtgctggctgagcttagatttcaggactataagccgtttatgtcagtttatttgttacagattcaactgtactatcttcaattaaaagggaaaaaactatggtggcatggtgcacaagagaacaaaatggaatagcacgtccaaacatcacattgtatcaatgccaaagaatttgataggctcatatttatcaatgaaatcacgggcaaaatcaaggcacaattatgccgattggacaattactcaagttttttagatgaattgcgacctggctgaacttgggggtaagaacaatgatacaaaagatttttttaatcctattctaggcacttgttcataacaataggtgatgatcctacatcgtgcgagttcaatactagttactatacatcagaattgaatgaatgggtggcaaatatagcatctaagtgcaaggatatagtacaagcatatgcatgttactaaaacaccgccatataagctgcaaaaatggaattaaaggtgcattggcaaataacacatcatccaatctgatctctaaacaacataaggaagttgaaagcatccagatgcctcgagcagtggaagaacttccttgacttgaggcaaacatgggcaataagctccccctcatctttgtaatgtacattatgtttccactaattggcttgaaagtttcaggccaattagtgcaaacaatggacatcacaaaggagaggaaggggtaagctcctggctcggctggggtcaagaaacaaggtcgaggtcgctgctttctatactattttacaaggaaggatcgaaaatgaccatgtgtacctgggtctggatcaacatttcaggtcaagtatgcttgaaagtttagactatgtagacctttcgtacttggagtgtgttgggattgtccccatagtttgccacaatatagttgtggcaagcaaaaaatacatataatgttttcttcgccagagatttggcacaaattgctgctaaaagctgaaggaaaacctgtggcatgccagacctattgcaagcttaggaagccatccaaacacaaagctaagctttgtagcaacctgtggtcagttgcggagcaatccaaacagacccttaatccatgatatttttgtctggcctgctccaaattccaaatttactggtaagctcaaccactgttgttgaagaacaacatgtgtacagcacactctaactgaccccctaaccggcctacattcacccactccggacacaacaaccaaaccataccaaaaaaatcgtgcactcgcaacaacaagcacaagaaaataaagtctccactccagacgtcttccacagtacgagggagttgccaaatttagatcaacatgcaagcacaaaaagcaggagggacacatcgcacatgcagcagcgagagtagagggccagtcacctgatcatcatcaggagaagatgctttattgctgctgctgttgctcccgctg

SEQ ID NO: 13218 - DNA, 3477 bp, Zea Mays
gtcttcctctgctctctctcccctctccctctccctctctcctcctttcgtctccttctcgcgtaagccttgccttgccctgccctcaaaatccctcacaaaatcatcacctccacccgccgcctctcccccaattctccccggcggcgcgccctccccgaggcaactcgaccgtgcggcggcggcgctccggctaatgcgcgtgctcccctcagcctttcctggtgattttgtgttatccgtgcgtcacacgtaactctgggtgccgtagtgttggtgaaactacctgcattgtgtgatcgagtttggcttcgtggactcttctggtactgatatggacgaagccccgggtaatcaggacaatctgccattccttggcaacttcactggagccatgttttatggggaacaatctgcagggtgttcttctctcgaggcagggtgggttcctatgagtgaaaggatccctgctcagcatgatatagcaatggcgcgaggtaactggaatggtctgggcataatggacaatgccaatttgtttgatgagcaggcattggtatctgcatttggtaacatgggattgagcctcactggtaatgctgctgctgattcttctgctcactctggcactgttggatccagggatggactcctttttgcagactctttgtttacatcggctgattacccaacaaatctgccacatcagccagcgtttggtcaagatgagtttgtgccttcatattatacggtccacaatgctggacacatgaaaacaaagtttggtgcacaaaatcctccaatgtacacagggatgcatggcacagataatgcgtttgtgactagaaccaatttaccgcaagctttgtctttccagcaacatcatattattgatacgcagccacagacatatgcaccttgttatcagcagatggactataaatttaagcggcatgatatcgatgccgagacgaattttttcatgcagccacagtatccttatcagcaatatccacaggctgctgatgttcattggatcaatagcaatcagtatggtgttatcaactcatcagacaagtatgcagctgcgcctcaccgtggagtgcctactgttcgtcatctgggacatggcagtcctgatatctacaggaatggtgctgtaattcctaatggaagtaaccgacggggtttgacacatgtgaataactgtccttttataagttatcctgactgcttatgtgaaacctgtgaatattgtcagattcatctatctgaaaatctcaaacgttcatttgcgctcagacatacacccaaatgttcatcagacgattgcatctctgataaagcgaaaagttcaccgtcatccttggattctgtggccatgaaatctgcccaactgccctatagttcagttgatgaagttgttggggaattgtaccacttggcgaaggatcagaatggttgccgtttcctccaaaggatatttattgaaggttctcgagaggatgctcgaaaggtctttgatggtgtaattgagcatatcgatgaacttatggtggatccatttggaaattatttgatacagaaaatatttgagaagtgcaatgataatcaaaagatgcatatactttatgaaataaccaaaatacctggccagctaattgaagttgcatgcaacatgcatgggacacgtgtggtgcaaaaggtgatagaatctattagtacctcagatgaagtgtccatggttgtatctgctctgagccacggtgccattactctgatgatggattccaatggctgccatgttgcagaacgttgcttgctgaagctgtcacctgagggcaaagcagtaagacattttttttactttaatccaatgtagccgtactcatgccttttatgttgtctgactgtctctaatcttccttttatcagctttgtattgttataactttttaccctgctacttataacttaagatcctttatggctagagcattggcttatacctagaaattacaaatgttcaaactgatgcgaactaatgcccataagaatagtgcctggcttgggttgttcttagatggaccatcctacttcctatgacaaccgtgatatattttgattagctttccgaagagtgtttcatcatttaatagcaaccctggtgtttatgacttgctgcacatgaaagcttgcagtgctgctaattgtctcaccaagttactttaatcagcatcttctattatatttgatatctctttcctgaacattagctatctgaatttgaaataccgtttagtattaatttacaatgttctctacaatgaagtcttgtttggtggaacataataggtactaacgatgtctgaattaaccaaagggtgttcaatcaaatcaaaatgttagaaagtgtaggacattgcatctttctccttttttatattaatattatgattgttcgagagagaaaaaaagtgtagccatgatggattctcatgctagttgtatcgaaaggacaagaaaaaaaaaggataatataaattgtgtacttggcgactcctacgtacgtagtttctttggtatcattactaccaaatctgcaaagccgattttggaccgttgcagttccttgtcaacgcggccacgaaatactgcgttgagctagcaaaggatcggcaaggctgctgtatcatccagaaatgcatcgctcatgcgagcaaggagcagaggaacaggttactgtacagcatcacaactcgggctctcgagctcgcagaagatgagtacgggaactacgtgatacagttcgtgctggggctcggggttgcctgggcaacgaatgaggtactggacaagcttgagggcagctatgggtacctgtcgacgcagaagtgcagcagcaacgtggtcgagaagtgcctgagagaagcgccggagcgagaacgcgcgaggatcatccttgagctcatccacgaccccaggctgcttaacgtcctggttgataagtatgggaattatgtgatccagactgcactccgggagtctgagggtactgcggtggaggctgcgttgatccgagccatcaagccacacgccggcgctcttcggaacaacatgtatgggaagagggtcctgtcgaaagcctgcctgaagagcaggaagccctgatcccaacaatcccatgccgtcctgatcgcgctcaagtgtagtacaaatcctgtaataaggtagtgttatctaggaatggggaggaggaggagagtagtctgtggggtctggttggaggaggaatccacattttgggccagtgtagaacgatcccatgcgtgttgtagctgtagagttcttgggagagttcgttgcaaataagtaagcgttgtgtcgttgctacgattagtattacgtccgtcagacgatgctctgtatcttctttacattttcttacagcagtaaaatttccattttctggtacat

SEQ ID NO: 13219 - DNA, 581 bp, Zea Mays
atgtgtttttaatatatgtatgtgggctgtacatgccctaatccaccatctcactcctgattccgacgccaaccccctgccctgccgccgtctctctctaacccgcttctccacctccctcacatcggctactctccgcgcgcctaccgttccgcgccgcatcggattgggtggtcggggcctagtcgaggtttcgcgggacagcgtcggtccatggcggagcttgtgggaccgcgcgtctacagttgctgcacttgccggaaccacgtttgccttcacgacgacgtcatctccaaggcctttcaggggaggaatggccgtgcgtttctgttctctcatgccatgaacgtagttgtgggggcgaaggaggatagacacctcatgacagggctacacacagttgctgatatctactgtaatgactgccgtgaggtgttgggctggaagtatgtgagagcatatgaagagacgcagaaatacaaggaaggaaaattcatattcgagaagtcaaagattgtgaaggaaaactggcaagttgaaaatctggtgagctagtgatgacctttccatgattgaagaag

SEQ ID NO: 13220 - DNA, 1471 bp, Zea Mays
accacgctccaaccggacgcgcaccgcatcgtccgcgcatcccactccccaaagatgccaccagcgactccgtgaggccgtcgtcgccgccccatttcacttcccactgccgccttcgccaccgccgctccactgcaccaccactccagtctacccgtacacgcactctccgcggtccacgccatggcctcccagctccgcctccaccttgcggctacaccgcctctccttcctcaccgccgtccgcacctcgcgcggccgctctgccccaccctaaacccaatccgagcgccgctcccccctctctcacgcgttctctcccacgctcgtcccgcccgtgcggtcgggggagacgagtctggcggagggcccgtgctcgtgggtgaggattcggctgcgttcgagctcaaggaccagagcgtggcgtcgtgggcttacttcgccgggatactaggtgcggtgctcgttgcgctcaacgtgctgtggatcgaccccagtaccggggtcgggaccaaattcctcgacgctgtcgcctccgtctccgacagccacgaggttgttatgttgctccttaccataatttttgctgtagtccatagtggtatggcaagcctacgggaaagtggtgagaaaatagtgggggagcgtgtttaccgtgtgctgttcgcaggaatttcactgcctttagcagttactactattgtatacttcataaatcatcggtatgatggtactcaattatggcaagttcagggaatcactggcattcatgagcttctttggttctcgtcgttcatttcgttcttctttctgtatccatccactttcaatctcttggaagtggcagctgtggacaagcctaaattacacatgtgggaaacaggaataatgcgtattaccagacatccacagatggttggtcaggtaatttggtgccttgctcatacactatggattggcaactcagttgccgtagcggcctctgtcggacttatcagccaccatctctttggtgcttggaatggtgacaggaggctgttgtcacgctatggtgaagccttcgaagtactgaagaagagaacaagtgttatgcccttcgctgcgatcatcgatggacggcagaaactgcccaaagattatcacaaggagttctttcggttaccatatgtagcaatcacaatgttaaccttgggtgcatactttgctcatccattgatgcaagcatccagctaccaacttccctggtagtgctataaacctatatacatatatgctcagtgctggaactgaaaaaacatgaccagatcaaaaagaagagaaatatgtgctcctttggtatacatagttgaatgcataatcttatgtgtacaaatgtacaattatttatattattaacggaactttttgtatatggcattggtcaaaacttttatctatgatataccacaaaaaaattcatatcctgatggtg

SEQ ID NO: 13221 - DNA, 1360 bp, Zea Mays
accacgctccaaccggacgcgcaccgcatcgtccgcgcatcccactccccaaagatgccaccagcgactccgtgaggccgtcgtcgccgccccatttcacttcccactgccgccttcgccaccgccgctccactgcaccaccactccagtctacccgtacacgcactctccgcggtccacgccatggcctcccagctccgcctccaccttgcggctacaccgcctctccttcctcaccgccgtccgcacctcgcgcggccgctctgccccaccctaaacccaatccgagcgccgctcccccctctctcacgcgttctctcccacgctcgtcccgcccgtgcggtcgggggaggcatcgagccgaaggagggcgttgttgcggagggagacgagtctggcggagggcccgtgctcgtgggtgaggattcggctgcgttcgagctcaaggaccagagcgtggcgtcgtgggcttacttcgccgggatactaggtgcggtgctcgttgcgctcaacgtgctgtggatcgaccccagtaccggggtcgggaccaaattcctcgacgctgtcgcctccgtctccgacagccacgaggtatacttcataaatcatcggtatgatggtactcaattatggcaagttcagggaatcactggcattcatgagcttctttggttctcgtcgttcatttcgttcttctttctgtatccatccactttcaatctcttggaagtggcagctgtggacaagcctaaattacacatgtgggaaacaggaataatgcgtattaccagacatccacagatggttggtcaggtaatttggtgccttgctcatacactatggattggcaactcagttgccgtagcggcctctgtcggacttatcagccaccatctctttggtgcttggaatggtgacaggaggctgttgtcacgctatggtgaagccttcgaagtactgaagaagagaacaagtgttatgcccttcgctgcgatcatcgatggacggcagaaactgcccaaagattatcacaaggagttctttcggttaccatatgtagcaatcacaatgttaaccttgggtgcatactttgctcatccattgatgcaagcatccagctaccaacttccctggtagtgctataaacctatatacatatatgctcagtgctggaactgaaaaaacatgaccagatcaaaaagaagagaaatatgtgctcctttggtatacatagttgaatgcataatcttatgtgtacaaatgtacaattatttatattattaacggaactttttgtatatggcattggtcaaaacttttatctatgatataccacaaaaaaattcatatcctgatggtg

SEQ ID NO: 13222 - DNA, 1808 bp, Zea Mays
gtagcagcagcagcagcgaggggcgctcgtggtctatgactgacaggaagtctgggggaccggcgcgaggtgtcggccggatttcgtctactcagttagcatgaagctgatcggaacgagttcctgaagctgtgcaagaaggtggagtacaccatccgggcctggtacctcctccagttcgaagacctcatgcaactgtactcactgtttgatcctgtttctggtaaggagaggttacagcaacagaacctgacgccggaagaaatcgagaccctcgaattcaatttcatgacatatcttttccaggtgatggaaaagagcaacttcaagttgctatcagatgaagagtttgatattgcgcaatctggaaaatatttgttgaatcttccgatcaaagttgatgaatctaagctagacaagaagttgttgacaaaatattttaaagagcacccacatgacaatctaccagagttttcaaacaagtatatcatctttcgtcggggcattggaattgatcgaacaactgactactttttcattgagaaagtagatgtaatgatatcccgagcttggaggtcattgctcagggttaccaggattgaccggttattttctaagaaacaacatttgaagccaaagaatggtacgaagaagactgatgaaattaatgaagatgaagaagatccagaattgtttgttgagagaattcgattagaaaaaattgaactaagtttgaaaaatctcatgagtaagatgacaattcaagaacctacattcgataggatgattgtggtgtacaggagggctggtacaaagactgaacctgatcggggaatatttgtaaagcacttcaagaatatcccaatggctgacatggaaattgttcttccagagaagaaaaatccgtcactaacaccaatggattgggtcaagtttctcatttctgctgttatcggtttgcttatgacttgcaggtcactctagttggctctcttgaaatgccaaaggctgatgtatgggttgtaatagcaatcttgtctggtgtgattggatactgtgctaagatatacttcacatttcaacaaaatatgacaatgtatcagaatttgattacaaaatcaatgtatgacaaacagcttgatagtgggaaaggaactcttcttcacttatgcgatgacgtgatacagcaagaagttaaagaggtcataatttgttactacattttaatggagcagggaaaagccactatacaagatcttgatttacggtgtgaagagctaatcaaagaagagtttggcgcagattgcaattttgatgttcatgatgctataaagaagttagagaagcttagcattgttcatcgggattcgattggaaggatcttatgcgttccgttgaagcgtgcgaatgagatcattggtacgacgaccgaagaactggtgatgcgagcacaacagaaccttgcttcctgattccatttccagtcacgatggattgctgtaccttccctgtcatctccctgcaaagcgcgcaccagaggggaagcttagcttctgatcatcccggaagtctattcctagtctcatctccctgcaaagcgcgcaccagtaataaggaggaagctcctggtcatcctggaagtctattcacctgtacatgtgtacgtgtgtatctttgcattgcagtgccttccctctcgtttggtttagcacggagtgtatatgtcaaaccctgctgttacacagttgtacataacaattatatgtattttttaaatatataacagtacaaattcgttagttctccct

SEQ ID NO: 13223 - DNA, 1741 bp, Zea Mays
gggggaccggcgcgaggtgtcggccggatttcgtctactcagttagcatgaagctgatcggaacgagttcctgaagctgtgcaagaaggtggagtacaccatccgggcctggtacctcctccagttcgaagacctcatgcaactgtactcactgtttgatcctgtttctggtaaggagaggttacagcaacagaacctgacgccggaagaaatcgagaccctcgaattcaatttcatgacatatcttttccaggtgatggaaaagagcaacttcaagttgctatcagatgaagagtttgatattgcgcaatctggaaaatatttgttgaatcttccgatcaaagttgatgaatctaagctagacaagaagttgttgacaaaatattttaaagagcacccacatgacaatctaccagagttttcaaacaagtatatcatctttcgtcggggcattggaattgatcgaacaactgactactttttcattgagaaagtagatgtaatgatatcccgagcttggaggtcattgctcagggttaccaggattgaccggttattttctaagaaacaacatttgaagccaaagaatggtacgaagaagactgatgaaattaatgaagatgaagaagatccagaattgtttgttgagagaattcgattagaaaaaattgaactaagtttgaaaaatctcatgagtaagatgacaattcaagaacctacattcgataggatgattgtggtgtacaggagggctggtacaaagactgaacctgatcggggaatatttgtaaagcacttcaagaatatcccaatggctgacatggaaattgttcttccagagaagaaaaatccgtcactaacaccaatggattgggtcaagtttctcatttctgctgttatcggtttggtcactctagttggctctcttgaaatgccaaaggctgatgtatgggttgtaatagcaatcttgtctggtgtgattggatactgtgctaagatatacttcacatttcaacaaaatatgacaatgtatcagaatttgattacaaaatcaatgtatgacaaacagcttgatagtgggaaaggaactcttcttcacttatgcgatgacgtgatacagcaagaagttaaagaggtcataatttgttactacattttaatggagcagggaaaagccactatacaagatcttgatttacggtgtgaagagctaatcaaagaagagtttggcgcagattgcaattttgatgttcatgatgctataaagaagttagagaagcttagcattgttcatcgggattcgattggaaggatcttatgcgttccgttgaagcgtgcgaatgagatcattggtacgacgaccgaagaactggtgatgcgagcacaacagaaccttgcttcctgattccatttccagtcacgatggattgctgtaccttccctgtcatctccctgcaaagcgcgcaccagaggggaagcttagcttctgatcatcccggaagtctattcctagtctcatctccctgcaaagcgcgcaccagtaataaggaggaagctcctggtcatcctggaagtctattcacctgtacatgtgtacgtgtgtatctttgcattgcagtgccttccctctcgtttggtttagcacggagtgtatatgtcaaaccctgctgttacacagttgtacataacaattatatgtattttttaaatatataacagtacaaattcgttagttctccct

SEQ ID NO: 13224 - DNA, 470 bp, Zea Mays
cgacaggcttagggggctaattggaggattcgattggaaggatcttatgcgttccgttgaagcgtgcgaatgagatcattggtacgacgaccgaagaactggtgatgcgagcacaacagaaccttgcttcctgattccatttccagtcacgatggattgctgtaccttccctgtcatctccctgcaaagcgcgcaccagaggggaagcttagcttctgatcatcccggaagtctattcctagtctcatctccctgcaaagcgcgcaccagtaataaggaggaagctcctggtcatcctggaagtctattcacctgtacatgtgtacgtgtgtatctttgcattgcagtgccttccctctcgtttggtttagcacggagtgtatatgtcaaaccctgctgttacacagttgtacataacaattatatgtattttttaaatatataacagtacaaattcgttagttctccct

SEQ ID NO: 13225 - DNA, 3210 bp, Zea Mays
accgcgcctcgaaggttcttgctcccgaaggcaccggccgacgcgtcaccgcactgcaccgcaccggctataaaaactttcccttctcgccgcccgtcccgccaatcagccccatcactcttccgtcgtgtcttctcgcgctttccactcccaacgagatccatcacccccaacctctgtaagcttcccttgacgtcgtcgtcgtcatccatggagagcaaggacggtacccacgatcccgccacgacggccgcgccaccggccggcgcgccgcagcccgcgatgccttccgcggagacggcgcggtggggcacgcggcagatgggcccgccggcggcccccggggcgcacccggagaaccaagaggcggcgcggtggacggccgcgcgcggggaccaggagctgccgccgtacgtcatcatcggtgagcccgtggcggcgccgccgccgccacagcataggggcaagggggacagccccatggagcacatcctcgacttcttcaacacctggagccgcaaggccgaggagctggcctccaacatctgggtcaatcgtaagttcggatcctatgcttttgtttcggttggttggagcagaggatgctctgttttgctcgtcccctgatcagagacaagaggcactgaaatctttgctttgttgttctacgtggcactattagacgatgcatttcctaaatctaccaatatcagccgattctaagctagagttagctattatatagataacagaatatacatatagcaacttacgcaaatgtcagcagaaactcacggattaaccttgaaattgaaattcaacatttgagcatgtagtaatttaagctcttaagttggtcattattcattaggctcaatacaactcggatcgatatcgaccacaactgttagatcggtttgtccgatcgataggtaggtctacgaccatctattcagagccaaatagattggttgtctattcagagccagatagattggttacagacaaccgtattgaagaacctgttgataatgatcgactttagtggtgtcaactggctatttttttaaccattaaaaatgttaaacaatccgtaaaacaggttttttaaaaaaaactagaatataatctataaattagattttatttatggattatttattatttatttttatatttaagttatgcagttttatttatggattatgtattttttattatatttgagttatataattttaaattgttggtatataactaaatgtcggtaaaagaaatttgaaaacctggcgatgagctgaataaaaaccaatgtgtaaaagctatacacatacacttaagttttatgatagactaggaaagtgttgttacgatttttatttatgttttaagtatagaatacagaacaaatataagtattttgttggctagatgggtgtaaatttgaggtttaaagccaacaaccataatttgaatctctatttgtatatgattttagcattttttattatttaaacgtagaggagcacaacaacggtttaaaccgtagaacaagaaaactgactatttaatatagtagagatataaacggttcatttgacccttgtaactagattcatttaacaatgcagcactgtattttctatgatgatgcggaaatatgaatgctgccaagcctttttttactttcgaaaagaacacacttccatcttgtctctaaattctgcttgttgattttgaaatctaatctatgcctcctcatctagtccaccttgaaaagtagttctagggtacttgaatgctgggaagtggtaaggtcaggtcatgggctcatggcaaacctgcttactcttctactccaccttaaacagtactacagtagtagttctaaggtacttaaatgctgagaagtggtaaaacgaggtcattgctgacacactaattaaaccacatgctaataaggtcaaaagcgaatatctgtgcccatttggtgatttattttatggtgagggaattaacccagctcatttcctgtagccttaatcaaactgttgacccaggccaggtgctggggcctgggcagcacatttgacgtgtgtttgtttgttgtacatgttccagtgaaggccgcgccatccatgtcggacgccgcgatggggaagctaagcctcggcgcgaaggcgctgtcggagggcggcttcgagaagctgtacaagcagacgttctcgtccagccccgacgagcacctgaagaagacgttcgcttgctacctctccacggccacggggcccgtcgccggcacgctgtacctgaccaacctgaacgtcgccttctgcagcgaccgcccgctctccttcgccgcgccgtctggccagaccgcctggagctactacaaggttatgatcccccttggcaagatcgcgacggtggagccggtgacgatgaaggagagcccgccggagaagtacgtccacgtcgtcaccgtcgactcccacgacttctggttcatgggcttcgtcagctacgacaaggccgtgcactacctcgtcgaggccgtctcccagcgcggcgtcgccactgccggcggcaagtgatgaggcgacgccgctccggagactgggcgttcggcacccgtcgtcgtgtatatataatatagctgatggctctgcctgtgcattactcgtgttctgctactactagcactacgatggtgtcccggcgtgtgtttgaatgttctcagtgtgtgtgtgtgtggcacagatgcgccactgctattctatgcacttgtgagtattatgctagctttcacggactcgtcgagaaacgagagtgaagttcttcctgtctgcagcacctacatcgagctcggactgtggtagaattacgaattcactgggcagatacgaatcgatcctaaatccttgccggcgggtaatttgaatgaatcttaatttgtgtacatgcagaatggctcattttgagcactcatacttctttaaagctaaagaagcactagtttcgtttattctttacttaattgtgtccacgcacgacacgttctgttactcctcgtttctcgtcttcgtgagaaaccacgacaaataagctataaaaataaaaaataattagacttctttttaactcatattttttgtcttttagtttagataaagtgtattatttttcttatatatagactatatgtttatt

SEQ ID NO: 13226 - DNA, 1650 bp, Zea Mays
accgcgcctcgaaggttcttgctcccgaaggcaccggccgacgcgtcaccgcactgcaccgcaccggctataaaaactttcccttctcgccgcccgtcccgccaatcagccccatcactcttccgtcgtgtcttctcgcgctttccactcccaacgagatccatcacccccaacctctgtaagcttcccttgacgtcgtcgtcgtcatccatggagagcaaggacggtacccacgatcccgccacgacggccgcgccaccggccggcgcgccgcagcccgcgatgccttccgcggagacggcgcggtggggcacgcggcagatgggcccgccggcggcccccggggcgcacccggagaaccaagaggcggcgcggtggacggccgcgcgcggggaccaggagctgccgccgtacgtcatcatcggtgagcccgtggcggcgccgccgccgccacagcataggggcaagggggacagccccatggagcacatcctcgacttcttcaacacctggagccgcaaggccgaggagctggcctccaacatctgggtcaatctgaaggccgcgccatccatgtcggacgccgcgatggggaagctaagcctcggcgcgaaggcgctgtcggagggcggcttcgagaagctgtacaagcagacgttctcgtccagccccgacgagcacctgaagaagacgttcgcttgctacctctccacggccacggggcccgtcgccggcacgctgtacctgaccaacctgaacgtcgccttctgcagcgaccgcccgctctccttcgccgcgccgtctggccagaccgcctggagctactacaaggtatggttatgatcccccttggcaagatcgcgacggtggagccggtgacgatgaaggagagcccgccggagaagtacgtccacgtcgtcaccgtcgactcccacgacttctggttcatgggcttcgtcagctacgacaaggccgtgcactacctcgtcgaggccgtctcccagcgcggcgtcgccactgccggcggcaagtgatgaggcgacgccgctccggagactgggcgttcggcacccgtcgtcgtgtatatataatatagctgatggctctgcctgtgcattactcgtgttctgctactactagcactacgatggtgtcccggcgtgtgtttgaatgttctcagtgtgtgtgtgtgtggcacagatgcgccactgctattctatgcacttgtgagtattatgctagctttcacggactcgtcgagaaacgagagtgaagttcttcctgtctgcagcacctacatcgagctcggactgtggtagaattacgaattcactgggcagatacgaatcgatcctaaatccttgccggcgggtaatttgaatgaatcttaatttgtgtacatgcagaatggctcattttgagcactcatacttctttaaagctaaagaagcactagtttcgtttattctttacttaattgtgtccacgcacgacacgttctgttactcctcgtttctcgtcttcgtgagaaaccacgacaaataagctataaaaataaaaaataattagacttctttttaactcatattttttgtcttttagtttagataaagtgtattatttttcttatatatagactatatgtttatt

SEQ ID NO: 13227 - DNA, 2506 bp, Zea Mays
agtccacaaagcccagcaagcagcccaaccgatcccaatcccaaattcccaacacgaagcccagccagcccttccccactaggctagctagctagtagtatcttttttagtacgtggccagccgacaggcgcttgtcggagtcgagcacttgagtccccttctctccttcccttcacctcccgattgccgccgccaccaccaggcaccaggcccaccaccgcgtctcccaaccccaagcactcgacgccatggtgtcggatgccagcaagaagaaggccgcccagaagaaggccgccgcggctgccaagaggggaggcaaggccgcggcggcgtcctcctcgtcgtcgtctgcggccgcggccgcggccgtcgacaaggcggcgaacggcgtcgcggcgctcaagctatcggaccggacctgcaccggcgtcctcgcgtctcacccgctctcccgcgatatccacagtctctctctttaacattccatgggcatgaccttattgtggattctgagttggagctgaactacgggaggcgatacggtttgcttgggatgaacggctgtgggaaatctactcttctcacagcaataggctgcagagaacttcctatccctgaacacatggacatataccatctaagccatgagattgaagcttctgacatgtccgcactgcaagctgttgttacttgtgacgaagaaagagtgaaattggaaaaggaagctgaaattttggctgcacaggatgatggtggtggtgaagctttggaacgtgtttatgagcgtctagatgcaatggatgctggaactgcagaaaagcgggctgctgaattattattcggtctgggctttaacaaacaaatgcagacaaagaaaactaaagatttctctggaggttggcgtatgaggattgctttggcaagagcactttttatgaatccaacgatccttttgcttgatgagcccacaaaccatctagatcttgaggcttgtgtctggttggaagagacactgaagaaatttgaccgcatacttgttgtcatatcacactctcaagattttctaaatggagtgtgcactaacattatccatatgcaaagcaagaagctcaagttatacactggtaactacgatcagtatgttcaaactcgctctgagcttgaagagaatcaaatgaagcagtacaaatgggagcaggaacagattgcttcaatgaaggagtacattgctcgcttcggtcatggttctgcaaagcttgctcgtcaggctcagagcaaagagaaaactcttgcaaagatggagcgaggtggtctcacagagaaggttgttagggacagagttctagtgttccggtttacagatgttggcaagcttcctccgcccgtgcttcaatttgttgaagtcaagtttgggtatacaccagataatctcatatacaagagccttgactttggtgttgatcttgactctagaatcgcattggttggtcccaacggggcagggaagagcactcttctgaagcttatgactggtgaccttgttccattagatggcatggttcggcgccacaatcacctgcgcattgcgcagtaccatcagcatctggcggagaagctggacctggacatgtcagccctggcttacatgatgaaggaataccctgggactgaagaagaaaagatgcgtgccgctgttggcaggttcggcctgtcaggaaaggcgcaggtgatgccgatgaagaatctttctgatgggcaaaggagccgcgtcatctttgcatggctggcatataggcagccgcaactgctactgcttgatgagccgacaaaccatctggatatcgagaccattgactcactggcagaggcgctgaatgagtgggatggtggtttggtcttggtgagccacgatttcaggctgatcaaccaggtcgctcaggagatctgggtgtgtgagaatcaagaggtgacaaggtgggaaggcgatatcatggatttcaaggcacacttgaagagcaaggctggtttatctgattagaatgcttttctagtaaccatgaactttttaactctgtatgatgaagtccctgttttacagtagcgaactatcaaatatactgttagggatagtttggtaactacaaatccggagggggttggaggggctagaatccccttcttattcaattttgaataagtctattctctccaatcctctccggttttctggctcccaaactaaccccttcgggattgaagggtattgaagaggaaattagttcatttccaccttaattccctcccaatcccgaaggggatttgaggttcacaaagtagcgaatgtgtcagactcctacttccctcgcaaccatactaccttgtactacctgaaatttttatttatatatatatttgaaatgttattatgtgttccgtaagctttgtaggttttgtaagtttggatttgtcaaagttactgcatattatgatcattgtgaacataca

SEQ ID NO: 13228 - DNA, 1913 bp, Zea Mays
ttggaatcgccgacatgtttgattgatcgctagagatctccactgctttgtttcattccacggcggactgacctgttggttttgatatagagtctctctctttaacattccatgggcatgaccttattgtggattctgagttggagctgaactacgggaggcgatacggtttgcttgggatgaacggctgtgggaaatctactcttctcacagcaataggctgcagagaacttcctatccctgaacacatggacatataccatctaagccatgagattgaagcttctgacatgtccgcactgcaagctgttgttacttgtgacgaagaaagagtgaaattggaaaaggaagctgaaattttggctgcacaggatgatggtggtggtgaagctttggaacgtgtttatgagcgtctagatgcaatggatgctggaactgcagaaaagcgggctgctgaattattattcggtctgggctttaacaaacaaatgcagacaaagaaaactaaagatttctctggaggttggcgtatgaggattgctttggcaagagcactttttatgaatccaacgatccttttgcttgatgagcccacaaaccatctagatcttgaggcttgtgtctggttggaagagacactgaagaaatttgaccgcatacttgttgtcatatcacactctcaagattttctaaatggagtgtgcactaacattatccatatgcaaagcaagaagctcaagttatacactggtaactacgatcagtatgttcaaactcgctctgagcttgaagagaatcaaatgaagcagtacaaatgggagcaggaacagattgcttcaatgaaggagtacattgctcgcttcggtcatggttctgcaaagcttgctcgtcaggctcagagcaaagagaaaactcttgcaaagatggagcgaggtggtctcacagagaaggttgttagggacagagttctagtgttccggtttacagatgttggcaagcttcctccgcccgtgcttcaatttgttgaagtcaagtttgggtatacaccagataatctcatatacaagagccttgactttggtgttgatcttgactctagaatcgcattggttggtcccaacggggcagggaagagcactcttctgaagcttatgactggtgaccttgttccattagatggcatggttcggcgccacaatcacctgcgcattgcgcagtaccatcagcatctggcggagaagctggacctggacatgtcagccctggcttacatgatgaaggaataccctgggactgaagaagaaaagatgcgtgccgctgttggcaggttcggcctgtcaggaaaggcgcaggtgatgccgatgaagaatctttctgatgggcaaaggagccgcgtcatctttgcatggctggcatataggcagccgcaactgctactgcttgatgagccgacaaaccatctggatatcgagaccattgactcactggcagaggcgctgaatgagtgggatggtggtttggtcttggtgagccacgatttcaggctgatcaaccaggtcgctcaggagatctgggtgtgtgagaatcaagaggtgacaaggtgggaaggcgatatcatggatttcaaggcacacttgaagagcaaggctggtttatctgattagaatgcttttctagtaaccatgaactttttaactctgtatgatgaagtccctgttttacagtagcgaactatcaaatatactcgaatgtgtcagactcctacttccctcgcaaccatactaccttgtactacctgaaatttttatttatatatatatttgaaatgttattatgtgttccgtaagctttgtaggttttgtaagtttggatttgtcaaagttactgcatattatgatcattgtgaacataca

SEQ ID NO: 13229 - DNA, 407 bp, Zea Mays
caagcatatttctatgcccatcatagagatcacaaggtcaaggattaaattggtatgccttcgatgggtatggggaaaccaaaggcatcaaatacaggaaaatggtcggacatgtctttcctaggttaggttgataaagtaacatggcggtccttaaaaacaggcaaattggataaggtacatcagcttgcaccaaccgaacaaggacatggtttaggatggagacatgactcgaaattcttgttttaagctgggtacactttaggtccaacaaagaaattatctaggcatttatttttatgtgtttggtcctggagtgataacggaaaaatttaagttttgggtcatggttcactaaataagaacgtggcctaattttgggtttaagcaaacaaactactaacctt

SEQ ID NO: 13230 - DNA, 2023 bp, Zea Mays
aacaaatttgtttcatacacgagtgcccatctaatctgtctcttcctgctgtcgcagtcgcaggacgcacctgcacgcgtccaccaagcccccgactccccgaggccccgacctgcgcacccacgggatccctacctatccggccgtcacccctccccctgcccctcccgagttggattgttcgcggaattggcggaggggcagccggatatgtcgtcgtcggttgggggcggcagcgcgggcggcggcggagtggacatggtcagcctgctggagaaggccaaggatttggaccagctaaagaaggaacaggacgaaatcgttgccgatatcaacaagattcacaagaagctcctcgcatgtaagctactctgaagctgctgttgaccgccgcctcggccccagagatggttgataaaccagttgacaccattttgctcaagcttcgtggtttatatgcacgtgcaaaggagctctctgagaatgaaatcagtgcctcaaatgctttgattggattattagatggtttgttgcaatctggagcttcaactgcacaaaagaaaaagatagaagttggtgagcagaaaaagaagaggatcaagtctgatacagattctgcacgattttctgctgcatctatgaggaatcaacttgaccaagctgcaagccttaaaggagagcaggttgctgctagggtaaaatcagatgacgaaaaagatgagtggtttgtcgtgaaggtcatacatttcgataaggaaacaaaagagtatgtgtctactttatatttttctctctgcagggcagacatttatttttgatatgaaagtttactcgaggggaaaattacctttctgaatggaggtaacgttaataacatactacttccttgactattttattacttgaaataggagtgtgatgttatgaacctttcttacaagatcctgggttggtaaggtcgtaaggcaccacgttattgataggaaagtaggaattttcaaggtatctgctgtattgctgaaattgccccgcaaaaactgagagctatggcgatgacatctccagcactgaatctcagcattatagtaaataagaaaaggaggaaaagtgggcattgcatttatcatgtagagaggaggtaataataagctgttactgattcggcatgcaatatagtttgatgagatttatatcattgtttgtgataacccttcgttagtgatttctccttgccaaacaatttgtggtagtgctcctggacaacttatcattaccatgtacatgcacattttcgtgtgcctgttactgttgccttatatgtgaccatcatcctgtaagtatcactcatttaatattgatgcacgtgcaggtatgaagtacttgatgaagaaccaggtgatgacgaagagagcactcaaaagaagtacaagttgcctatgtcttacattattccatttccgaagaaaggggatccttcgagtgccccggattttgggcagggtcgacaagttttagctgtttatcctggcacaacagcattatacagagctaccgtagcttctcatcgtaagaggaagtctgatgattatattctggagttcgatgacgatgaggaggacggtgctctgccgcagagagccgtgccgttctacagggtggttgccctgccggagggccacaggcagtagtgacatttgacgcagttctgcattcctagtgtaacatatagcgcaaggtagggtgtcttcagtgtgacaatgtggtggtcatatctacgcgaaacgagagagaaaacaaggacgtgcatgtagcacttacatgtggggtccttgtataaaagacgatgacgtttttttttcaatctgctagagcacgtctatgtaattgcaatccagttttaatctcttatattatactttagagagaaagggcatactgtaagggtctatttggcaacaatatttctcaaaattatagttttataatactaaaaatatcgtagtttttgtcagctccaaaaata

SEQ ID NO: 13231 - DNA, 1904 bp, Zea Mays
aacaaatttgtttcatacacgagtgcccatctaatctgtctcttcctgctgtcgcagtcgcaggacgcacctgcacgcgtccaccaagcccccgactccccgaggccccgacctgcgcacccacgggatccctacctatccggccgtcacccctccccctgcccctcccgagttggattgttcgcggaattggcggaggggcagccggatatgtcgtcgtcggttgggggcggcagcgcgggcggcggcggagtggacatggtcagcctgctggagaaggccaaggatttggaccagctaaagaaggaacaggacgaaatcgttgccgatatcaacaagattcacaagaagctcctcgcatccccagagatggttgataaaccagttgacaccattttgctcaagcttcgtggtttatatgcacgtgcaaaggagctctctgagaatgaaatcagtgcctcaaatgctttgattggattattagatggtttgttgcaatctggagcttcaactgcacaaaagaaaaagatagaagttggtgagcagaaaaagaagaggatcaagtctgatacagattctgcacgattttctgctgcatctatgaggaatcaacttgaccaagctgcaagccttaaaggagagcaggttgctgctagggtaaaatcagatgacgaaaaagatgagtggtttgtcgtgaaggtcatacatttcgataaggaaacaaaagagtatgtgtctactttatatttttctctctgcagggcagacatttatttttgatatgaaagtttactcgaggggaaaattacctttctgaatggagatcctgggttggtaaggtcgtaaggcaccacgttattgataggaaagtaggaattttcaaggtatctgctgtattgctgaaattgccccgcaaaaactgagagctatggcgatgacatctccagcactgaatctcagcattatagtaaataagaaaaggaggaaaagtgggcattgcatttatcatgtagagaggaggtaataataagctgttactgattcggcatgcaatatagtttgatgagatttatatcattgtttgtgataacccttcgttagtgatttctccttgccaaacaatttgtggtagtgctcctggacaacttatcattaccatgtacatgcacattttcgtgtgcctgttactgttgccttatatgtgaccatcatcctgtaagtatcactcatttaatattgatgcacgtgcaggtatgaagtacttgatgaagaaccaggtgatgacgaagagagcactcaaaagaagtacaagttgcctatgtcttacattattccatttccgaagaaaggggatccttcgagtgccccggattttgggcagggtcgacaagttttagctgtttatcctggcacaacagcattatacagagctaccgtagcttctcatcgtaaggtaacatcttaagttatattctggagttcgatgacgatgaggaggacggtgctctgccgcagagagccgtgccgttctacagggtggttgccctgccggagggccacaggcagtagtgacatttgacgcagttctgcattcctagtgtaacatatagcgcaaggtagggtgtcttcagtgtgacaatgtggtggtcatatctacgcgaaacgagagagaaaacaaggacgtgcatgtagcacttacatgtggggtccttgtataaaagacgatgacgtttttttttcaatctgctagagcacgtctatgtaattgcaatccagttttaatctcttatattatactttagagagaaagggcatactgtaagggtctatttggcaacaatatttctcaaaattatagttttataatactaaaaatatcgtagtttttgtcagctccaaaaata

SEQ ID NO: 13232 - DNA, 1754 bp, Zea Mays
aacaaatttgtttcatacacgagtgcccatctaatctgtctcttcctgctgtcgcagtcgcaggacgcacctgcacgcgtccaccaagcccccgactccccgaggccccgacctgcgcacccacgggatccctacctatccggccgtcacccctccccctgcccctcccgagttggattgttcgcggaattggcggaggggcagccggatatgtcgtcgtcggttgggggcggcagcgcgggcggcggcggagtggacatggtcagcctgctggagaaggccaaggatttggaccagctaaagaaggaacaggacgaaatcgttgccgatatcaacaagattcacaagaagctcctcgcatccccagagatggttgataaaccagttgacaccattttgctcaagcttcgtggtttatatgcacgtgcaaaggagctctctgagaatgaaatcagtgcctcaaatgctttgattggattattagatggtttgttgcaatctggagcttcaactgcacaaaagaaaaagatagaagttggtgagcagaaaaagaagaggatcaagtctgatacagattctgcacgattttctgctgcatctatgaggaatcaacttgaccaagctgcaagccttaaaggagagcaggttgctgctagggtaaaatcagatgacgaaaaagatgagtggtttgtcgtgaaggtcatacatttcgataaggaaacaaaagagtatgtgtctactttatatttttctctctgcagggcagacatttatttttgatatgaaagtttactcgaggggaaaattacctttctgaatggaggtaacgttaataacatactacttccttgactattttattacttgaaataggagtgtgatgttatgaacctttcttacaagatcctgggttggtaaggtcgtaaggcaccacgttattgataggaaagtaggaattttcaaggtatctgctgtattgctgaaattgccccgcaaaaactgagagctatggcgatgacatctccagcactgaatctcagcattatagtaaataagaaaaggaggaaaagtgggcattgcatttatcatgtagagaggaggtatgaagtacttgatgaagaaccaggtgatgacgaagagagcactcaaaagaagtacaagttgcctatgtcttacattattccatttccgaagaaaggggatccttcgagtgccccggattttgggcagggtcgacaagttttagctgtttatcctggcacaacagcattatacagagctaccgtagcttctcatcgtaagaggaagtctgatgattatattctggagttcgatgacgatgaggaggacggtgctctgccgcagagagccgtgccgttctacagggtggttgccctgccggagggccacaggcagtagtgacatttgacgcagttctgcattcctagtgtaacatatagcgcaaggtagggtgtcttcagtgtgacaatgtggtggtcatatctacgcgaaacgagagagaaaacaaggacgtgcatgtagcacttacatgtggggtccttgtataaaagacgatgacgtttttttttcaatctgctagagcacgtctatgtaattgcaatccagttttaatctcttatattatactttagagagaaagggcatactgtaagggtctatttggcaacaatatttctcaaaattatagttttataatactaaaaatatcgtagtttttgtcagctccaaaaata

SEQ ID NO: 13233 - DNA, 1368 bp, Zea Mays
aacaaatttgtttcatacacgagtgcccatctaatctgtctcttcctgctgtcgcagtcgcaggacgcacctgcacgcgtccaccaagcccccgactccccgaggccccgacctgcgcacccacgggatccctacctatccggccgtcacccctccccctgcccctcccgagttggattgttcgcggaattggcggaggggcagccggatatgtcgtcgtcggttgggggcggcagcgcgggcggcggcggagtggacatggtcagcctgctggagaaggccaaggatttggaccagctaaagaaggaacaggacgaaatcgttgccgatatcaacaagattcacaagaagctcctcgcatccccagagatggttgataaaccagttgacaccattttgctcaagcttcgtggtttatatgcacgtgcaaaggagctctctgagaatgaaatcagtgcctcaaatgctttgattggattattagatggtttgttgcaatctggagcttcaactgcacaaaagaaaaagatagaagttggtgagcagaaaaagaagaggatcaagtctgatacagattctgcacgattttctgctgcatctatgaggaatcaacttgaccaagctgcaagccttaaaggagagcaggttgctgctagggtaaaatcagatgacgaaaaagatgagtggtttgtcgtgaaggtcatacatttcgataaggaaacaaaagagtatgaagtacttgatgaagaaccaggtgatgacgaagagagcactcaaaagaagtacaagttgcctatgtcttacattattccatttccgaagaaaggggatccttcgagtgccccggattttgggcagggtcgacaagttttagctgtttatcctggcacaacagcattatacagagctaccgtagcttctcatcgtaagttatattctggagttcgatgacgatgaggaggacggtgctctgccgcagagagccgtgccgttctacagggtggttgccctgccggagggccacaggcagtagtgacatttgacgcagttctgcattcctagtgtaacatatagcgcaaggtagggtgtcttcagtgtgacaatgtggtggtcatatctacgcgaaacgagagagaaaacaaggacgtgcatgtagcacttacatgtggggtccttgtataaaagacgatgacgtttttttttcaatctgctagagcacgtctatgtaattgcaatccagttttaatctcttatattatactttagagagaaagggcatactgtaagggtctatttggcaacaatatttctcaaaattatagttttataatactaaaaatatcgtagtttttgtcagctccaaaaata

SEQ ID NO: 13234 - DNA, 2837 bp, Zea Mays
gaaaaatgttgttgtttcaaaaatttaagaaataaactcataaaagataatattagttttctcgaaccttcctccgctttcccgctctcagcaaccccactatccaccatcctatccctagcagcagcaggacgccaggaccacgtgtttcattaacaaacaaacatgatcctgctttgtcaccggcccctccctcacctaccaggatgaacctgctgacgtcgacctctgtcaccattcccgcccatgctcaactcccctagagaccggtcccacgcgccggcggagccctgcttttttcgtcgtcgctctcccagcgagccgtgcccgtctgctcctcctctctccctccatgctcctcgctgcgctctcttccccgcacacttatctttccagctcagtgtccgtccctctcctcgacacgcacatcttccattgctcgcttgcttcctcgtgtcgtctagctctatccgattccaacacagctacctataaatacatctctctctctctctctctccccgagcagagctaggcagagggcagaccattggcgagaggattgttggagctcggccgagcagagcacgcacagtgtgattgtgtgtgtgtgtgtctgacatggcgtcgctctggctagcgagagcgtcgtcccagctggcgcgccgtgccgccgccaggaggcctcctccgcgtcctgcgcgccacggctccggccaacccaccagttcgtggttcttgggctcggtgccgcaggcggcccttgggtcaccagcgctggacacaagccgccggggcttctgctccgtccggcgcttcgcaggggagagcagcgctgctgctgctgcggcggctgtcgtcgacgaggagccggagagcgggttcgcagccggcgatcagcaggcagttgactttccaggagggaaagtatcctttgtggccgaaatgaacttccttccagaatcgacgagggaaaggatcaactgctaccgcgtgcttgacgacgacggcagaacgatatcaggaagtagattccaagaggtcagtcgggagctggctctgaagatgtacagcgagatggtgacgctccagatcatggataccatcttctacgaggctcagaggcagggcaggatctcgttctacctcacttccaacggcgaggaagcgatcaacatagcctctgctgctgcgctcagtatggatgacattgtgctgcctcagagcccaaaatgtagtacagggaacctggtgttcttctatggcgtggcttcactctgcaggagtttgcaaaccagtgctttgggaacaagctggactatggtaaagggaggcagatgcccattcactatgggtcgaaccgtctgaactatttcacagtctcgtcacctatcgcaacacagctccctcatgctgttggagctgcctactctctgaagatggacaagaaggacgcgtgtgccatcacatactttggggacggtgggacaagtgagggagacttccatgcagcgctcaacttcgcggctgttatggaggcaccggtgatcttcttctgccgcaacaatggctgggccatcagcactccgactactgaacaattcagaagtgatggagttgtcatccgtggccaggcttatgggatccgtggcatccgagtagatggcaatgatgctcttgctgtgtacagcgcaatccatgctgcccgagaaatggctgtaactgaaggaagaccaattttagttgaggtgctcagtagatccatggagtttcattacctgaaatgcacaaaaaaaacttcagtatataattaatctgagtatcgactaatgagatttcaggcactgacttaccgagtcggccatcactcgacatccgatgattcgaccaagtacaggccagttgatgagattgagcattggcgaacagcgagggatccgatttccagatacagaaaatgggttcagggtaatgactggtggtctgatgctgaagaatctgagctcaggagcagagtgagaaaagagcttctccaagccatccaggttgcagaaagaatgccaaaaccaccagttactgagcttttcactgatgtttacgacaagatcccttccaacctgcatgaacaagagcaattgctgcgggatacaatcatgaggcaccctgcagactacccaactgatgtacccgtttagttttcttggccttagatgagcagtatcgttgtgtaattattgatgagtcaggtccatagcattttgaataatacagtgattcagccagtgaactgctgattcaacacgttcttaaacaataattcaacctggcagattgccctgttgctggcactcgtgagccatgctaagatatttcattgcctgcacagcgtaccttataataataatagctactgaagctgcatataaaatatagtaaccagactggcagagatcatttcaaatgattccctattctaagtaacttaaatgccctccagtcataatttcgtatataaagcgttaactccgccaacaagattctaatgttgacagtgtgaaaaataaaatactagagcacaagggtcaagatggagaaacagtacaaaatgctatggacctgaatcatcagaccaacaatttcaaattcatctgtcaaggacctatatcaacaattgttaacctaaaactaaaatttccatgctaataatactaaataggcactaatattctgcaaactgcatcggaaatagaaccgcaaaaatatctcatactatgcctatgcttttgccccagatgtaattacaacttacagcaacaagcatatattgtatggttcct

SEQ ID NO: 13235 - DNA, 2566 bp, Zea Mays
gctttgtcaccggcccctccctcacctaccaggatgaacctgctgacgtcgacctctgtcaccattcccgcccatgctcaactcccctagagaccggtcccacgcgccggcggagccctgcttttttcgtcgtcgctctcccagcgagccgtgcccgtctgctcctcctctctccctccatgctcctcgctgcgctctcttccccgcacacttatctttccagctcagtgtccgtccctctcctcgacacgcacatcttccattgctcgcttgcttcctcgtgtcgtctagctctatccgattccaacacagctacctataaatacatctctctctctctctctctccccgagcagagctaggcagagggcagaccattggcgagaggattgttggagctcggccgagcagagcacgcacagtgtgattgtgtgtgtgtgtgtctgacatggcgtcgctctggctagcgagagcgtcgtcccagctggcgcgccgtgccgccgccaggaggcctcctccgcgtcctgcgcgccacggctccggccaacccaccagttcgtggttcttgggctcggtgccgcaggcggcccttgggtcaccagcgctggacacaagccgccggggcttctgctccgtccggcgcttcgcaggggagagcagcgctgctgctgctgcggcggctgtcgtcgacgaggagccggagagcgggttcgcagccggcgatcagcaggcagttgactttccaggagggaaagtatcctttgtggccgaaatgaacttccttccagaatcgacgagggaaaggatcaactgctaccgcgtgcttgacgacgacggcagaacgatatcaggaagtagattccaagaggtcagtcgggagctggctctgaagatgtacagcgagatggtgacgctccagatcatggataccatcttctacgaggctcagaggcagggcaggatctcgttctacctcacttccaacggcgaggaagcgatcaacatagcctctgctgctgcgctcagtatggatgacattgtgctgcctcagagcccaaaatgtagtacagggaacctggtgttcttctatggcgtggcttcactctgcaggagtttgcaaaccagtgctttgggaacaagctggactatggtaaagggaggcagatgcccattcactatgggtcgaaccgtctgaactatttcacagtctcgtcacctatcgcaacacagctccctcatgctgttggagctgcctactctctgaagatggacaagaaggacgcgtgtgccatcacatactttggggacggtgggacaaggagacttccatgcagcgctcaacttcgcggctgttatggaggcaccggtgatcttcttctgccgcaacaatggctgggccatcagcactccgactactgaacaattcagaagtgatggagttgtcatccgtggccaggcttatgggatccgtggcatccgagtagatggcaatgatgctcttgctgtgtacagcgcaatccatgctgcccgagaaatggctgtaactgaaggaagaccaattttagttgaggcactgacttaccgagtcggccatcactcgacatccgatgattcgaccaagtacaggccagttgatgagattgagcattggcgaacagcgagggatccgatttccagatacagaaaatgggttcagggtaatgactggtggtctgatgctgaagaatctgagctcaggagcagagtgagaaaagagcttctccaagccatccaggttgcagaaagaatgccaaaaccaccagttactgagcttttcactgatgtttacgacaagatcccttccaacctgcatgaacaagagcaattgctgcgggatacaatcatgaggcaccctgcagactacccaactgatgtacccgtttagttttcttggccttagatgagcagtatcgttgtgtaattattgatgagtcaggtccatagcattttgaataatacagtgattcagccagtgaactgctgattcaacacgttcttaaacaataattcaacctggcagattgccctgttgctggcactcgtgagccatgctaagatatttcattgcctgcacagcgtaccttataataataatagctactgaagctgcatataaaatatagtaaccagactggcagagatcatttcaaatgattccctattctaagtaacttaaatgccctccagtcataatttcgtatataaagcgttaactccgccaacaagattctaatgttgacagtgtgaaaaataaaatactagagcacaagggtcaagatggagaaacagtacaaaatgctatggacctgaatcatcagaccaacaatttcaaattcatctgtcaaggacctatatcaacaattgttaacctaaaactaaaatttccatgctaataatactaaataggcactaatattctgcaaactgcatcggaaatagaaccgcaaaaatatctcatactatgcctatgcttttgccccagatgtaattacaacttacagcaacaagcatatattgtatggttcct

SEQ ID NO: 13236 - DNA, 2042 bp, Zea Mays
ctctttccaaccttgccgggtcgttgccaaatgccaacgcaggcgccgggcagtgcacgcacatggctgcgcgcgtgggcctgctcccgcacgcgatcctcgtctcctcccgagctctacccacgccccgagctcgcgtcccttatcctcttccacccgtcccttcctacctccgccacgcctcctcctccgcctcccgctcctgccgcgcgtcgccgcgttttgtcgcagtccgcgccatggcttcggggaacccctacgccgccgagctcgccgccgccaagaaggccgtcaccctcgccgccaaactctgccagacagttcaacaggatattatgcattctggcgttcaggctaaggcagacaaaagtcctgtcacagtggctgattatggatctcaaatattggtcggtttttccttaaagatggatgtatcatctggaccattttcattggtggctgaagaggactcagatgaattgagaaaagatggcgctgaagaaattttggaagatattactgaccttgtcaatgaaaccatctttgatgatggttcatataacatttcgtttacaaaggaaggtatactctctgcaattgatgatgggaagtctgagggaggtccatctggacgacattgggtgcttgatccgattgacggtactaaaggtttcttgaggggcgaccaatatgccattgcattggctctgcttgatgaaggtaaagttgttttgggtgtattggcttgtccaaatcttccattgtcatcaataaacaacatcaatggtaactcttcgggagataaagttggtgccctgttttctgctacaattggttgtggggctcaagtagagtccttagatggctctccaccacaaaagattagtgtttgctccatcgacaatcctgtcaatgcatcattttttgaatcctatgaaagtgcacactccatgcatgatttgactggctctattgcagagaaacttggtgtccaagctcctccagttagaatcgacagccaagcaaaatatggtgctctggcccgaggtgatggcgccatttacttgcgctttccacacaaaggttatagagagaaaatatgggaccatgcagcaggatcaattgtcgtgacagaagctggaggcatagtaacagatgctgcgggaaacgacttggatttctccaaagggagatttctggatctcgacacaggcatcatcgcaaccaacaaggagttgatgccgtcgctcctgaaagctgtccaagaggctattaaagagacgaaccaggctgcctccctcttatagctgttgtagtggtcgacaaaaaagtagttgcaaaattttcgtactggcaaacagcattgctagaagtggacaacatgaataatttgagcatcatcaagacaggcgagcgcttggtgccggtgctcttaaaggccatccaagaggttatcaaggagaaagttgagcagtcgtaatgatgaacagaaattttagttgcacgtgtgacttacatatttcagctgtaccacttttgatcagacacgttcccagtgggtgcttagcagataacagttcttttactgaatactgtaaaagcctttttttttcaaaaataaactaggtttcctccgttttctttctagtgtaaaatctgtttacatcctgcggatcgatgacccgtctgcgaaagccactggaggcagcaacaacatcttcactaatgctcatgtcgctcaactcatttttttagtttttttttttttgcttcgaagcctttatatagcattatagcttgcttcaccgaacgatgttcagttttcaaatggaacatagtatacacttttacaagggaaaatggagttcctaaactagtccttgtataacggtctcacccggtggatgcatgtgtatagaaacatgtcgtgattgttccatcgagaaaccatttcgtaattttgcgaacacataacatatgtgcttactatgttcagttgtgatgggtgattatctaggagatggccagctttagtggagttt

SEQ ID NO: 13237 - DNA, 2035 bp, Zea Mays
ctctttccaaccttgccgggtcgttgccaaatgccaacgcaggcgccgggcagtgcacgcacatggctgcgcgcgtgggcctgctcccgcacgcgatcctcgtctcctcccgagctctacccacgccccgagctcgcgtcccttatcctcttccacccgtcccttcctacctccgccacgcctcctcctccgcctcccgctcctgccgcgcgtcgccgcgttttgtcgcagtccgcgccatggcttcggggaacccctacgccgccgagctcgccgccgccaagaaggccgtcaccctcgccgccaaactctgccagacagttcaacaggatattatgcattctggcgttcaggctaaggcagacaaaagtcctgtcacagtggctgattatggatctcaaatattggtcggtttttccttaaagatggatgtatcatctggaccattttcattggtggctgaagagatgaattgagaaaagatggcgctgaagaaattttggaagatattactgaccttgtcaatgaaaccatctttgatgatggttcatataacatttcgtttacaaaggaaggtatactctctgcaattgatgatgggaagtctgagggaggtccatctggacgacattgggtgcttgatccgattgacggtactaaaggtttcttgaggggcgaccaatatgccattgcattggctctgcttgatgaaggtaaagttgttttgggtgtattggcttgtccaaatcttccattgtcatcaataaacaacatcaatggtaactcttcgggagataaagttggtgccctgttttctgctacaattggttgtggggctcaagtagagtccttagatggctctccaccacaaaagattagtgtttgctccatcgacaatcctgtcaatgcatcattttttgaatcctatgaaagtgcacactccatgcatgatttgactggctctattgcagagaaacttggtgtccaagctcctccagttagaatcgacagccaagcaaaatatggtgctctggcccgaggtgatggcgccatttacttgcgctttccacacaaaggttatagagagaaaatatgggaccatgcagcaggatcaattgtcgtgacagaagctggaggcatagtaacagatgctgcgggaaacgacttggatttctccaaagggagatttctggatctcgacacaggcatcatcgcaaccaacaaggagttgatgccgtcgctcctgaaagctgtccaagaggctattaaagagacgaaccaggctgcctccctcttatagctgttgtagtggtcgacaaaaaagtagttgcaaaattttcgtactggcaaacagcattgctagaagtggacaacatgaataatttgagcatcatcaagacaggcgagcgcttggtgccggtgctcttaaaggccatccaagaggttatcaaggagaaagttgagcagtcgtaatgatgaacagaaattttagttgcacgtgtgacttacatatttcagctgtaccacttttgatcagacacgttcccagtgggtgcttagcagataacagttcttttactgaatactgtaaaagcctttttttttcaaaaataaactaggtttcctccgttttctttctagtgtaaaatctgtttacatcctgcggatcgatgacccgtctgcgaaagccactggaggcagcaacaacatcttcactaatgctcatgtcgctcaactcatttttttagtttttttttttttgcttcgaagcctttatatagcattatagcttgcttcaccgaacgatgttcagttttcaaatggaacatagtatacacttttacaagggaaaatggagttcctaaactagtccttgtataacggtctcacccggtggatgcatgtgtatagaaacatgtcgtgattgttccatcgagaaaccatttcgtaattttgcgaacacataacatatgtgcttactatgttcagttgtgatgggtgattatctaggagatggccagctttagtggagttt

SEQ ID NO: 13238 - DNA, 2027 bp, Zea Mays
ctctttccaaccttgccgggtcgttgccaaatgccaacgcaggcgccgggcagtgcacgcacatggctgcgcgcgtgggcctgctcccgcacgcgatcctcgtctcctcccgagctctacccacgccccgagctcgcgtcccttatcctcttccacccgtcccttcctacctccgccacgcctcctcctccgcctcccgctcctgccgcgcgtcgccgcgttttgtcgcagtccgcgccatggcttcggggaacccctacgccgccgagctcgccgccgccaagaaggccgtcaccctcgccgccaaactctgccagacagttcaacaggatattatgcattctggcgttcaggctaaggcagacaaaagtcctgtcacagtggctgattatggatctcaaatattggtcggtttttccttaaagatggatgtatcatctggaccattttcattggtggctgaagaggactcagatgaattgagaaaagatggcgctgaagaaattttggaagatattactgaccttgtcaatgaaaccatctttgatgatggttcatataacatttcgtttacaaaggaaggtatactctctgcaattgatgatgggaagtctgagggaggtccatctggacgacattgggtgcttgatccgattgacggtactaaaggtttcttgaggggcgaccaatatgccattgcattggctctgcttgatgaaggtaaagttgttttgggtgtattggcttgtccaaatcttccattgtcatcaataaacaacatcaatggtaactcttcgggagataaagttggtgccctgttttctgctacaattggttgtggggctcaagtagagtccttagatggctctccaccacaaaagattagtgtttgctccatcgacaatcctgtcaatgcatcattttttgaatcctatgaaagtgcacactccatgcatgatttgactggctctattgcagagaaacttggtgtccaagctcctccagttagaatcgacagccaagcaaaatatggtgctctggcccgaggtgatggcgccatttacttgcgctttccacacaaaggttatagagagaaaatatgggaccatgcagcaggatcaattgtcgtgacagaagctggaggcatagtaacagatgctgcgggaaacgacttggatttctccaaagggagatttctggatctcgacacaggcatcatcgcaaccaacaaggagttgatgccgtcgctcctgaaagctgtccaagaggctattaaagagacgaaccaggctgcctccctcttatagctgttgtagtggtcgacaaaaaagtagttgcaaaattttcgtactggcaaacagcattgctagaagtggacaacatgaataatttgagcgagcgcttggtgccggtgctcttaaaggccatccaagaggttatcaaggagaaagttgagcagtcgtaatgatgaacagaaattttagttgcacgtgtgacttacatatttcagctgtaccacttttgatcagacacgttcccagtgggtgcttagcagataacagttcttttactgaatactgtaaaagcctttttttttcaaaaataaactaggtttcctccgttttctttctagtgtaaaatctgtttacatcctgcggatcgatgacccgtctgcgaaagccactggaggcagcaacaacatcttcactaatgctcatgtcgctcaactcatttttttagtttttttttttttgcttcgaagcctttatatagcattatagcttgcttcaccgaacgatgttcagttttcaaatggaacatagtatacacttttacaagggaaaatggagttcctaaactagtccttgtataacggtctcacccggtggatgcatgtgtatagaaacatgtcgtgattgttccatcgagaaaccatttcgtaattttgcgaacacataacatatgtgcttactatgttcagttgtgatgggtgattatctaggagatggccagctttagtggagttt

SEQ ID NO: 13239 - DNA, 897 bp, Zea Mays
gcagcaggatcaattgtcgtgacagctggaggcatagtaacagatgctgcgggaaacgacttggatttctccaaagggagatttctggatctcgacacaggcatcatcgcaaccaacaaggagttgatgccgtcgctcctgaaagctgtccaagaggctattaaagagacgaaccaggctgcctccctcttatagctgttgtagtggtcgacaaaaaagtagttgcaaaattttcgtactggcaaacaggcatcatcaagacaggcgagcgcttggtgccggtgctcttaaaggccatccaagaggttatcaaggagaaagttgagcagtcgtaatgatgaacagaaattttagttgcacgtgtgacttacatatttcagctgtaccacttttgatcagacacgttcccagtgggtgcttagcagataacagttcttttactgaatactgtaaaagcctttttttttcaaaaataaactaggtttcctccgttttctttctagtgtaaaatctgtttacatcctgcggatcgatgacccgtctgcgaaagccactggaggcagcaacaacatcttcactaatgctcatgtcgctcaactcatttttttagtttttttttttttgcttcgaagcctttatatagcattatagcttgcttcaccgaacgatgttcagttttcaaatggaacatagtatacacttttacaagggaaaatggagttcctaaactagtccttgtataacggtctcacccggtggatgcatgtgtatagaaacatgtcgtgattgttccatcgagaaaccatttcgtaattttgcgaacacataacatatgtgcttactatgttcagttgtgatgggtgattatctaggagatggccagctttagtggagttt

SEQ ID NO: 13240 - DNA, 487 bp, Zea Mays
tagtactgctgctactgcatgcatatcaacacgagcccgtacgaggacgggtggatgatcaaagtgaagccgagcagcccgggggaggcggacgccctgctggacgccgccaagtacaccaagcactgcgaggaggaagacgctcactagacccaggcccagccagcaagcgtggatgcttacaacgacagcgcgcgtttggtggtgttgatcctccgctcagtctctctttgttgcaaaaactccaccaagcagtccgccatagccaagaaggccacactcacctttatcatccatgccttccgtttttttttggtgtgtgctactaccttttttttaaaagaaaagaagtggttctgaatatcgatcgatcgtatgagtacatataacacatctggcattttttttgtcgctagacaaacatgtgaagactagcaaaaagtttagaaagaaacaggaaaaacaagctgccaacatatgcaaacta

SEQ ID NO: 13241 - DNA, 4510 bp, Zea Mays
ccgagtcgcagggatttttttctactgctactgcgaagtgcattctctccccttccgttcctggctccggccttcccttccttccttcctccgctcgctcgcttccgcttcctcctcctcctgctcgccgcggctcgcgagggaagttccaggcttccagcggagtcgtcctcgcgggagtgcggagccccggcacggcccggcggcgccacctcggcgccggaggagggacgtttgcgctgctcccgagggccgaggcccggatcgccggattcctccacgggctcgctcggatcgaggaggcgcggaggtgggctcggttggtgggtttttcgccggccgtaattcttgtggtggcttccttgctttcggagacgcggggctggggagctcccgtgcttgcttctggctaatccgcgcttccttgcgtcgccctgctcggtgctgctactcgcttggtttcgctggattacaggacgaaaggtgacgaggaggtgcgctgacgcttttgctcggctccggttttggctgccggcggagtcgcaatctcggctagatttgccgagctgcggcggtgtcgcaatcccggctagatttgccgcgctgcggcggatgcttcgacgcgcaccggatctccaccgttcctgcggcgcggagtgaaggtacggttcccgaccggattttgggaagatggtgccgtcggggcagcacaacccgatgggcccgggccagcaggtgggcgcgtcgctgctccggactagctccagcctccttggcggcggcgccggcgccggcgccggtggccagccggggatggggatgggcgtcggggtgctcccgtcgcagtcgcccttctcgtccctcgtctcgccgcgcacgcagtatggcggtgttggcggcgggaacggcttgctggcgggcgcgtccagtgtcgcgtccatgctcagcagacagcagtcctatgggaatgggggaactggggtaatgccgggcagcggcgctgggctcccgatcggtgggctgcagcacagaggcggccttgatggcgttggtgacttggttggcactggagggccggattccatggcgttctcttcctcgggccctggtagcttgggcaatcaacttggcgtggacagcttgcagcagcagcagcagctggatgcaccacaagattcacaaaatcagcaagagcatcaacagcaaatgtcaatgacatataatcagcagcatatgatgtcacaaactcagcagcagcagcagcctgcagtgaagttggagaatggaggcgtccttggtggggtcaaactggagcagcagatggggcagcctgatcagagtgtttccgcacagatgctgcgcagttcgagtggtggtgtgaagctcgagccacagttgcaagcgttgaggagcttgggtgctatcaagatggagcaccaaagctcagacccatctgttttactacagcagcagcaacatatgttgcagctgtctaagcagaacccccaggctgcagctactcagttgagcctcctacaacaacagcagcgtttcttacaactgcagcagcagcaacaacagcagcagattctcaagaacctgcctttgcagagaaaccaattgcagcagcagcaacaacagcaacaacaacaacagcaacagcagttgcttcgtcaacaaagtctaaatatgagaaccggtaaatcagctgcttatgaaccaggaacctgtgcaaagaggttgacacattacatgtatcaccagcaaaacaggccacaggacaataacatcgagtactggagaaactttgtcaatgaatactttgccccaagtgccaagaagaggtggtgcgtttctctgtatggcaatggccgtcaaactaccggagttttccctcaggatgtttggcattgtgagatatgcaataggaagccagggcgaggttttgaaacaacggttgaggtcttgccacggttgtgccaaatcaaatatgccagtggtacactcgaggagcttctgtatgttgatatgccgagagagtcccagaattcatctggacagattgttttggactataccaaagcaatccaggagagtgtctttgagcaactgcgtgtagtccgtgaggggcatctaagaattgtattcaaccaagacttgaagattgcatcgtgggagttctgtgcccggcgtcacgaggaacttattcctcggagatcaatcataccacaggtcagtcaacttggtgctgtagtgcagaagtaccagtcttctgttcaaagttcagcatcactatcaagtcaggacttgcaaaacaattgtaactcgtttgtcgcatgtgctcgccagttggctaaggcactggaagtgccattggtaaatgatttaggatacacaaaaagatatgttcgctgcctccagattgcagaggtggttaattgtatgaaagatttgatcgatcatagcaggcagactgggtctggtccaatagagagcttacataaattccctaggagagggaattctggggttagttctgttcaagcccagcagcaatctgaggagcagaagcctgttccacagaattctaaccagagtggtcaaaattctgctcccgcaactggaatgcaagtctctgcctctggaaatggcgatgctacatcaaacaattcactcaattttgcaccatctacttcggcaccatcttcatctgttgttggtctccttcaaggctcagtaaattgcagacaagaccatccaacaagcagcggcaatggtctgtataatggtggaaacagtggtccggttgctaaggccaactcaacaaactccatgcaatcaaatgcaccagcatcgtttcctttgccagcaccctcggcatcaaatggcaatatgatgcctgctcctcagcactcaagccaaatgaattcaccaaccatgtcatcaaacctacctcctatgcaaacacctgcaagccgacctcaggaacccgagccaattgagtctcaaagctcggtccagaggatattgcaagacttgatgatgcaatcccatattaatggtgttggcccagttggcagcgatatgaggagagcaaacacaattactcctggtatgaacggtgtcaactccttagttggtaaccccatgacaaataaccctggaatcaatgggatgggatttgcggccatgggtggccttggtcaacaaatgagaacggcgatggggaacaacgcattggcaatgaatggaaggaccgtgatgaatcacagtgcgcatgacctgacacagttggcccaccagcagcaacagcgcgatttaggaaaccaattgcttgggggccttagagctgcaaacagcttcaataaccttcaatacgactggaagcctgctcagtagagtgagcaggagtcagaaagctcgcacctaatattatacagttatccttgctgggtcggtccatcactgacaacacaaaagttacgcctcaccacaacctgccctccctcagaagcggagtgttcttactgatggtgcatgctacatgttacagcgaatatgaaacatgagcgctgatcggtacatgttacatcaactgtctgtatggctgtctcccattgtgttctgcaaaagtgaggccccgtgaatcagagcctactttcacatgggactcattgtgggtgcaagtgttggcggattccaaactggggcaagatcagggcgtctttctttcccctgtttttccaggttgatctttcacatgaccacggcgttcctctcgtttcatttgttggattaaaaatgggttggtagtccggctgtgagtttacgttagtatgtgtcactcgtgagtatttgtattgtgacgggctggtgatgttcagctctggagagtatctgtgtcacaagtctttgttcggtagccagaaggctggatgtgagcagtggctgaagttagcaacgagttgggcaataaataatagtaggagcagtggcaatatgaaactagacccgtttgtttctgattataatctgtgtagattatataatccattgtaaataatcaagatgacaaacaatcaagcagattatgagtagattatacaatttgaagcctagattatgataatcattttatctctcctcaaaaggagcttattagagattcttctatcctccttcacgaacgcacttcttcctccatccgcccgtcgcacttctcccataacctacctacccaccgctactgtatctccatggatgaccatgacgccgacgacaaccagtcgaagcggacactccatcgccggtctcgatctggacaatggcgtggagcactgtccgtcggggcgcaacctcggcacggcgagcgcaggatgtggcattgccactgcagatcacgccgtagatgctgctcgccatggctcacgtgtgctctagctgctcgataaaatgatcacaagaatgaatgttgtttcaacactagcagactacgccggcgttgccacag

SEQ ID NO: 13242 - DNA, 4591 bp, Zea Mays
ccgagtcgcagggatttttttctactgctactgcgaagtgcattctctccccttccgttcctggctccggccttcccttccttccttcctccgctcgctcgcttccgcttcctcctcctcctgctcgccgcggctcgcgagggaagttccaggcttccagcggagtcgtcctcgcgggagtgcggagccccggcacggcccggcggcgccacctcggcgccggaggagggacgtttgcgctgctcccgagggccgaggcccggatcgccggattcctccacgggctcgctcggatcgaggaggcgcggaggacgaaaggtgacgaggaggtgcgctgacgcttttgctcggctccggttttggctgccggcggagtcgcaatctcggctagatttgccgagctgcggcggtgtcgcaatcccggctagatttgccgcgctgcggcggatgcttcgacgcgcaccggatctccaccgttcctgcggcgcggagtgaaggtacggttcccgaccggattttgggaagatggtgccgtcggggcagcacaacccgatgggcccgggccagcaggtgggcgcgtcgctgctccggactagctccagcctccttggcggcggcgccggcgccggcgccggtggccagccggggatggggatgggcgtcggggtgctcccgtcgcagtcgcccttctcgtccctcgtctcgccgcgcacgcagtatggcggtgttggcggcgggaacggcttgctggcgggcgcgtccagtgtcgcgtccatgctcagcagacagcagtcctatgggaatgggggaactggggtaatgccgggcagcggcgctgggctcccgatcggtgggctgcagcacagaggcggccttgatggcgttggtgacttggttggcactggagggccggattccatggcgttctcttcctcgggccctggtagcttgggcaatcaacttggcgtggacagcttgcagcagcagcagcagctggatgcaccacaagattcacaaaatcagcaagagcatcaacagcaaatgtcaatgacatataatcagcagcatatgatgtcacaaactcagcagcagcagcagcctgcagtgaagttggagaatggaggcgtccttggtggggtcaaactggagcagcagatggggcagcctgatcagagtgtttccgcacagatgctgcgcagttcgagtggtggtgtgaagctcgagccacagttgcaagcgttgaggagcttgggtgctatcaagatggagcaccaaagctcagacccatctgttttactacagcagcagcaacatatgttgcagctgtctaagcagaacccccaggctgcagctactcagttgagcctcctacaacaacagcagcgtttcttacaactgcagcagcagcaacaacagcagcagattctcaagaacctgcctttgcagagaaaccaattgcagcagcagcaacaacagcaacaacaacaacagcaacagcagttgcttcgtcaacaaagtctaaatatgagaaccggtaaatcagctgcttatgaaccaggaacctgtgcaaagaggttgacacattacatgtatcaccagcaaaacaggccacaggacaataacatcgagtactggagaaactttgtcaatgaatactttgccccaagtgccaagaagaggtggtgcgtttctctgtatggcaatggccgtcaaactaccggagttttccctcaggatgtttggcattgtgagatatgcaataggaagccagggcgaggttttgaaacaacggttgaggtcttgccacggttgtgccaaatcaaatatgccagtggtacactcgaggagcttctgtatgttgatatgccgagagagtcccagaattcatctggacagattgttttggactataccaaagcaatccaggagagtgtctttgagcaactgcgtgtagtccgtgaggggcatctaagaattgtattcaaccaagacttgaagattgcatcgtgggagttctgtgcccggcgtcacgaggaacttattcctcggagatcaatcataccacaggtcagtcaacttggtgctgtagtgcagaagtaccagtcttctgttcaaagttcagcatcactatcaagtcaggacttgcaaaacaattgtaactcgtttgtcgcatgtgctcgccagttggctaaggcactggaagtgccattggtaaatgatttaggatacacaaaaagatatgttcgctgcctccagattgcagaggtggttaattgtatgaaagatttgatcgatcatagcaggcagactgggtctggtccaatagagagcttacataaattccctaggagagggaattctggggttagttctgttcaagcccagcagcaatctgaggagcagaagcctgttccacagaattctaaccagagtggtcaaaattctgctcccgcaactggaatgcaagtctctgcctctggaaatggcgatgctacatcaaacaattcactcaattttgcaccatctacttcggcaccatcttcatctgttgttggtctccttcaaggctcagtaaattgcagacaagaccatccaacaagcagcggcaatggtctgtataatggtggaaacagtggtccggttgctaaggccaactcaacaaactccatgcaatcaaatgcaccagcatcgtttcctttgccagcaccctcggcatcaaatggcaatatgatgcctgctcctcagcactcaagccaaatgaattcaccaaccatgtcatcaaacctacctcctatgcaaacacctgcaagccgacctcaggaacccgagccaattgagtctcaaagctcggtccagaggatattgcaagacttgatgatgcaatcccatattaatggtgttggcccagttggcagcgatatgaggagagcaaacacaattactcctggtatgaacggtgtcaactccttagttggtaaccccatgacaaataaccctggaatcaatgggatgggatttgcggccatgggtggccttggtcaacaaatgagaacggcgatggggaacaacgcattggcaatgaatggaaggaccgtgatgaatcacagtgcgcatgacctgacacagttggcccaccagcagcaacagcgcgatttaggaaaccaattgcttgggggccttagagctgcaaacagcttcaataaccttcaatacgactggaagcctgctcagtagagtgagcaggagtcagaaagctcgcacctaatattatacagttatccttgctgggtcggtccatcactgacaacacaaaagttacgcctcaccacaacctgccctccctcagaagcggagtgttcttactgatggtgcatgctacatgttacagcgaatatgaaacatgagcgctgatcggtacatgttacatcaactgtctgtatggctgtctcccattgtgttctgcaaaagtgaggccccgtgaatcagagcctactttcacatgggactcattgtgggtgcaagtgttggcggattccaaactggggcaagatcagggcgtctttctttcccctgtttttccaggttggatgacaacgatttctctcttgcagtctgtactcttgtgtaccatggctctccgtaagttgtgaaagcatgagcacctatttccacctttgatggccaagaatctcattgtagctttgctgtaccatgtataagctgttattaactagtggaaagcagcaggaaaaaaattctgaagggagtgtgaatcttggtgtgtcatctgtgtacctgtgtttctgataaatgctctcgtttaagcaggttgatctttcacatgaccacggcgttcctctcgtttcatttgttggattaaaaatgggttggtagtccggctgtgagtttacgttagtatgtgtcactcgtgagtatttgtattgtgacgggctggtgatgttcagctctggagagtatctgtgtcacaagtctttgttcggtagccagaaggctggatgtgagcagtggctgaagttagcaacgagttgggcaataaataatagtaggagcagtggcaatatgaaactagacccgtttgtttctgattataatctgtgtagattatataatccattgtaaataatcaagatgacaaacaatcaagcagattatgagtagattatacaatttgaagcctagattatgataatcattttatctctcctcaaaaggagcttattagagattcttctatcctccttcacgaacgcacttcttcctccatccgcccgtcgcacttctcccataacctacctacccaccgctactgtatctccatggatgaccatgacgccgacgacaaccagtcgaagcggacactccatcgccggtctcgatctggacaatggcgtggagcactgtccgtcggggcgcaacctcggcacggcgagcgcaggatgtggcattgccactgcagatcacgccgtagatgctgctcgccatggctcacgtgtgctctagctgctcgataaaatgatcacaagaatgaatgttgtttcaacactagcagactacgccggcgttgccacag

SEQ ID NO: 13243 - DNA, 4751 bp, Zea Mays
ccgagtcgcagggatttttttctactgctactgcgaagtgcattctctccccttccgttcctggctccggccttcccttccttccttcctccgctcgctcgcttccgcttcctcctcctcctgctcgccgcggctcgcgagggaagttccaggcttccagcggagtcgtcctcgcgggagtgcggagccccggcacggcccggcggcgccacctcggcgccggaggagggacgtttgcgctgctcccgagggccgaggcccggatcgccggattcctccacgggctcgctcggatcgaggaggcgcggaggtgggctcggttggtgggtttttcgccggccgtaattcttgtggtggcttccttgctttcggagacgcggggctggggagctcccgtgcttgcttctggctaatccgcgcttccttgcgtcgccctgctcggtgctgctactcgcttggtttcgctggattacaggacgaaaggtgacgaggaggtgcgctgacgcttttgctcggctccggttttggctgccggcggagtcgcaatctcggctagatttgccgagctgcggcggtgtcgcaatcccggctagatttgccgcgctgcggcggatgcttcgacgcgcaccggatctccaccgttcctgcggcgcggagtgaaggtacggttcccgaccggattttgggaagatggtgccgtcggggcagcacaacccgatgggcccgggccagcaggtgggcgcgtcgctgctccggactagctccagcctccttggcggcggcgccggcgccggcgccggtggccagccggggatggggatgggcgtcggggtgctcccgtcgcagtcgcccttctcgtccctcgtctcgccgcgcacgcagtatggcggtgttggcggcgggaacggcttgctggcgggcgcgtccagtgtcgcgtccatgctcagcagacagcagtcctatgggaatgggggaactggggtaatgccgggcagcggcgctgggctcccgatcggtgggctgcagcacagaggcggccttgatggcgttggtgacttggttggcactggagggccggattccatggcgttctcttcctcgggccctggtagcttgggcaatcaacttggcgtggacagcttgcagcagcagcagcagctggatgcaccacaagattcacaaaatcagcaagagcatcaacagcaaatgtcaatgacatataatcagcagcatatgatgtcacaaactcagcagcagcagcagcctgcagtgaagttggagaatggaggcgtccttggtggggtcaaactggagcagcagatggggcagcctgatcagagtgtttccgcacagatgctgcgcagttcgagtggtggtgtgaagctcgagccacagttgcaagcgttgaggagcttgggtgctatcaagatggagcaccaaagctcagacccatctgttttactacagcagcagcaacatatgttgcagctgtctaagcagaacccccaggctgcagctactcagttgagcctcctacaacaacagcagcgtttcttacaactgcagcagcagcaacaacagcagcagattctcaagaacctgcctttgcagagaaaccaattgcagcagcagcaacaacagcaacaacaacaacagcaacagcagttgcttcgtcaacaaagtctaaatatgagaaccggtaaatcagctgcttatgaaccaggaacctgtgcaaagaggttgacacattacatgtatcaccagcaaaacaggccacaggacaataacatcgagtactggagaaactttgtcaatgaatactttgccccaagtgccaagaagaggtggtgcgtttctctgtatggcaatggccgtcaaactaccggagttttccctcaggatgtttggcattgtgagatatgcaataggaagccagggcgaggttttgaaacaacggttgaggtcttgccacggttgtgccaaatcaaatatgccagtggtacactcgaggagcttctgtatgttgatatgccgagagagtcccagaattcatctggacagattgttttggactataccaaagcaatccaggagagtgtctttgagcaactgcgtgtagtccgtgaggggcatctaagaattgtattcaaccaagacttgaagattgcatcgtgggagttctgtgcccggcgtcacgaggaacttattcctcggagatcaatcataccacagtcaacttggtgctgtagtgcagaagtaccagtcttctgttcaaagttcagcatcactatcaagtcaggacttgcaaaacaattgtaactcgtttgtcgcatgtgctcgccagttggctaaggcactggaagtgccattggtaaatgatttaggatacacaaaaagatatgttcgctgcctccagattgcagaggtggttaattgtatgaaagatttgatcgatcatagcaggcagactgggtctggtccaatagagagcttacataaattccctaggagagggaattctggggttagttctgttcaagcccagcagcaatctgaggagcagaagcctgttccacagaattctaaccagagtggtcaaaattctgctcccgcaactggaatgcaagtctctgcctctggaaatggcgatgctacatcaaacaattcactcaattttgcaccatctacttcggcaccatcttcatctgttgttggtctccttcaaggctcagtaaattgcagacaagaccatccaacaagcagcggcaatggtctgtataatggtggaaacagtggtccggttgctaaggccaactcaacaaactccatgcaatcaaatgcaccagcatcgtttcctttgccagcaccctcggcatcaaatggcaatatgatgcctgctcctcagcactcaagccaaatgaattcaccaaccatgtcatcaaacctacctcctatgcaaacacctgcaagccgacctcaggaacccgagccaattgagtctcaaagctcggtccagaggatattgcaagacttgatgatgcaatcccatattaatggtgttggcccagttggcagcgatatgaggagagcaaacacaattactcctggtatgaacggtgtcaactccttagttggtaaccccatgacaaataaccctggaatcaatgggatgggatttgcggccatgggtggccttggtcaacaaatgagaacggcgatggggaacaacgcattggcaatgaatggaaggaccgtgatgaatcacagtgcgcatgacctgacacagttggcccaccagcagcaacagcgcgatttaggaaaccaattgcttgggggccttagagctgcaaacagcttcaataaccttcaatacgactggaagcctgctcagtagagtgagcaggagtcagaaagctcgcacctaatattatacagttatccttgctgggtcggtccatcactgacaacacaaaagttacgcctcaccacaacctgccctccctcagaagcggagtgttcttactgatggtgcatgctacatgttacagcgaatatgaaacatgagcgctgatcggtacatgttacatcaactgtctgtatggctgtctcccattgtgttctgcaaaagtgaggccccgtgaatcagagcctactttcacatgggactcattgtgggtgcaagtgttggcggattccaaactggggcaagatcagggcgtctttctttcccctgtttttccaggttggatgacaacgatttctctcttgcagtctgtactcttgtgtaccatggctctccgtaagttgtgaaagcatgagcacctatttccacctttgatggccaagaatctcattgtagctttgctgtaccatgtataagctgttattaactagtggaaagcagcaggaaaaaaattctgaagggagtgtgaatcttggtgtgtcatctgtgtacctgtgtttctgataaatgctctcgtttaagcaggttgatctttcacatgaccacggcgttcctctcgtttcatttgttggattaaaaatgggttggtagtccggctgtgagtttacgttagtatgtgtcactcgtgagtatttgtattgtgacgggctggtgatgttcagctctggagagtatctgtgtcacaagtctttgttcggtagccagaaggctggatgtgagcagtggctgaagttagcaacgagttgggcaataaataatagtaggagcagtggcaatatgaaactagacccgtttgtttctgattataatctgtgtagattatataatccattgtaaataatcaagatgacaaacaatcaagcagattatgagtagattatacaatttgaagcctagattatgataatcattttatctctcctcaaaaggagcttattagagattcttctatcctccttcacgaacgcacttcttcctccatccgcccgtcgcacttctcccataacctacctacccaccgctactgtatctccatggatgaccatgacgccgacgacaaccagtcgaagcggacactccatcgccggtctcgatctggacaatggcgtggagcactgtccgtcggggcgcaacctcggcacggcgagcgcaggatgtggcattgccactgcagatcacgccgtagatgctgctcgccatggctcacgtgtgctctagctgctcgataaaatgatcacaagaatgaatgttgtttcaacactagcagactacgccggcgttgccacag

SEQ ID NO: 13244 - DNA, 2212 bp, Zea Mays
atcagaaatcccacgcgtgaaaacattttaggtgacgtggacactgcgagagagtccgttttgtaccagccttcatatataggaaatttcatatataggaaatgtttgagcggaaaggaaatgaaagatatatttgcagaaaagccccagttcaagttcgacagccgaagaaaagggtctcggcgggtttttctttttgcaagttttgagagcggcaaagcgttaggcgttagggcatccacctcgtcgtaggcggcggtctccatgtcgaccgcatccggcaacggcaacggcggctcctcctcttccatgttatacgacttgtacggccctaatgcaaagcctgatgtggtttttaaggaggctgctttaaactctacgttaaatctgcaggatgttcagggtctagttacttgggttattggtgatggcatgctgccttcttgggtgtttgttaagaacaaacctcttatacccaaagttgtcctactatatgttcctggccttgatgcaactttatatatgtcacacactcgacttctttcttctctgaaagaattatgtggcaatccaaaacctgttttagcttcaagccgtatgccggatgagaggcacaccattgatgcgctcctaacctgcagagtaaagagaaagcgtgatgtaaaaacatcaaatgagtcatctaaacctgacatagatggaaaactatcaagtctggatgatcttggggacataccattccctgttacatattacactctctcagagaaagacttggaagataatggctactctttcaatttaccaggttttgtccctactgtttcagctccttcaggttcctcgccacataaagttcttgcacttgattgtgaaatgtgtgtgacaaaagctggatttgagctcacaagagtgacattaattgatattaaaggattggtggtgctagatagactagttaagcctgctaattcaatcattgattacaatacaaggttcagtggaatcactgctgagatgttggctgacgtgtccacaaccctgcaggaaattcaggaagagtttgttggacttgtatataaagaaacaattcttgttgggcattccttggaaaatgaccttatggcattacagatatcccatggtttaatcatcgatacagctgttttgtacaagtataagcgagggtctcgctgtaagattgctttgcgtgtcttgacgagaaagtttctcggccgggagatccagaacacaggatctggacatgacagtgtggaagatgctaaagctgctctagaacttgctatattgaaaatcaaacatggtcctgattttggttttcaaccatcgttgtcaaggcagaaattgacatctatactgcatgagagtgggaaaaaatgctcccttgttgatgatgtatctgttctcgagcggtattcagatacttcttgcaattcaattgctgttttttgtgatgatgatgccctctccagatcaatgaaggaggtgaagaataacaaagtcaccttcatttggactcagttctcaggattgatttcttacttccaccgaagagctcaagatccagaaaagttgaaatcatgtgtcgcagaggctattgcattaaaaacatgtgatggaaaaactgcttcaaaagaagcaagaagtaaaatttgtcctgaattaaaggaaattctgtgtggattggataaaaagataaagaaattatatggtgccctgcccgagaatgctatgcttattgtatgcactggccatggtgatactcctctagtacaaagattacggaaaatgcttcaccatgaagaagaaacaatagacagccgagaaactattgttcaagctttgggagatttacaagcccaagccgaagttgctctatgcttctgctgcgtcaaacgttaactgcatctttgaattagtgtgctgatgggtatggcttcggcgattataggagggtgtcagatactatgatcaggctgtagatgtcagcgtaaggcatagtgatgcattatcagaactggtctttcggtagcaggccagcatgtcagcatattaataggatcatttttcagatgaatatacggatcgcagaggaatgtaggaaactattgtaacagccatattattgtgataattaaaaccaagttctggaatcgatgatactacgaggcttgccatttacagttgcgaa

SEQ ID NO: 13245 - DNA, 2727 bp, Zea Mays
ctgcgagagagtccgttttgtaccagccttcatatataggaaatttcatatataggaaatgtttgagcggaaaggaaatgaaagatatatttgcagaaaagccccagttcaagttcgacagccgaagaaaagggtctcggcgggtttttctttttgcaagttttgagagcggcaaagcgttaggcgttagggcatccacctcgtcgtaggcggcggtctccatgtcgaccgcatccggcaacggcaacggcggctcctcctcttccatgttatacgacttgtacggccctaatgcaaagcctgatgtggtttttaaggaggctgctttaaactctacgttaaatctgcaggatgttcagggtctagttacttgggttattggtgatggcatgctgccttcttgggtgtttgttaagaacaaacctcttatacccaaagttgtcctactatatgttcctggccttgatgcaactttatatatgtcacacactcgacttctttcttctctgaaagaattatgtggcaatccaaaacctgttttagcttcaagccgtatgccggatgagaggcacaccattgatgcgctcctaacctgcagagtaaagagaaagcgtgatgtaaaaacatcaaatgagtcatctaaacctgacatagatggaaaactatcaagtctggatgatcttggggacataccattccctgttacatattacactctctcagagaaagacttggaagataatggctactctttcaatttaccagtgtgtgacaaaagctggatttgagctcacaagagtgacattaattgatattaaaggattggtggtgctagatagactagttaagcctgctaattcaatcattgattacaatacaaggttcagtggaatcactgctgagatgttggctgacgtgtccacaaccctgcaggaaattcaggaagagtttgttggacttgtatataaagaaacaattcttgttgggcattccttggaaaatgaccttatggcattacagatatcccatggtttaatcatcgatacagctgttttgtacaagtataagcgagggtctcgctgtaagattgctttgcgtgtcttgacgagaaagtttctcggccgggagatccagaacacaggatctggacatgacagtgtggaagatgctaaagctgctctagaacttgctatattgaaaatcaaacatggcagaaattgacatctatactgcatgagagtgggaaaaaatgctcccttgttgatgatgtatctgttctcgagcggtattcagatacttcttgcaattcaattgctgttttttgtgatgatgatgccctctccagatcaatgaaggaggtgaagaataacaaagtcaccttcatttggactcagttctcaggattgatttcttacttccaccgaagagctcaagatccagaaaagttgaaatcatgtgtcgcagaggctattgcattaaaaacatgtgatggaaaaactgcttcaaaagaagcaagaagtaaaatttgtcctgaattaaaggaaattctgtgtggattggataaaaagataaagaaattatatggtgccctgcccgagaatgctatgcttattgtatgcactggccatggtgatactcctctagtacaaaggtaaagttaatcatggactcatggtaaatcatcaacacatagtttctcatgccaaattgtattacatagtcatggcagatcagcaataatgtaccttttccctttctaatataatttggtctgttaagatacaagtaaaaggtgctcacaagatattaagttacaaaatcattgtccaatgttacctttagtaacaccatcatcagtttgtcttgtagatctgttctattccatttgctaccgagtgatgaaattactatgctgcctttagggccactctgtgtttgttcctttgtgctgtgctgcattgtcaaatatagtttagtttggcaaatcctacttattccaatataattgctactatagctccaaaaatgatgcttatataacccacattaaaatctggatgtcaatgctttaagaagcatatgcaacgccgaatggatatacaattgtaactgtgctgcttcatgaagattacggaaaatgcttcaccatgaagaagaaacaatagacagccgagaaactattgttcaagctttgggagatttacaagcccaagccgaagttgctctatgcttctgctgcgtcaaacgttaactgtaagtatcttcattccctcctttgcggacatgtttttgatttctggaagcagaacactgcactgttctgaattgttttttgttggcaggcatctttgaattagtgtgctgatgggtatggcttcggcgattataggagggtgtcaggcatgcatgctgacccgctgatgtgaaaagttccggcaggcagagattgaattttggaagctattctcatgctgtcttttttttcttttttctgtcagatactatgatcaggctgtagatgtcagcgtaaggcatagtgatgcattatcagaactggtctttcggtagcaggccagcatgtcagcatattaataggatcatttttcagatgaatatacggatcgcagaggaatgtaggaaactattgtaacagccatattattgtgataattaaaaccaagttctggaatcgatgatactacgaggcttgccatttacagttgcgaa

SEQ ID NO: 13246 - DNA, 3162 bp, Zea Mays
ctgcgagagagtccgttttgtaccagccttcatatataggaaatttcatatataggaaatgtttgagcggaaaggaaatgaaagatatatttgcagaaaagccccagttcaagttcgacagccgaagaaaagggtctcggcgggtttttctttttgcaagttttgagagcggcaaagcgttaggcgttagggcatccacctcgtcgtaggcggcggtctccatgtcgaccgcatccggcaacggcaacggcggctcctcctcttccatgttatacgacttgtacggccctaatgcaaagcctgatgtggtttttaaggaggctgctttaaactctacgttaaatctgcaggatgttcagggtctagttacttgggttattggtgatggcatgctgccttcttgggtgtttgttaagaacaaacctcttatacccaaagttgtcctactatatgttcctggccttgatgcaactttatatatgtcacacactcgacttctttcttctctgaaagaattatgtggcaatccaaaacctgttttagcttcaagccgtatgccggatgagaggcacaccattgatgcgctcctaacctgcagagtaaagagaaagcgtgatgtaaaaacatcaaatgagtcatctaaacctgacatagatggtatgtcttgacgtcttagcactgtgttgtcattgtggctcaggatgaacagtgttctgcttcattgggcctagtgttggtatgttattattgtgatagctactggaagatttgagcttcattatgaaggctggcgtgcttttttttctcgaacatgcaggagagctggcattcttatttcaaagattcttatactgatttgacaatttcaatccttttgtattgcccttacttggtcacaagttcttcatttttaagttgacactacatatgatgattttttctttatacccttctttaaatattattggtgtttttaccagtcatatttcatcacaaatgtactgtcactatggcatcttgcataagtttgactatagcagttttattctatttatttgttgttttgtatgtttatcggcattagagtagatataactttgtccatgaaaaaacagacacttttgaacctagattgagaatttatgtttcatgcaattggttaatattttcattttgatctcaggaaaactatcaagtctggatgatcttggggacataccattccctgttacatattacactctctcagagaaagacttggaagataatggctactctttcaatttaccaggttatcttttatccctcttttccaaaatgtaggccgtttcagttttgtcctaagtcaaacttctttggttttgtccaaaaatattgaaaaaaataattgcaccataaagacggtttgtggtggttttagtgaaaataattagttactgtcgatgttggtgtattttctataaattggtcaaagttagagaagtttaatggataatagataaaactgatacatcctatattttacgagggagtatttcattgcctctctccttgccctttaatgcctattattcaaatgacatctgtatattattgccattttaggttttgtccctactgtttcagctccttcaggttcctcgccacataaagttcttgcacttgattgtgaaatgtgtgtgacaaaagctggatttgagctcacaagagtgacattaattgatattaaaggattggtggtgctagatagactagttaagcctgctaattcaatcattgattacaatacaaggttcagtggaatcactgctgagatgttggctgacgtgtccacaaccctgcaggaaattcaggaagagtttgttggacttgtatataaagaaacaattcttgttgggcattccttggaaaatgaccttatggcattacagatatcccatggtttaatcatcgatacagctgttttgtacaagtataagcgagggtctcgctgtaagattgctttgcgtgtcttgacgagaaagtttctcggccgggagatccagaacacaggatctggacatgacagtgtggaagatgctaaagctgctctagaacttgctatattgaaaatcaaacatggcagaaattgacatctatactgcatgagagtgggaaaaaatgctcccttgttgatgatgtatctgttctcgagcggtattcagatacttcttgcaattcaattgctgttttttgtgatgatgatgccctctccagatcaatgaaggaggtgaagaataacaaagtcaccttcatttggactcagttctcaggattgatttcttacttccaccgaagagctcaagatccagaaaagttgaaatcatgtgtcgcagaggctattgcattaaaaacatgtgatggaaaaactgcttcaaaagaagcaagaagtaaaatttgtcctgaattaaaggaaattctgtgtggattggataaaaagataaagaaattatatggtgccctgcccgagaatgctatgcttattgtatgcactggccatggtgatactcctctagtacaaagattacggaaaatgcttcaccatgaagaagaaacaatagacagccgagaaactattgttcaagctttgggagatttacaagcccaagccgaagttgctctatgcttctgctgcgtcaaacgttaactgtaagtatcttcattccctcctttgcggacatgtttttgatttctggaagcagaacactgcactgttctgaattgttttttgttggcaggcatctttgaattagtgtgctgatgggtatggcttcggcgattataggagggtgtcaggcatgcatgctgacccgctgatgtgaaaagttccggcaggcagagattgaattttggaagctattctcatgctgtcttttttttcttttttctgtcagatactatgatcaggctgtagatgtcagcgtaaggcatagtgatgcattatcagaactggtctttcggtagcaggccagcatgtcagcatattaataggatcatttttcagatgaatatacggatcgcagaggaatgtaggaaactattgtaacagccatattattgtgataattaaaaccaagttctggaatcgatgatactacgaggcttgccatttacagttgcgaa

SEQ ID NO: 13247 - DNA, 2709 bp, Zea Mays
ctgcgagagagtccgttttgtaccagccttcatatataggaaatttcatatataggaaatgtttgagcggaaaggaaatgaaagatatatttgcagaaaagccccagttcaagttcgacagccgaagaaaagggtctcggcgggtttttctttttgcaagttttgagagcggcaaagcgttaggcgttagggcatccacctcgtcgtaggcggcggtctccatgtcgaccgcatccggcaacggcaacggcggctcctcctcttccatgttatacgacttgtacggccctaatgcaaagcctgatgtggtttttaaggaggctgctttaaactctacgttaaatctgcaggatgttcagggtctagttacttgggttattggtgatggcatgctgccttcttgggtgtttgttaagaacaaacctcttatacccaaagttgtcctactatatgttcctggccttgatgcaactttatatatgtcacacactcgacttctttcttctctgaaagaattatgtggcaatccaaaacctgttttagcttcaagccgtatgccggatgagaggcacaccattgatgcgctcctaacctgcagagtaaagagaaagcgtgatgtaaaaacatcaaatgagtcatctaaacctgacatagatggaaaactatcaagtctggatgatcttggggacataccattccctgttacatattacactctctcagagaaagacttggaagataatggctactctttcaatttaccaggttttgtccctactgtttcagctccttcaggttcctcgccacataaagttcttgcacttgattgtgaaatgtgtgtgacaaaagctggatttgagctcacaagagtgacattaattgatattaaaggattggtggtgctagatagactagttaagcctgctaattcaatcattgattacaatacaaggttcagtggaatcactgctgagatgttggctgacgtgtccacaaccctgcaggaaattcaggaagagtttgttggacttgtatataaagaaacaattcttgttgggcattccttggaaaatgaccttatggcattacagatatcccatggtttaatcatcgatacagctgttttgtacaagtataagcgagggtctcgctgtaagattgctttgcgtgtcttgacgagaaagtttctcggccgggagatccagaacacaggatctggacatgacagtgtggaagatgctaaagctgctctagaacttgctatattgaaaatcaaacatggcagaaattgacatctatactgcatgagagtgggaaaaaatgctcccttgttgatgatgtatctgttctcgagcggtattcagatacttcttgcaattcaattgctgttttttgtgatgatgatgccctctccagatcaatgaaggaggtgaagaataacaaagtcaccttcatttggactcagttctcaggattgatttcttacttccaccgaagagctcaagatccagaaaagttgaaatcatgtgtcgcagaggctattgcattaaaaacatgtgatggaaaaactgcttcaaaagaagcaagaagtaaaatttgtcctgaattaaaggaaattctgtgtggattggataaaaagataaagaaattatatggtgccctgcccgagaatgctatgcttattgtatgcactggccatggtgatactcctctagtacaaaggtaaagttaatcatggactcatggtaaatcatcaacacatagtttctcatgccaaattgtattacatagtcatggcagatcagcaataatgtaccttttccctttctaatataatttggtctgttaagatacaagtaaaaggtgctcacaagatattaagttacaaaatcattgtccaatgttacctttagtaacaccatcatcagtttgtcttgtagatctgttctattccatttgctaccgagtgatgaaattactatgctgcctttagggccactctgtgtttgttcctttgtgctgtgctgcattgtcaaatatagtttagtttggcaaatcctacttattccaatataattgctactatagctccaaaaatgatgcttatataacccacattaaaatctggatgtcaatgctttaagaagcatatgcaacgccgaatggatatacaattgtaactgtgctgcttcatgaagattacggaaaatgcttcaccatgaagaagaaacaatagacagccgagaaactattgttcaagctttgggagatttacaagcccaagccgaagttgctctatgcttctgctgcgtcaaacgttaactgcatctttgaattagtgtgctgatgggtatggcttcggcgattataggagggtgtcaggcatgcatgctgacccgctgatgtgaaaagttccggcaggcagagattgaattttggaagctattctcatgctgtcttttttttcttttttctgtcagatactatgatcaggctgtagatgtcagcgtaaggcatagtgatgcattatcagaactggtctttcggtagcaggccagcatgtcagcatattaataggatcatttttcagatgaatatacggatcgcagaggaatgtaggaaactattgtaacagccatattattgtgataattaaaaccaagttctggaatcgatgatactacgaggcttgccatttacagttgcgaa

SEQ ID NO: 13248 - DNA, 2054 bp, Zea Mays
atcaaattagggacactcgaagttcaatccaaaatcacttgtactagagctatggacatggcataataattgactatttggcaaagcctgatgtggtttttaaggaggctgctttaaactctacgttaaatctgcaggatgttcagggtctagttacttgggttattggtgatggcatgctgccttcttgggtgtttgttaagaacaaacctcttatacccaaagttgtcctactatatgttcctggccttgatgcaactttatatatgtcacacactcgacttctttcttctctgaaagaattatgtggcaatccaaaacctgttttagcttcaagccgtatgccggatgagaggcacaccattgatgcgctcctaacctgcagagtaaagagaaagcgtgatgtaaaaacatcaaatgagtcatctaaacctgacatagatggaaaactatcaagtctggatgatcttggggacataccattccctgttacatattacactctctcagagaaagacttggaagataatggctactctttcaatttaccaggttttgtccctactgtttcagctccttcaggttcctcgccacataaagttcttgcacttgattgtgaaatgtgtgtgacaaaagctggatttgagctcacaagagtgacattaattgatattaaaggattggtggtgctagatagactagttaagcctgctaattcaatcattgattacaatacaaggttcagtggaatcactgctgagatgttggctgacgtgtccacaaccctgcaggaaattcaggaagagtttgttggacttgtatataaagaaacaattcttgttgggcattccttggaaaatgaccttatggcattacagatatcccatggtttaatcatcgatacagctgttttgtacaagtataagcgagggtctcgctgtaagattgctttgcgtgtcttgacgagaaagtttctcggccgggagatccagaacacaggatctggacatgacagtgtggaagatgctaaagctgctctagaacttgctatattgaaaatcaaacatggtcctgattttggttttcaaccatcgttgtcaaggcagaaattgacatctatactgcatgagagtgggaaaaaatgctcccttgttgatgatgtatctgttctcgagcggtattcagatacttcttgcaattcaattgctgttttttgtgatgatgatgccctctccagatcaatgaaggaggtgaagaataacaaagtcaccttcatttggactcagttctcaggattgatttcttacttccaccgaagagctcaagatccagaaaagttgaaatcatgtgtcgcagaggctattgcattaaaaacatgtgatggaaaaactgcttcaaaagaagcaagaagtaaaatttgtcctgaattaaaggaaattctgtgtggattggataaaaagataaagaaattatatggtgccctgcccgagaatgctatgcttattgtatgcactggccatggtgatactcctctagtacaaagattacggaaaatgcttcaccatgaagaagaaacaatagacagccgagaaactattgttcaagctttgggagatttacaagcccaagccgaagttgctctatgcttctgctgcgtcaaacgttaactgcatctttgaattagtgtgctgatgggtatggcttcggcgattataggagggtgtcaggcatgcatgctgacccgctgatgtgaaaagttccggcaggcagagattgaattttggaagctattctcatgctgtcttttttttcttttttctgtcagatactatgatcaggctgtagatgtcagcgtaaggcatagtgatgcattatcagaactggtctttcggtagcaggccagcatgtcagcatattaataggatcatttttcagatgaatatacggatcgcagaggaatgtaggaaactattgtaacagccatattattgtgataattaaaaccaagttctggaatcgatgatactacgaggcttgccatttacagttgcgaa

SEQ ID NO: 13249 - DNA, 2396 bp, Zea Mays
gccaaaggccaaacagatgacgccatgacctcatcgggagtcgacacgcagccggaagcacagcaggcgcactacctagagtcacactccccagcaacacagtgccactccactccaaggaagtgcttgcctcccgctctctacctctcctaccaatttcagctcagctctgttctgctcccgcagcaccagtacagaacaccccagaggcagcgagtcctgttcggtgtccggctggaaggccatgggggctagggctacctcccctccgccatggaggcgtcactgcctctgccgcgccctccacttcctcgttctcttgctctggggtacttccgaggcaaacaaagaacaggccatgttgcctccaagagggtggaactcgtatgattctttttcatggattgtagacgaaaatgcatacctgcaaaatgcacagatcatgacagagaagttactcccacatggatatcagtatgcagttattgatttcctctggtaccggaaatatgttgacggtgcatacacagattcctatggatttgacaacattgatgaatggggtcgaccttttccggaccttcaaagatttccatcgtctagagttgatagagggttcagtcaaattgccagtaaggttcatggaatgggcttgaaatttggcatccatttgatgaaagggataagtgtgcaggctgttaatgctgacacgcctatcttggacataaagacgggaaaaccatatctagaggatggccgtcagtggacagcacgagacataggtctcagtcacagaacttgtgcgtggatgactcatggatttatgagtgttaatacaaatattggagctggaagggccttcttaagatctctttatcgacaatatgctgattggggtgttgattttgtaaaggtcgattgtatcttcggcacagattatagcccagaagaaatcatcactatttcagaggaactgcagttactccagcattagctgagaatattagtgatcatgttaacatgtataggataactggagatgattgggacaactggaaggatgtgagctcgcattttggtgtatcaagttccttcgctactgctaagaagattggggccactgggttgcgaggaagatcttggccagacttagacatgcttccatttggatggcttactgatccaagtgtaaatcagggccctcacaggaaatgtaaccttactcttgatgaacagaaagcacagatggcactttggtcaatgactaaatcacctctcatgtatggaggagatttgaggaatcttgacgatagtacattaaacataattaccaattctggtttgttgaagataaaccactatagtagaaataacatggagttccattatgtgcacagtgaaaggacatcaaatggagaacattctggtcactttaggtctccttatcctgttcgtgttaccaagaatgatggcatatttgtcagtctcactgcttgcagcgacgatgcagctaaaggatggtatatgtttccacaagatgggaaaccagatcatatatgcaggaactatgaaatactgaatgataaaaatgtctcattttgcctcggaaaaacaaaacgttttcttgcatcggatgtccttaccatggacaccaaggaacaccaatcaaagtttcatatttcagttacaaacactgatgatacttgtttggatgcatctgctggtcgaaggcagactgcctcagagatcaggcttcctatgttctctgcatgcaggtggcatgcaaaacagatgtgggagttaaatgcgaatggaaatcttgtgagcagctattcaaggttatgtgccacagtggaatcaagggacgaaggaggtaccagtggaggtcgggcatggattgcaactggaagtgaaggagaaatctatctcgcattcttcaatctcgactccatgagcaggaagatgaccgttcaaatatcagaccttggaaaggttctcggaagaaaccttttggagaaaaacccatgtagctacactgaagtttggagcgggaagaatttcggcccggtgaaggaagagatttcagcggtggttcattcgcatggctccatggtgttcgaaatcatatgttgagattgcagtactgggcaagttgttcgagaagtttgcagtgataatttagttgtaagctccattcctgttgatccttttttacccttagtccggagatggaagagatacgttgatgaaccattaactagatgtctgctggatttgacttcaatgaataacaaaacaaacaaacaaacaaacaaacagggggtgaactgatctgtattattttgcttcatgtcctattggactcgacgacttctatttagtggtacaaagttaag

SEQ ID NO: 13250 - DNA, 2433 bp, Zea Mays
caaaggccaaacagatgacgccatgacctcatcgggagtcgacacgcagccggaagcacagcaggcgcactacctagagtcacactccccagcaacacagtgccactccactccaaggaagtgcttgcctcccgctctctacctctcctaccaatttcagctcagctctgttctgctcccgcagcaccagtacagaacaccccagaggcagcgagtcctgttcggtgtccggctggaaggccatgggggctagggctacctcccctccgccatggaggcgtcactgcctctgccgcgccctccacttcctcgttctcttgctctggggtacttccgaggcaaacaaagaacaggccatgttgcctccaagagggtggaactcgtatgattctttttcatggattgtagacgaaaatgcatacctgcaaaatgcacagatcatgacagagaagttactcccacatggatatcagttattgatttcctctggtaccggaaatatgttgacggtgcatacacagattcctatggatttgacaacattgatgaatggggtcgaccttttccggaccttcaaagatttccatcgtctagagttgatagagggttcagtcaaattgccagtaaggttcatggaatgggcttgaaatttggcatccatttgatgaaagggataagtgtgcaggctgttaatgctgacacgcctatcttggacataaagacgggaaaaccatatctagaggatggccgtcagtggacagcacgagacataggtctcagtcacagaacttgtgcgtggatgactcatggatttatgagtgttaatacaaatattggagctggaagggccttcttaagatctctttatcgacaatatgctgattggggtgttgattttgtaaaggtcgattgtatcttcggcacagattatagcccagaagaaatcatcactatttcagagctattgcaagaaattgatcgtccgatcatcctgtcaatctcaccaggaactgcagttactccagcattagctgagaatattagtgatcatgttaacatgtataggataactggagatgattgggacaactggaaggatgtgagctcgcattttggtgtatcaagttccttcgctactgctaagaagattggggccactgggttgcgaggaagatcttggccagacttagacatgcttccatttggatggcttactgatccaagtgtaaatcagggccctcacaggaaatgtaaccttactcttgatgaacagaaagcacagatggcactttggtcaatgactaaatcacctctcatgtatggaggagatttgaggaatcttgacgatagtacattaaacataattaccaattctggtttgttgaagataaaccactatagtagaaataacatggagttccattatgtgcacagtgaaaggacatcaaatggagaacattctggtcactttaggtctccttatcctgttcgtgttaccaagaatgatggcatatttgtcagtctcactgcttgcagcgacgatgcagctaaaggatggtatatgtttccacaagatgggaaaccagatcatatatgcaggaactatgaaatactgaatgataaaaatgtctcattttgcctcggaaaaacaaaacgttttcttgcatcggatgtccttaccatggacaccaaggaacaccaatcaaagtttcatatttcagttacaaacactgatgatacttgtttggatgcatctgctggtcgaaggcagactgcctcagagatcaggcttcctatgttctctgcatgcaggtggcatgcaaaacagatgtgggagttaaatgcgaatggaaatcttgtgagcagctattcaaggttatgtgccacagtggaatcaagggacgaaggaggtaccagtggaggtcgggcatggattgcaactggaagtgaaggagaaatctatctcgcattcttcaatctcgactccatgagcaggaagatgaccgttcaaatatcagaccttggaaaggttctcggaagaaaccttttggagaaaaacccatgtagctacactgaagtttggagcgggaagaatttcggcccggtgaaggaagagatttcagcggtggttcattcgcatggctccatggtgttcgaaatcatatgttgagattgcagtactgggcaagttgttcgagaagtttgcagtgataatttagttgtaagctccattcctgttgatccttttttacccttagtccggagatggaagagatacgttgatgaaccattaactagatgtctgctggatttgacttcaatgaataacaaaacaaacaaacaaacaaacaaacagggggtgaactgatctgtattattttgcttcatgtcctattggactcgacgacttctatttagtggtacaaagttaag

SEQ ID NO: 13251 - DNA, 2365 bp, Zea Mays
atgacctcatcgggagtcgacacgcagccggaagcacagcaggcgcactacctagagtcacactccccagcaacacagtgccactccactccaaggaagtgcttgcctcccgctctctacctctcctaccaatttcagctcagctctgttctgctcccgcagcaccagtacagaacaccccagaggcagcgagtcctgttcggtgtccggctggaaggccatgggggctagggctacctcccctccgccatggaggcgtcactgcctctgccgcgccctccacttcctcgttctcttgctctggggtacttccgaggcaaacaaagaacaggccatgttgcctccaagagggtggaactcgtatgattctttttcatggattgtagacgaaaatgcatacctgcaaaatgcacagatcatgacagagaagttactcccacatggatatcagttattgatttcctctggtaccggaaatatgttgacggtgcatacacagattcctatggatttgacaacattgatgaatggggtcgaccttttccggaccttcaaagatttccatcgtctagagttgatagagggttcagtcaaattgccagtaaggttcatggaatgggcttgaaatttggcatccatttgatgaaagggataagtgtgcaggctgttaatgctgacacgcctatcttggacataaagacgggaaaaccatatctagaggatggccgtcagtggacagcacgagacataggtctcagtcacagaacttgtgcgtggatgactcatggatttatgagtgttaatacaaatattggagctggaagggccttcttaagatctctttatcgacaatatgctgattggggtgttgattttgtaaaggtcgattgtatcttcggcacagattatagcccagaagaaatcatcactatttcagaggaactgcagttactccagcattagctgagaatattagtgatcatgttaacatgtataggataactggagatgattgggacaactggaaggatgtgagctcgcattttggtgtatcaagttccttcgctactgctaagaagattggggccactgggttgcgaggaagatcttggccagacttagacatgcttccatttggatggcttactgatccaagtgtaaatcagggccctcacaggaaatgtaaccttactcttgatgaacagaaagcacagatggcactttggtcaatgactaaatcacctctcatgtatggaggagatttgaggaatcttgacgatagtacattaaacataattaccaattctggtttgttgaagataaaccactatagtagaaataacatggagttccattatgtgcacagtgaaaggacatcaaatggagaacattctggtcactttaggtctccttatcctgttcgtgttaccaagaatgatggcatatttgtcagtctcactgcttgcagcgacgatgcagctaaaggatggtatatgtttccacaagatgggaaaccagatcatatatgcaggaactatgaaatactgaatgataaaaatgtctcattttgcctcggaaaaacaaaacgttttcttgcatcggatgtccttaccatggacaccaaggaacaccaatcaaagtttcatatttcagttacaaacactgatgatacttgtttggatgcatctgctggtcgaaggcagactgcctcagagatcaggcttcctatgttctctgcatgcaggtggcatgcaaaacagatgtgggagttaaatgcgaatggaaatcttgtgagcagctattcaaggttatgtgccacagtggaatcaagggacgaaggaggtaccagtggaggtcgggcatggattgcaactggaagtgaaggagaaatctatctcgcattcttcaatctcgactccatgagcaggaagatgaccgttcaaatatcagaccttggaaaggttctcggaagaaaccttttggagaaaaacccatgtagctacactgaagtttggagcgggaagaatttcggcccggtgaaggaagagatttcagcggtggttcattcgcatggctccatggtgttcgaaatcatatgttgagattgcagtactgggcaagttgttcgagaagtttgcagtgataatttagttgtaagctccattcctgttgatccttttttacccttagtccggagatggaagagatacgttgatgaaccattaactagatgtctgctggatttgacttcaatgaataacaaaacaaacaaacaaacaaacaaacagggggtgaactgatctgtattattttgcttcatgtcctattggactcgacgacttctatttagtggtacaaagttaag

SEQ ID NO: 13252 - DNA, 2314 bp, Zea Mays
atgacctcatcgggagtcgacacgcagccggaagcacagcaggcgcactacctagagtcacactccccagcaacacagtgccactccactccaaggaagtgcttgcctcccgctctctacctctcctaccaatttcagctcagctctgttctgctcccgcagcaccagtacagaacaccccagaggcagcgagtcctgttcggtgtccggctggaaggccatgggggctagggctacctcccctccgccatggaggcgtcactgcctctgccgcgccctccacttcctcgttctcttgctctggggtacttccgaggcaaacaaagaacaggccatgttgcctccaagagggtggaactcgtatgattctttttcatggattgtagacgaaaatgcatacctgcaaaatgcacagatcatgacagagaagttactcccacatggatatcagtatgcagttattgatttcctctggtaccggaaatatgttgacggtgcatacacagattcctatggatttgacaacattgatgaatggggtcgaccttttccggaccttcaaagatttccatcgtctagagttgatagagggttcagtcaaattgccagtaaggttcatggaatgggcttgaaatttggcatccatttgatgaaagggataagtgtgcaggctgttaatgctgacacgcctatcttggacataaagacgggaaaaccatatctagaggatggccgtcagtggacagcacgagacataggtctcagtcacagaacttgtgcgtggatgactcatggatttatgagtgttaatacaaatattggagctggaagggccttcttaagatctctttatcgacaatatgctgattggggtgttgattttgtaaaggtcgattgtatcttcggcacagattatagcccagaagaaatcatcactatttcagaggataactggagatgattgggacaactggaaggatgtgagctcgcattttggtgtatcaagttccttcgctactgctaagaagattggggccactgggttgcgaggaagatcttggccagacttagacatgcttccatttggatggcttactgatccaagtgtaaatcagggccctcacaggaaatgtaaccttactcttgatgaacagaaagcacagatggcactttggtcaatgactaaatcacctctcatgtatggaggagatttgaggaatcttgacgatagtacattaaacataattaccaattctggtttgttgaagataaaccactatagtagaaataacatggagttccattatgtgcacagtgaaaggacatcaaatggagaacattctggtcactttaggtctccttatcctgttcgtgttaccaagaatgatggcatatttgtcagtctcactgcttgcagcgacgatgcagctaaaggatggtatatgtttccacaagatgggaaaccagatcatatatgcaggaactatgaaatactgaatgataaaaatgtctcattttgcctcggaaaaacaaaacgttttcttgcatcggatgtccttaccatggacaccaaggaacaccaatcaaagtttcatatttcagttacaaacactgatgatacttgtttggatgcatctgctggtcgaaggcagactgcctcagagatcaggcttcctatgttctctgcatgcaggtggcatgcaaaacagatgtgggagttaaatgcgaatggaaatcttgtgagcagctattcaaggttatgtgccacagtggaatcaagggacgaaggaggtaccagtggaggtcgggcatggattgcaactggaagtgaaggagaaatctatctcgcattcttcaatctcgactccatgagcaggaagatgaccgttcaaatatcagaccttggaaaggttctcggaagaaaccttttggagaaaaacccatgtagctacactgaagtttggagcgggaagaatttcggcccggtgaaggaagagatttcagcggtggttcattcgcatggctccatggtgttcgaaatcatatgttgagattgcagtactgggcaagttgttcgagaagtttgcagtgataatttagttgtaagctccattcctgttgatccttttttacccttagtccggagatggaagagatacgttgatgaaccattaactagatgtctgctggatttgacttcaatgaataacaaaacaaacaaacaaacaaacaaacagggggtgaactgatctgtattattttgcttcatgtcctattggactcgacgacttctatttagtggtacaaagttaag

SEQ ID NO: 13253 - DNA, 2442 bp, Zea Mays
atgacctcatcgggagtcgacacgcagccggaagcacagcaggcgcactacctagagtcacactccccagcaacacagtgccactccactccaaggaagtgcttgcctcccgctctctacctctcctaccaatttcagctcagctctgttctgctcccgcagcaccagtacagaacaccccagaggcagcgagtcctgttcggtgtccggctggaaggccatgggggctagggctacctcccctccgccatggaggcgtcactgcctctgccgcgccctccacttcctcgttctcttgctctggggtacttccgaggcaaacaaagaacaggccatgttgcctccaagagggtggaactcgtatgattctttttcatggattgtagacgaaaatgcatacctgcaaaatgcacagatcatgacagagaagttactcccacatggatatcagtatgcagttattgatttcctctggtaccggaaatatgttgacggtgcatacacagattcctatggatttgacaacattgatgaatggggtcgaccttttccggaccttcaaagatttccatcgtctagagttgatagagggttcagtcaaattgccagtaaggttcatggaatgggcttgaaatttggcatccatttgatgaaagggataagtgtgcaggctgttaatgctgacacgcctatcttggacataaagacgggaaaaccatatctagaggatggccgtcagtggacagcacgagacataggtctcagtcacagaacttgtgcgtggatgactcatggatttatgagtgttaatacaaatattggagctggaagggccttcttaagatctctttatcgacaatatgctgattggggtgttgattttgtaaaggtcgattgtatcttcggcacagattatagcccagaagaaatcatcactatttcagagctattgcaagaaattgatcgtccgatcatcctgtcaatctcaccaggaactgcagttactccagcattagctgagaatattagtgatcatgttaacatgtataggataactggagatgattgggacaactggaaggatgtgagctcgcattttggtgtatcaagttccttcgctactgctaagaagattggggccactgggttgcgaggaagatcttggccagacttagacatgcttccatttggatggcttactgatccaaaccctatttcttttgttaatgcaggtgtaaatcagggccctcacaggaaatgtaaccttactcttgatgaacagaaagcacagatggcactttggtcaatgactaaatcacctctcatgtatggaggagatttgaggaatcttgacgatagtacattaaacataattaccaattctggtttgttgaagataaaccactatagtagaaataacatggagttccattatgtgcacagtgaaaggacatcaaatggagaacattctggtcactttaggtctccttatcctgttcgtgttaccaagaatgatggcatatttgtcagtctcactgcttgcagcgacgatgcagctaaaggatggtatatgtttccacaagatgggaaaccagatcatatatgcaggaactatgaaatactgaatgataaaaatgtctcattttgcctcggaaaaacaaaacgttttcttgcatcggatgtccttaccatggacaccaaggaacaccaatcaaagtttcatatttcagttacaaacactgatgatacttgtttggatgcatctgctggtcgaaggcagactgcctcagagatcaggcttcctatgttctctgcatgcaggtggcatgcaaaacagatgtgggagttaaatgcgaatggaaatcttgtgagcagctattcaaggttatgtgccacagtggaatcaagggacgaaggaggtaccagtggaggtcgggcatggattgcaactggaagtgaaggagaaatctatctcgcattcttcaatctcgactccatgagcaggaagatgaccgttcaaatatcagaccttggaaaggttctcggaagaaaccttttggagaaaaacccatgtagctacactgaagtttggagcgggaagaatttcggcccggtgaaggaagagatttcagcggtggttcattcgcatggctccatggtgttcgaaatcatatgttgagattgcagtactgggcaagttgttcgagaagtttgcagtgataatttagttgtaagctccattcctgttgatccttttttacccttagtccggagatggaagagatacgttgatgaaccattaactagatgtctgctggatttgacttcaatgaataacaaaacaaacaaacaaacaaacaaacagggggtgaactgatctgtattattttgcttcatgtcctattggactcgacgacttctatttagtggtacaaagttaag

SEQ ID NO: 13254 - DNA, 2885 bp, Zea Mays
atgacctcatcgggagtcgacacgcagccggaagcacagcaggcgcactacctagagtcacactccccagcaacacagtgccactccactccaaggaagtgcttgcctcccgctctctacctctcctaccaatttcagctcagctctgttctgctcccgcagcaccagtacagaacaccccagaggcagcgagtcctgttcggtgtccggctggaaggccatgggggctagggctacctcccctccgccatggaggcgtcactgcctctgccgcgccctccacttcctcgttctcttgctctggggtacttccgaggcaaacaaagaacaggccatgttgcctccaagagggtggaactcgtatgattctttttcatggattgtagacgaaaatgcatacctgcaaaatgcacagatcatgacagagaagttactcccacatggatatcagtatgcagttattgatttcctctggtaccggaaatatgttgacggtgcatacacagattcctatggatttgacaacattgatgaatggggtcgaccttttccggaccttcaaagatttccatcgtctagagttgatagagggttcagtcaaattgccagtaaggttcatggaatgggcttgaaatttggcatccatttgatgaaagggataagtgtgcaggctgttaatgctgacacgcctatcttggacataaagacgggaaaaccatatctagaggatggccgtcagtggacagcacgagacataggtctcagtcacagaacttgtgcgtggatgactcatggatttatgagtgttaatacaaatattggagctggaagggccttcttaagatctctttatcgacaatatgctgattggggtgttgattttgtaaaggtcgattgtatcttcggcacagattatagcccagaagaaatcatcactatttcagagctattgcaagaaattgatcgtccgatcatcctgtcaatctcaccaggaactgcagttactccagcattagctgagaatattagtgatcatgttaacatgtataggataactggagatgattgggacaactggaaggatgtgagctcgcattttggtgtatcaaggtaaattgaacagatattttcttctttttctcctgcatttctgattttttctttgttctgtttcattgtatcatactaaataaaaaactcgacctgtggagggtaaggcagccctcagacattgtgttaagaagactttctcatgcaagtcgagaaaacctctgaaccactgcctcactcatacacagtccatataagaacgactgtgatcagggacagataccacctaacaaactcggctagaggccctttcgctttattgcattatactcattagtttttataccttgtaaatgtatgttgcctaataaataagaacttgtttcgtactttttttccctttgcatactatatgcagttccttcgctactgctaagaagattggggccactgggttgcgaggaagatcttggccagacttagacatgcttccatttggatggcttactgatccaaaccctatttcttttgttaatgcaggtgtaaatcagggccctcacaggaaatgtaaccttactcttgatgaacagaaagcacaggttgttgatgatcacttcaaatttgagtgttctgtatcttttttgtatagtaatgaactcttttttctttgacatgaccttacagatggcactttggtcaatgactaaatcacctctcatgtatggaggagatttgaggaatcttgacgatagtacattaaacataattaccaattctggtttgttgaagataaaccactatagtagaaataacatggagttccattatgtgcacagtgaaaggacatcaaatggagaacattctggtcactttaggtctccttatcctgttcgtgttaccaagaatgatggcatatttgtcagtctcactgcttgcagcgacgatgcagctaaaggatggtatatgtttccacaagatgggaaaccagatcatatatgcaggaactatgaaatactgaatgataaaaatgtctcattttgcctcggaaaaacaaaacgttttcttgcatcggatgtccttaccatggacaccaaggaacaccaatcaaagtttcatatttcagttacaaacactgatgatacttgtttggatgcatctgctggtcgaaggcagactgcctcagagatcaggcttcctatgttctctgcatgcaggtggcatgcaaaacagatgtgggagttaaatgcgaatggaaatcttgtgagcagctattcaaggttatgtgccacagtggaatcaagggacgaaggaggtaccagtggaggtcgggcatggattgcaactggaagtgaaggagaaatctatctcgcattcttcaatctcgactccatgagcaggaagatgaccgttcaaatatcagaccttggaaaggttctcggaagaaaccttttggagaaaaacccatgtagctacactgaagtttggagcgggaagaatttcggcccggtgaaggaagagatttcagcggtggttcattcgcatggctccatggtgttcgaaatcatatgttgagattgcagtactgggcaagttgttcgagaagtttgcagtgataatttagttgtaagctccattcctgttgatccttttttacccttagtccggagatggaagagatacgttgatgaaccattaactagatgtctgctggatttgacttcaatgaataacaaaacaaacaaacaaacaaacaaacagggggtgaactgatctgtattattttgcttcatgtcctattggactcgacgacttctatttagtggtacaaagttaag

SEQ ID NO: 13255 - DNA, 2389 bp, Zea Mays
atgacctcatcgggagtcgacacgcagccggaagcacagcaggcgcactacctagagtcacactccccagcaacacagtgccactccactccaaggaagtgcttgcctcccgctctctacctctcctaccaatttcagctcagctctgttctgctcccgcagcaccagtacagaacaccccagaggcagcgagtcctgttcggtgtccggctggaaggccatgggggctagggctacctcccctccgccatggaggcgtcactgcctctgccgcgccctccacttcctcgttctcttgctctggggtacttccgaggcaaacaaagaacaggccatgttgcctccaagagggtggaactcgtatgattctttttcatggattgtagacgaaaatgcatacctgcaaaatgcacagatcatgacagagaagttactcccacatggatatcagttattgatttcctctggtaccggaaatatgttgacggtgcatacacagattcctatggatttgacaacattgatgaatggggtcgaccttttccggaccttcaaagatttccatcgtctagagttgatagagggttcagtcaaattgccagtaaggttcatggaatgggcttgaaatttggcatccatttgatgaaagggataagtgtgcaggctgttaatgctgacacgcctatcttggacataaagacgggaaaaccatatctagaggatggccgtcagtggacagcacgagacataggtctcagtcacagaacttgtgcgtggatgactcatggatttatgagtgttaatacaaatattggagctggaagggccttcttaagatctctttatcgacaatatgctgattggggtgttgattttgtaaaggtcgattgtatcttcggcacagattatagcccagaagaaatcatcactatttcagaggaactgcagttactccagcattagctgagaatattagtgatcatgttaacatgtataggataactggagatgattgggacaactggaaggatgtgagctcgcattttggtgtatcaagttccttcgctactgctaagaagattggggccactgggttgcgaggaagatcttggccagacttagacatgcttccatttggatggcttactgatccaaaccctatttcttttgttaatgcaggtgtaaatcagggccctcacaggaaatgtaaccttactcttgatgaacagaaagcacagatggcactttggtcaatgactaaatcacctctcatgtatggaggagatttgaggaatcttgacgatagtacattaaacataattaccaattctggtttgttgaagataaaccactatagtagaaataacatggagttccattatgtgcacagtgaaaggacatcaaatggagaacattctggtcactttaggtctccttatcctgttcgtgttaccaagaatgatggcatatttgtcagtctcactgcttgcagcgacgatgcagctaaaggatggtatatgtttccacaagatgggaaaccagatcatatatgcaggaactatgaaatactgaatgataaaaatgtctcattttgcctcggaaaaacaaaacgttttcttgcatcggatgtccttaccatggacaccaaggaacaccaatcaaagtttcatatttcagttacaaacactgatgatacttgtttggatgcatctgctggtcgaaggcagactgcctcagagatcaggcttcctatgttctctgcatgcaggtggcatgcaaaacagatgtgggagttaaatgcgaatggaaatcttgtgagcagctattcaaggttatgtgccacagtggaatcaagggacgaaggaggtaccagtggaggtcgggcatggattgcaactggaagtgaaggagaaatctatctcgcattcttcaatctcgactccatgagcaggaagatgaccgttcaaatatcagaccttggaaaggttctcggaagaaaccttttggagaaaaacccatgtagctacactgaagtttggagcgggaagaatttcggcccggtgaaggaagagatttcagcggtggttcattcgcatggctccatggtgttcgaaatcatatgttgagattgcagtactgggcaagttgttcgagaagtttgcagtgataatttagttgtaagctccattcctgttgatccttttttacccttagtccggagatggaagagatacgttgatgaaccattaactagatgtctgctggatttgacttcaatgaataacaaaacaaacaaacaaacaaacaaacagggggtgaactgatctgtattattttgcttcatgtcctattggactcgacgacttctatttagtggtacaaagttaag

SEQ ID NO: 13256 - DNA, 2396 bp, Zea Mays
atgacctcatcgggagtcgacacgcagccggaagcacagcaggcgcactacctagagtcacactccccagcaacacagtgccactccactccaaggaagtgcttgcctcccgctctctacctctcctaccaatttcagctcagctctgttctgctcccgcagcaccagtacagaacaccccagaggcagcgagtcctgttcggtgtccggctggaaggccatgggggctagggctacctcccctccgccatggaggcgtcactgcctctgccgcgccctccacttcctcgttctcttgctctggggtacttccgaggcaaacaaagaacaggccatgttgcctccaagagggtggaactcgtatgattctttttcatggattgtagacgaaaatgcatacctgcaaaatgcacagatcatgacagagaagttactcccacatggatatcagtatgcagttattgatttcctctggtaccggaaatatgttgacggtgcatacacagattcctatggatttgacaacattgatgaatggggtcgaccttttccggaccttcaaagatttccatcgtctagagttgatagagggttcagtcaaattgccagtaaggttcatggaatgggcttgaaatttggcatccatttgatgaaagggataagtgtgcaggctgttaatgctgacacgcctatcttggacataaagacgggaaaaccatatctagaggatggccgtcagtggacagcacgagacataggtctcagtcacagaacttgtgcgtggatgactcatggatttatgagtgttaatacaaatattggagctggaagggccttcttaagatctctttatcgacaatatgctgattggggtgttgattttgtaaaggtcgattgtatcttcggcacagattatagcccagaagaaatcatcactatttcagaggaactgcagttactccagcattagctgagaatattagtgatcatgttaacatgtataggataactggagatgattgggacaactggaaggatgtgagctcgcattttggtgtatcaagttccttcgctactgctaagaagattggggccactgggttgcgaggaagatcttggccagacttagacatgcttccatttggatggcttactgatccaaaccctatttcttttgttaatgcaggtgtaaatcagggccctcacaggaaatgtaaccttactcttgatgaacagaaagcacagatggcactttggtcaatgactaaatcacctctcatgtatggaggagatttgaggaatcttgacgatagtacattaaacataattaccaattctggtttgttgaagataaaccactatagtagaaataacatggagttccattatgtgcacagtgaaaggacatcaaatggagaacattctggtcactttaggtctccttatcctgttcgtgttaccaagaatgatggcatatttgtcagtctcactgcttgcagcgacgatgcagctaaaggatggtatatgtttccacaagatgggaaaccagatcatatatgcaggaactatgaaatactgaatgataaaaatgtctcattttgcctcggaaaaacaaaacgttttcttgcatcggatgtccttaccatggacaccaaggaacaccaatcaaagtttcatatttcagttacaaacactgatgatacttgtttggatgcatctgctggtcgaaggcagactgcctcagagatcaggcttcctatgttctctgcatgcaggtggcatgcaaaacagatgtgggagttaaatgcgaatggaaatcttgtgagcagctattcaaggttatgtgccacagtggaatcaagggacgaaggaggtaccagtggaggtcgggcatggattgcaactggaagtgaaggagaaatctatctcgcattcttcaatctcgactccatgagcaggaagatgaccgttcaaatatcagaccttggaaaggttctcggaagaaaccttttggagaaaaacccatgtagctacactgaagtttggagcgggaagaatttcggcccggtgaaggaagagatttcagcggtggttcattcgcatggctccatggtgttcgaaatcatatgttgagattgcagtactgggcaagttgttcgagaagtttgcagtgataatttagttgtaagctccattcctgttgatccttttttacccttagtccggagatggaagagatacgttgatgaaccattaactagatgtctgctggatttgacttcaatgaataacaaaacaaacaaacaaacaaacaaacagggggtgaactgatctgtattattttgcttcatgtcctattggactcgacgacttctatttagtggtacaaagttaag

SEQ ID NO: 13257 - DNA, 2147 bp, Zea Mays
aaaaaactaccttaaattcgcaaaaaaatacagggtacttccgaggcaaacaaagaacaggccatgttgcctccaagagggtggaactcgtatgattctttttcatggattgtagacgaaaatgcatacctgcaaaatgcacagatcatgacagagaagttactcccacatggatatcagtatgcagttattgatttcctctggtaccggaaatatgttgacggtgcatacacagattcctatggatttgacaacattgatgaatggggtcgaccttttccggaccttcaaagatttccatcgtctagagttgatagagggttcagtcaaattgccagtaaggttcatggaatgggcttgaaatttggcatccatttgatgaaagggataagtgtgcaggctgttaatgctgacacgcctatcttggacataaagacgggaaaaccatatctagaggatggccgtcagtggacagcacgagacataggtctcagtcacagaacttgtgcgtggatgactcatggatttatgagtgttaatacaaatattggagctggaagggccttcttaagatctctttatcgacaatatgctgattggggtgttgattttgtaaaggtcgattgtatcttcggcacagattatagcccagaagaaatcatcactatttcagagctattgcaagaaattgatcgtccgatcatcctgtcaatctcaccaggaactgcagttactccagcattagctgagaatattagtgatcatgttaacatgtataggataactggagatgattgggacaactggaaggatgtgagctcgcattttggtgtatcaagttccttcgctactgctaagaagattggggccactgggttgcgaggaagatcttggccagacttagacatgcttccatttggatggcttactgatccaagtgtaaatcagggccctcacaggaaatgtaaccttactcttgatgaacagaaagcacagatggcactttggtcaatgactaaatcacctctcatgtatggaggagatttgaggaatcttgacgatagtacattaaacataattaccaattctggtttgttgaagataaaccactatagtagaaataacatggagttccattatgtgcacagtgaaaggacatcaaatggagaacattctggtcactttaggtctccttatcctgttcgtgttaccaagaatgatggcatatttgtcagtctcactgcttgcagcgacgatgcagctaaaggatggtatatgtttccacaagatgggaaaccagatcatatatgcaggaactatgaaatactgaatgataaaaatgtctcattttgcctcggaaaaacaaaacgttttcttgcatcggatgtccttaccatggacaccaaggaacaccaatcaaagtttcatatttcagttacaaacactgatgatacttgtttggatgcatctgctggtcgaaggcagactgcctcagagatcaggcttcctatgttctctgcatgcaggtggcatgcaaaacagatgtgggagttaaatgcgaatggaaatcttgtgagcagctattcaaggttatgtgccacagtggaatcaagggacgaaggaggtaccagtggaggtcgggcatggattgcaactggaagtgaaggagaaatctatctcgcattcttcaatctcgactccatgagcaggaagatgaccgttcaaatatcagaccttggaaaggttctcggaagaaaccttttggagaaaaacccatgtagctacactgaagtttggagcgggaagaatttcggcccggtgaaggaagagatttcagcggtggttcattcgcatggctccatggtgttcgaaatcatatgttgagattgcagtactgggcaagttgttcgagaagtttgcagtgataatttagttgtaagctccattcctgttgatccttttttacccttagtccggagatggaagagatacgttgatgaaccattaactagatgtctgctggatttgacttcaatgaataacaaaacaaacaaacaaacaaacaaacagggggtgaactgatctgtattattttgcttcatgtcctattggactcgacgacttctatttagtggtacaaagttaag

SEQ ID NO: 13258 - DNA, 1788 bp, Zea Mays
ttgttgtctgcataggaacagggccaccattctcttgattagatgggaaaaccatatctagaggatggccgtcagtggacagcacgagacataggtctcagtcacagaacttgtgcgtggatgactcatggatttatgagtgttaatacaaatattggagctggaagggccttcttaagatctctttatcgacaatatgctgattggggtgttgattttggtcgattgtatcttcggcacagattatagcccagaagaaatcatcactatttcagaggaactgcagttactccagcattagctgagaatattagtgatcatgttaacatgtataggataactggagatgattgggacaactggaaggatgtgagctcgcattttggtgtatcaagttccttcgctactgctaagaagattggggccactgggttgcgaggaagatcttggccagacttagacatgcttccatttggatggcttactgatccaagtgtaaatcagggccctcacaggaaatgtaaccttactcttgatgaacagaaagcacaggttgttgatgatcacttcaaatttgagtgttctgtatcttttttgtatagtaatgaactcttttttctttgacatgaccttacagatggcactttggtcaatgactaaatcacctctcatgtatggaggagatttgaggaatcttgacgatagtacattaaacataattaccaattctggtttgttgaagataaaccactatagtagaaataacatggagttccattatgtgcacagtgaaaggacatcaaatggagaacattctggtcactttaggtctccttatcctgttcgtgttaccaagaatgatggcatatttgtcagtctcactgcttgcagcgacgatgcagctaaaggatggtatatgtttccacaagatgggaaaccagatcatatatgcaggaactatgaaatactgaatgataaaaatgtctcattttgcctcggaaaaacaaaacgttttcttgcatcggatgtccttaccatggacaccaaggaacaccaatcaaagtttcatatttcagttacaaacactgatgatacttgtttggatgcatctgctggtcgaaggcagactgcctcagagatcaggcttcctatgttctctgcatgcaggtggcatgcaaaacagatgtgggagttaaatgcgaatggaaatcttgtgagcagctattcaaggttatgtgccacagtggaatcaagggacgaaggaggtaccagtggaggtcgggcatggattgcaactggaagtgaaggagaaatctatctcgcattcttcaatctcgactccatgagcaggaagatgaccgttcaaatatcagaccttggaaaggttctcggaagaaaccttttggagaaaaacccatgtagctacactgaagtttggagcgggaagaatttcggcccggtgaaggaagagatttcagcggtggttcattcgcatggctccatggtgttcgaaatcatatgttgagattgcagtactgggcaagttgttcgagaagtttgcagtgataatttagttgtaagctccattcctgttgatccttttttacccttagtccggagatggaagagatacgttgatgaaccattaactagatgtctgctggatttgacttcaatgaataacaaaacaaacaaacaaacaaacaaacagggggtgaactgatctgtattattttgcttcatgtcctattggactcgacgacttctatttagtggtacaaagttaag

SEQ ID NO: 13259 - DNA, 1747 bp, Zea Mays
ggaacagggccaccattctcttgattagatgggaaaaccatatctagaggatggccgtcagtggacagcacgagacataggtctcagtcacagaacttgtgcgtggatgactcatggatttatgagtgttaatacaaatattggagctggaagggccttcttaagatctctttatcgacaatatgctgattggggtgttgattttgtaaaggtcgattgtatcttcggcacagattatagcccagaagaaatcatcactatttcagaggaactgcagttactccagcattagctgagaatattagtgatcatgttaacatgtataggataactggagatgattgggacaactggaaggatgtgagctcgcattttggtgtatcaaggtgtaaatcagggccctcacaggaaatgtaaccttactcttgatgaacagaaagcacaggttgttgatgatcacttcaaatttgagtgttctgtatcttttttgtatagtaatgaactcttttttctttgacatgaccttacagatggcactttggtcaatgactaaatcacctctcatgtatggaggagatttgaggaatcttgacgatagtacattaaacataattaccaattctggtttgttgaagataaaccactatagtagaaataacatggagttccattatgtgcacagtgaaaggacatcaaatggagaacattctggtcactttaggtctccttatcctgttcgtgttaccaagaatgatggcatatttgtcagtctcactgcttgcagcgacgatgcagctaaaggatggtatatgtttccacaagatgggaaaccagatcatatatgcaggaactatgaaatactgaatgataaaaatgtctcattttgcctcggaaaaacaaaacgttttcttgcatcggatgtccttaccatggacaccaaggaacaccaatcaaagtttcatatttcagttacaaacactgatgatacttgtttggatgcatctgctggtcgaaggcagactgcctcagagatcaggcttcctatgttctctgcatgcaggtggcatgcaaaacagatgtgggagttaaatgcgaatggaaatcttgtgagcagctattcaaggttatgtgccacagtggaatcaagggacgaaggaggtatatattacataacttttttattttgaactaagtgacatcactatattttcctatgaaatataggtaccagtggaggtcgggcatggattgcaactggaagtgaaggagaaatctatctcgcattcttcaatctcgactccatgagcaggaagatgaccgttcaaatatcagaccttggaaaggttctcggaagaaaccttttggagaaaaacccatgtagctacactgaagtttggagcgggaagaatttcggcccggtgaaggaagagatttcagcggtggttcattcgcatggctccatggtgttcgaaatcatatgttgagattgcagtactgggcaagttgttcgagaagtttgcagtgataatttagttgtaagctccattcctgttgatccttttttacccttagtccggagatggaagagatacgttgatgaaccattaactagatgtctgctggatttgacttcaatgaataacaaaacaaacaaacaaacaaacaaacagggggtgaactgatctgtattattttgcttcatgtcctattggactcgacgacttctatttagtggtacaaagttaag

SEQ ID NO: 13260 - DNA, 1862 bp, Zea Mays
ggccaccattctcttgattagatgggaaaaccatatctagaggatggccgtcagtggacagcacgagacataggtctcagtcacagaacttgtgcgtggatgactcatggatttatgagtgttaatacaaatattggagctggaagggccttcttaagatctctttatcgacaatatgctgattggggtgttgattttgtaaaggtcgattgtatcttcggcacagattatagcccagaagaaatcatcactatttcagaggaactgcagttactccagcattagctgagaatattagtgatcatgttaacatgtataggataactggagatgattgggacaactggaaggatgtgagctcgcattttggtgtatcaagttccttcgctactgctaagaagattggggccactgggttgcgaggaagatcttggccagacttagacatgcttccatttggatggcttactgatccaaaccctatttcttttgttaatgcaggtgtaaatcagggccctcacaggaaatgtaaccttactcttgatgaacagaaagcacaggttgttgatgatcacttcaaatttgagtgttctgtatcttttttgtatagtaatgaactcttttttctttgacatgaccttacagatggcactttggtcaatgactaaatcacctctcatgtatggaggagatttgaggaatcttgacgatagtacattaaacataattaccaattctggtttgttgaagataaaccactatagtagaaataacatggagttccattatgtgcacagtgaaaggacatcaaatggagaacattctggtcactttaggtctccttatcctgttcgtgttaccaagaatgatggcatatttgtcagtctcactgcttgcagcgacgatgcagctaaaggatggtatatgtttccacaagatgggaaaccagatcatatatgcaggaactatgaaatactgaatgataaaaatgtctcattttgcctcggaaaaacaaaacgttttcttgcatcggatgtccttaccatggacaccaaggaacaccaatcaaagtttcatatttcagttacaaacactgatgatacttgtttggatgcatctgctggtcgaaggcagactgcctcagagatcaggcttcctatgttctctgcatgcaggtggcatgcaaaacagatgtgggagttaaatgcgaatggaaatcttgtgagcagctattcaaggttatgtgccacagtggaatcaagggacgaaggaggtatatattacataacttttttattttgaactaagtgacatcactatattttcctatgaaatataggtaccagtggaggtcgggcatggattgcaactggaagtgaaggagaaatctatctcgcattcttcaatctcgactccatgagcaggaagatgaccgttcaaatatcagaccttggaaaggttctcggaagaaaccttttggagaaaaacccatgtagctacactgaagtttggagcgggaagaatttcggcccggtgaaggaagagatttcagcggtggttcattcgcatggctccatggtgttcgaaatcatatgttgagattgcagtactgggcaagttgttcgagaagtttgcagtgataatttagttgtaagctccattcctgttgatccttttttacccttagtccggagatggaagagatacgttgatgaaccattaactagatgtctgctggatttgacttcaatgaataacaaaacaaacaaacaaacaaacaaacagggggtgaactgatctgtattattttgcttcatgtcctattggactcgacgacttctatttagtggtacaaagttaag

SEQ ID NO: 13261 - DNA, 2153 bp, Zea Mays
cgacaaataagctctttgccaagggttgaaaaaaaaacactcgacaaagaagtgttgccgaatgtttttttacactcggtagggtgtccgaaaacacactcggcaaatcacctggcactggcactcagcaaagagccggattgagatactgactctagatccaacgtgtgatccacaaatgcggtgatcagactgaataaggacaaaaacccttgcaaacctggcaataggttaatataacgacatacgataacgttatactccaggtgctccttcttcttttctatgttttcaggtttaagggcgtgcctggttcgtagccggccgccaaaccacgccacatcctgtcatcctccacgccgcaagtttcggtttccaattctattctccaattccacaagtaatatattaaggttccttttttatttgctcgatggaaacgcaatcgatcagttgccaaaaccatacaatacacctgtacacagtgataaaatttgtacttattattattacatggtatattctaaaagcatggatgagattctgaaattattgtatatagctgaagcctctttttttaatttctacgtacacaacagaaacgcatatgcagttactaacagaccatatacacctgtacatgatacaaaacgaaatgctggaaagttaagctaatagaacgaaacagtactccacgtacacacagagccaaaaatgtgatctcatatatatatagcgtgtagttactaacagagcaagtttccacacagtacatacgtgtaaagtgattcagtttcgaatacttatcgcttatctgattccagttccacaagtttctctctgattcgaatcccacagacatgttaaccgtttatatatctagcgtgcatgcatgacagcagtgatcgatttggcaactttgatcccttgctttgctccaaatgttttttttggacatacctgtaacagaaagcagcagttttaaatctaacccgtcttttcctgcagcaacgccttgtgtaccgtatgcagtaggaagaaagcaatataattccttgagccgtcgtctctcgctttgaaagttgaaatttcacattaaatttccatatactatatataaattcctagtttctgaatcagaaattaaataatcaacttaattaggcaacatatatatgaggaataccacacgaaaacaccactaatataatatataaataccaagtatatatatacattgcatgtataatatatatttttaatattcagaatattttgtcgcgcttttagtttaaaacaatatagtatcataattttgatacatcattattgttaatcttaataataacttttctttaaaaaagggtgaaagaatgctgaagccattaatctaaggggatagatctctagcttcagcttcttcgaagagaagtagagaaccactcctagccagccaagcacttaaaatatcaattgattcagggtggagatcaagagagaatcacttcttatcgatccctcctaggaaaccattgaaatcactccattggagaatcaaggagcagaattcaagaatcaatcagacagcggagttctcccaaacaaggcctaataatggacatgttacaagatggtgaggtcctcttagatattataccttcttcatcaatggcaagtcatgtaaaatccaatcatccacacacacatatatgtcaagttcagtgattactggtgtagtagtgtgaggattgcatgtggccggggagataagaataacaacacaaagtgatagcaaaggaaaacattaggtgagggcagtcaacaaggtagaagggtaatgttgcttacaatgttgattcctaagaagttgttaggcacaagactaggtagagagaaagacatggagtcgaagagtagtcgatgcactgccatatccaatacgccgccacatcaacttgacggaagggtagagagaagtgtcatcgagcactcgcttgtgcgaggacaagccgctatatatacacaagcgtaagatgcgtggatggttaccacgcgcatcgtttactcgaagttacgtttatgtgacgtaacacaattgttttatcttaattttttccaactacaaatttatataaggcacacgagaatttgat

SEQ ID NO: 13262 - DNA, 2152 bp, Zea Mays
cgacaaataagctctttgccaagggttgaaaaaaaaacactcgacaaagaagtgttgccgaatgtttttttacactcggtagggtgtccgaaaacacactcggcaaatcacctggcactggcactcagcaaagagccggattgagatactgactctagatccaacgtgtgatccacaaatgcggtgatcagactgaataaggacaaaaacccttgcaaacctggcaataggttaatataacgacatacgataacgttatactccaggtgctccttcttcttttctatgttttcaggtttaagggcgtgcctggttcgtagccggccgccaaaccacgccacatcctgtcatcctccacgccgcaagtttcggtttccaattctattctccaattccacaagtaatatattaaggttccttttttatttgctcgatggaaacgcaatcgatcagttgccaaaaccatacaatacacctgtacacagtgataaaatttgtacttattattattacatggtatattctaaaagcatggatgagattctgaaattattgtatatagctgaagcctctttttttaatttctacgtacacaacagaaacgcatatgcagttactaacagaccatatacacctgtacatgatacaaaacgaaatgctggaaagttaagctaatagaacgaaacagtactccacgtacacacagagccaaaaatgtgatctcatatatatatagcgtgtagttactaacagagcaagtttccacacagtacatacgtgtaaagtgattcagtttcgaatacttatcgcttatctgattccagttccacaagtttctctctgattcgaatcccacagacatgttaaccgtttatatatctagcgtgcatgcatgacagcagtgatcgatttggcaactttgatcccttgctttgctccaaatgttttttttggacatacctgtaacagaaagcagcagttttaaatctaacccgtcttttcctgcagcaacgccttgtgtaccgtatgcagtaggaagaaagcaatataattccttgagccgtcgtctctcgctttgaaagttgaaatttcacattaaatttccatatactatatataaattcctagtttctgaatcagaaattaaataatcaacttaattaggcaacatatatatgaggaataccacacgaaaacaccactaatataatatataaataccaagtatatatatacattgcatgtataatatatatttttaatattcagaatattttgtcgcgcttttagtttaaaacaatatagtatcataattttgatacatcattattgttaatcttaataataacttttctttaaaaaagggtgaaagaatgctgaagccattaatctaaggggatagatctctagcttcagcttcttcgaagagaagtagagaaccactcctagccagccaagcacttaaaatatcaattgattcaggtggagatcaagagagaatcacttcttatcgatccctcctaggaaaccattgaaatcactccattggagaatcaaggagcagaattcaagaatcaatcagacagcggagttctcccaaacaaggcctaataatggacatgttacaagatggtgaggtcctcttagatattataccttcttcatcaatggcaagtcatgtaaaatccaatcatccacacacacatatatgtcaagttcagtgattactggtgtagtagtgtgaggattgcatgtggccggggagataagaataacaacacaaagtgatagcaaaggaaaacattaggtgagggcagtcaacaaggtagaagggtaatgttgcttacaatgttgattcctaagaagttgttaggcacaagactaggtagagagaaagacatggagtcgaagagtagtcgatgcactgccatatccaatacgccgccacatcaacttgacggaagggtagagagaagtgtcatcgagcactcgcttgtgcgaggacaagccgctatatatacacaagcgtaagatgcgtggatggttaccacgcgcatcgtttactcgaagttacgtttatgtgacgtaacacaattgttttatcttaattttttccaactacaaatttatataaggcacacgagaatttgat

SEQ ID NO: 13263 - DNA, 1569 bp, Zea Mays
aaaccaagatctcctgaccaccaacatctttcccatccagctagcagcagttaataaattaaaaagagatgacggagaaggtgctagttctgatcgttggtgcaggtccatcaggccttgctgtagcagcatgcctcggcgagcacggcatcccgtaccacattgtggagcgcgaggactgcagcgcttcgctgtggcgcaaacgcacgtacgatcgcctcaaactccacctcgccaaggagttctgcgagctccctcgcatgtcgcatccgagcgacgcccccaagtacatcacgagggagcagttcgtgaggtacgtcgacgactacgtcgagcgcttcaacatcctccccaggtacagcacctcggtcgagtcctgcgagtacgacgagtggccgagtacacgaccaggttcttggtcgtagccaccggcgagaactgcgagggagtcatcccggatatccctgggctgcgcgatttcccggctggtgaggtcgtgcactcgtcgagctacaagtcgtggaagaactatgccgggaagagagtcctggtggttgggtgtggcaactctggcatggagattgcatatgatcttgcctacaatggagtggaaacctccttggttatccgtagcccggtgcatgttatgaccaagggtctgatttacttgggcatgaggctgctgaaatggcaccttcccgtgaaacttgtggacttcatcatcttgaccttggcaaacatccagttcggtgacctctcccgctacggcatagtcaggcccgacatgggcccgcttcttctcaaggccaagactggccggtcagctgtcctagacgttggcacaactcagttaataaagactggcgatatcaaggtggttggggcaatatctcgcatcagaggaaacacagtggagttcgaggatgggaaggagagggacttcgattctctcgtgttcgcaacaggatatagaagcactgcgaacacgtggcttaaggacggtgggagcttgctagacgacaatggcatgccgaagaagaaggcggcggggccgcagcagggcagtcggccatggaagggcggcaacgggctctactgcgttgggctggggatggctggactggctggcatctctcgtgacgcagtgagcgttgctgcggacatcaaggccgcggtggattccatggtggggccgccggcgttctggttctgatcgaacagcttagatctatctgctagctcgatcgtcgatgcatggacggagtgaagaataataacgttacgtacgtacgtaccgcgcgatcgagaggagatcatcgatctctatccatccgacgtgtggtgcgtgcgtgcgtgctgctggttaagaataattaagtaagagtgtttgttattggctagctatagctagctttgtgaacgtaccctttattgtctgtgtgtgcagtgtgtgtgttgtaccgtcgttccgctagctctgtgtttgtttccttgatagcagctttgtgtttgtatatatgtgtgtcgtgtttaattaatatttatatatgctgtcatttgtcatacata

SEQ ID NO: 13264 - DNA, 1962 bp, Zea Mays
ctgtcaaagctccaacgccattggtgaacgaatctcaaggaggtacgtagacagagacagacgccgcaagctcgcgttcgcagtgccagtcaaactggtggtgagcaagttggacttttcagtcagtggccttgttggctctcttcctctccggttggttcttggttcagatatcgggggtgggtcttcgtcttcccctgcctcgcctctgcttcactgcaggtggtcgaagaagaagaaggccctcgatctcctgccctccactccaccagagccggtgcgatcccggtcccgaccgacctcagcacagcatgttcgtggtcgaggacaagggcggcgccatcgcgctgatgctggcgtcgctgctgttcctgggcacgtggccggccgtgctgacgctgctggagcgccgaggccggctgccgcagcacacgtacctggactactccgtcacgaacctcctcgcggccgtgctcatcgcgctcaccttcggccagctcgggggcgccaggcgcggcatgcccaacttcctcacgcagctcggccagcccaactggccttccgtgctgttcgccatggccggaggcgtcgtgctcagcgtcgggaacctctccacccagtacgcttgggcctacgtcggtctctccgtcaccgaggtcgtcagctccagcatggtggtcgtcattggcacgacgctgaactacttcctggacaaccgcatcaacagggcagagattctgtttcccggcgtggcatgcttccttgttgctgtcatccttggctctgctgtccacgcctccaacgcagctgacaacgaggagaagctcagtgcctccacaaatgcctaccagcttggtaggacagctggggctgcggaaccaagcaagcatgtcctagacaaagacaaaaaaaaatctctgatttcagatgttgccaaggacttggagaatggagtctctggaacaaagcaagctgacaaagcggaggcaggcaccgcagaatacctcattcaactcgaagagcggcggtcaatcaaggtattcggttcaaacacgttcatcggtctggggatcgtgttcttcgcgggggcgtgcttctcgctcttctccccggcgttcaacctggcaaccaacgaccagtggcgcacgctcaggggcggcgtgccgcacctggtggtctacaccgccttcttctacttctccgtcgcgtgcttcgccgtcggcgtcggcctcaacgtgctgttcctctaccgccccatggccggggtgcccaggtcctcccctcggggcctacctcggggactgggacggccggcactgggcgctcctcgccggcctgctctgcggcttcggcaacggcctccagttcacgggcgggcaggccgcgggctacgccgccgccgacgcggtccaggcgctgccgctcgtcagcaccttctggggcgtactgctctttggggagtaccgcaagtcgtcgcggaagacgtacctcctgctcggcttcatgctcttcatgttcgtcgccgccgtcgccgtgctcatggcttcgtcaggtcacaggaccacagagtgatcctggtcctgtcagtcaggctgtcacgccctaacatgcatgaaatcttcggtacaaaggaatggagatgtacataaaaatgtttctgttgtgattgatcaggtatatagcaccatataaaaattaaagctatttatattctttccaaagacaacaactggctgatactccaatagtgttgttctcggccttttgggctgtttagttggtaggaactaatttttagtccctatattttattttattttagtctctaaattgttaaatacgaaaactaaaatagagttttagtttccacgtttggtagtttggcaatttaaggactaaaatgaaataaaatagagtggctaaaaattagttcctataaaccaaacatcaacttagtctttg

SEQ ID NO: 13265 - DNA, 1301 bp, Zea Mays
ttcttcacgcgtgtctctctctccctggtgcctgctcgcgacaagctcctgctcccttccgtggtcgcgtgctcagctcttctgcaggccgcgcccagcttctcaccctcgacgctcacagctctctctctcccctagtccctgccatggccgccgttccctgatcggagtttgttctagctcggatctcctccctacggcgcacgagctccatggctgctgcgttcttcagccgacgcgtcctgccgagtccctctccatccccacggcgtccagccatggcgccccagctcgcggcgtccctattttttttcctgtcgtcggcgctctgctcgctctctggtcttcctgcgcgctctccactcggcttctgcttattccaatgccgcgcatggtgcttcggctagccgtggccgcgcgctgtgaagctcccagcgtcgtgtccccgagctcccaaccatggcgcttcttccagccgcgccgtcgccttgctactcgcccatccttgcggcatttcgtccatgcccactgtcccccgtcgagtccctgcgcgcgcagctgcagctcggattggtccctgatttactgtactgtgaagtctctgcgctccgtgcgtgtcgctcgccgagttgctgcctggtgtcgcgcctattgcttctctgcgcgcgagctcttctactggcgtccctgctcgcctcactttccatggacgagcgctcgtttcgccgttgctctagctgccgcgctgcgctgttcttagtcgtccggccctgtgtgcttcagtggatgttcgtcgagtcccctgcgtcacgtcctgttctttgcgtgcgcaagctatctgttggccgcgcgcgaagctatcttttcgtcgtcatcgcgtcgtcgactccgtcggttagcgtcgtcgcgtcgcgggtgcagctctatatacgtcacccactttgtcgtcgtcgttccacgcgtcagcaagaaatctcaaacgtcgggtgaagacggagccagcagcgtggtattcatcgagtgcgcgacaaaaaagttcatgtgacacctgccaagcgctcgccaaattgttggaatcggaaaatcactaccgatctcgcgaattcaagtcatatattagaacggtacgttaaataatcacgtgatgcgaaggaccaaagctgagtcgaccccaagatgctgttaagcgtgggctaatccgcatggtgatgctgatggacagatgaagcaagtaacagaacaaaagatggtcgccaagtgatcgtcgtctaacaacactaacctagtgttacccaggcaag

SEQ ID NO: 13266 - DNA, 1576 bp, Zea Mays
atccttgagagtcttttctttagtcgggtaagtcttgctgagtaattccatactcagggttttattccctgttgtttttcaggatataactttgtgctgctgtgatggtgttaagtgccggtgggctcggccttcttatataagtataccccgtctttatcatcttactgagtatggtcatttgagctagcatatatttcaaacttatacttttgtaatcactccgataaaataatataaaatttttgtaacttgtaaaatttggtaataagatttccgctgcaaaaacattggtgtgtgtgatttgtgttacttaatcccgcggttctggttgtaagtggtttatccgatgtccttggggcaatcggacagatcctgttaagttatctggtgcacatgcatagcagtctgaggtctttgagacaaggacaggtgcatgtgggccaataacttgggaggttctgccacatatctcaatgcccaaaaccacatatagcactagcaagtactacccaaaaagttcagtggtaaacaaggcataaagatagacaaactagggtaacctattgggtcccatcaaaattaacctatgcagatcattatgattaatcataacatggttgggtaaaagaagtgatcaagggcacaacttgcctgggacttgagattccaggtaccagggtgattcttcaggtgactcgaatcctcgcgctagtcgtagcaatacaaacaaacatgatatggataaaattaacatcacaccaaacataagaacaaactgaataataataatctacgcgttggtacgagactaacgaaacttgaacggatcaaattggagctaaaacggaggagttatgattttctgaagattctatgtgttttgtacaagattaaatgggatataaattctaatgtgactttcatatcaaaacagtggtattagatgatagacaataatattacaaaattataggaattggaacgaattaatttgggcttaatatgaattttctatgaattacccaagttttataattatttttatactcaaaatcaatttctaaatctattttctggtttcatttaattcctggactgggcctcaatttccaggaaaagtcaagggctaaactacaaactttcccagactcagtgaacaacccgagtggacggcgggttaattcaccgaaatccgaggggctctttagaaaaatatccgggccgaaggggtacgggtcaatatggaacgtccgattaggccacaacggcccggattaaattatcctatcacacgaaccggtacgtgattcaggtcgatggatctaggatcaaaggtcaggattttaaacggtcgcgattcgatcggagacgtccatggtcagatcatcggccatcaccaatcctaccctgaaatggtatatacgtctgatctcgaccgtagattagtatctaacggccctgcgcccttcttcctcccaccagagaacatccccggcggcagactacgcaccgcggcggcgccatgaccttggcacagcgcccgcgatcccaggtggccaagcacagatccgaa

SEQ ID NO: 13267 - DNA, 1065 bp, Zea Mays
ccccaacggccgagtggcagcttcgggtggcgaaggatccgcgtagagggggtagcgggccacggaaggctgcccaagttgttacgggaccgaaggaatcgcagccacgagcaccgagcatggcggcctcggaagcggtcttcggttgacggaggaagaataccgcgccgcgcgcccaagcctaggttgctgctgtcccgggggtcccactccacagaggtcacgggtgcatggagtgtgcggagacggacacccaggaggtcgacccgaggaatcccgcaatggtgacccgattccccacggcgccgcgtatctcggattgctctattgcgagggagaagatcgatagcgccgttgccgcagagactgacaagttaaccccacaggccataggctcagcgcgtttgagcggacaagtaaccacggccccgtggtgactgcccagctggagggaacgcaataatgggccgcgagaaagggaattcggcccagggtaaggtttgttattttctattttcatttgttttattttgaatttcctttggtaattccaaacctgatattggaactaaaatttgatttgtagatttatcacatattatattgctcaattaaaagtatcaattttgaagatatatttaaattttatactccttctccacatttatagagttccctttaatataattttacttttattcatattattattgttttaaaatgcacaaacaaaatccaatatgatgcaatgatttatttgtgtcttggtaattaatgatttactcatttttagacatgagtagccacatgtgatgataaatggagatacacatatatttcaaaggaaacaattcctccttttattcacccttataatttggttattacacctgcgctgccgttcgccgcgccggagtcgagcaccacaccacgatgtcgaacccacccgagccaccgcgtcatgatcccgacgatcctccccactgccctgccctcgccgaaccccctacgcgtggtcagcccgaagaagctgatttcgtggtagaagaatcgaatacgttcgag

SEQ ID NO: 13268 - DNA, 1321 bp, Zea Mays
gaatagcaaggatcgaatggacagctgattgcttgagcccatcggacggccgcgtggctcccaggagccctatatcaccatccttgcccaccgcctcccctcatcaccagcgtccgccaccgccgccgcctttcgtaccgcggcccctaaacccctttcctcgttcccctccgtctctcaggcacaatgatgctagctaataagcttggtggtctgctcaagaatgctacgagttcaaatatgtctgtctaccaagcaatcagatgcatgtcatcatccaagctttttgttggagggctttcttatggaaccgatgatcacagtctcagagacgagtttgccaaatatggacaagttattgaagctaagattatccttgatcgtgagtctgggaggtccagaggttttggctttataacttacacgtcttctgaggaggcttcggctgccatcactgccatggatggaaagactctggatggacggaacatacgggttaatcatgctaacgagaggacaggtggcttccgcagcagcggtggttatggtggtggcggctatggtggtggtggtggtggctatggtggcggtggctatggtggcggctatggtggtggtagcggtggctatggcggcggcggcagtggtgactatggtggcggcagcggtggatatggtggcaactacggcgacagggctggtggtggctatggtggtggtggtgattatggagttgcaggtggggctgaaggcagttttgctgctggaggtagcgacagctttggcagcagtaactttgctgacagtggttttggtgaaaaccctgctggtagctttggcgcaatgggtggttccagtggcgctgatgggttctctgccggcacacctggtgacggtaacaagaatgatgaaatcatggatgatctcttcaaggacgatgagcctgacagctacgccaacaagaggagctaatttgtgtccaccaccaccatgcgaggccgtgtggattctaggccatatgtattcggtagtgttttctgttaacatgataggtgtctgatgtctaaataatggaacgagtccttttgttgagtttgagttgtggaactttcaaagcgtgcgttgcatgctggcgcttgtgccggcaaacatggcatactttcatgttatattgttatttgctagtacctgtgtgccttggtgggagtcgatctggcttacaaatggggtcttgtccgagaattgccagcagaccgtgtagactgcactgttgccggtcgtgcggcagaactgcagtaagacattatgcagcagtttatcc

SEQ ID NO: 13269 - DNA, 970 bp, Zea Mays
aacgacgatgaaatcaatacctgagggtgtgcaacgcaagctcctcctccacctccaccctctaaaataagacgttgcagccaaccaggggaggccctccgcggtccgtggctccgtgccatcctctcctgggcagcgagcagtggtggccgcgggttcccccgcctcgtcctcccggatccggcgacgaagattaattgaataacttcgataagatgggtcgtggtattagcagtgggggtggtcagagttccttgggctatctctttggcagtgacgaagctccaaaatcatttgagaagcctgcaccagttcaaaagccaactcctccatcctctgcagagagactaaaagatatcgctgctggtattcaaagtagtaaatcaaacaattacaaaagatctgaaggccagaactgtggaaatttccttacgattgcggctgaaaatgcacaaaggcaaaatctctaccttgaaatatttgtacatttgcggatattagctgttgtgggatgctgcaggaccgtccgtcgaccaaggtgcaagcagctccaggtggcgactcttcactcggttatctttttagtggcagcaaagatggcaagtgatgtacacctgctgttagtgttcgccatgatcatgggagaaggtttctgcttaacaaaggaaaaagggaaaagaatcttgtattcccatgagtaaatatcaaactgctcatggtatctatgttgttgggattgcttgtatgtgtgtacatgttcgtgtgtgtcgtgtgttgatccacagctactggtagcaagagcttctatccctgctgatggaattgtgcgcaatgccaatgttgacattatcgtgggtgatgctattatgttgtggtgtattattggatatgtttgctgtttaatacacattgttgtagaaaaaaacatccacagttctgttcaatttcagagtgtcctgttcaattttca

SEQ ID NO: 13270 - DNA, 755 bp, Zea Mays
gtcaaatctgccccaccgacaccttcaatcaatcatgcagccacttaattaggcttctaacatattaattgaataacttcgataagatgggtcgtggtattagcagtgggggtggtcagagttccttgggctatctctttggcagtgacgaagctccaaaatcatttgagaagcctgcaccagttcaaaagccaactcctccatcctctgcagagagactaaaagatatcgctgctggtattcaaagtagtaaatcaaacaattacaaaagatctgaaggccagaactgtggaaatttccttacggaccgtccgtcgaccaaggtgcaagcagctccaggtggcgactcttcactcggttatctttttagtggcagcaaagatggcaagtgatgtacacctgctgttagtgttcgccatgatcatgggagaaggtttctgcttaacaaaggaaaaagggaaaagaatcttgtattcccatgagtaaatatcaaactgctcatggtatctatgttgttgggattgcttgtatgtgtgtacatgttcgtgtgtgtcgtgtgttgatccacagctactggtagcaagagcttctatccctgctgatggaattgtgcgcaatgccaatgttgacattatcgtgggtgatgctattatgttgtggtgtattattggatatgtttgctgtttaatacacattgttgtagaaaaaaacatccacagttctgttcaatttcagagtgtcctgttcaattttca

SEQ ID NO: 13271 - DNA, 734 bp, Zea Mays
tggcatcgttggccggaagccatggatggagactgatttgctattaattgaataacttcgataagatgggtcgtggtattagcagtgggggtggtcagagttccttgggctatctctttggcagtgacgaagctccaaaatcatttgagaagcctgcaccagttcaaaagccaactcctccatcctctgcagagagactaaaagatatcgctgctggtattcaaagtagtaaatcaaacaattacaaaagatctgaaggccagaactgtggaaatttccttacggaccgtccgtcgaccaaggtgcaagcagctccaggtggcgactcttcactcggttatctttttagtggcagcaaagatggcaagtgatgtacacctgctgttagtgttcgccatgatcatgggagaaggtttctgcttaacaaaggaaaaagggaaaagaatcttgtattcccatgagtaaatatcaaactgctcatggtatctatgttgttgggattgcttgtatgtgtgtacatgttcgtgtgtgtcgtgtgttgatccacagctactggtagcaagagcttctatccctgctgatggaattgtgcgcaatgccaatgttgacattatcgtgggtgatgctattatgttgtggtgtattattggatatgtttgctgtttaatacacattgttgtagaaaaaaacatccacagttctgttcaatttcagagtgtcctgttcaattttca

SEQ ID NO: 13272 - DNA, 769 bp, Zea Mays
cttgacgtggtcccacgacgcgagccctggctggtgcttcggccttctgtcagttgaggcctatgctgcttctgcagattaattgaataacttcgataagatgggtcgtggtattagcagtgggggtggtcagagttccttgggctatctctttggcagtgacgaagctccaaaatcatttgagaagcctgcaccagttcaaaagccaactcctccatcctctgcagagagactaaaagatatcgctgctggtattcaaagtagtaaatcaaacaattacaaaagatctgaaggccagaactgtggaaatttccttacggaccgtccgtcgaccaaggtgcaagcagctccaggtggcgactcttcactcggttatctttttagtggcagcaaagatggcaagtgatgtacacctgctgttagtgttcgccatgatcatgggagaaggtttctgcttaacaaaggaaaaagggaaaagaatcttgtattcccatgagtaaatatcaaactgctcatggtatctatgttgttgggattgcttgtatgtgtgtacatgttcgtgtgtgtcgtgtgttgatccacagctactggtagcaagagcttctatccctgctgatggaattgtgcgcaatgccaatgttgacattatcgtgggtgatgctattatgttgtggtgtattattggatatgtttgctgtttaatacacattgttgtagaaaaaaacatccacagttctgttcaatttcagagtgtcctgttcaattttca

SEQ ID NO: 13273 - DNA, 756 bp, Zea Mays
gtgtgttggggacgcccttaggaaatcgagtcacactagatgctgacaacagaacagctctacgattaattgaataacttcgataagatgggtcgtggtattagcagtgggggtggtcagagttccttgggctatctctttggcagtgacgaagctccaaaatcatttgagaagcctgcaccagttcaaaagccaactcctccatcctctgcagagagactaaaagatatcgctgctggtattcaaagtagtaaatcaaacaattacaaaagatctgaaggccagaactgtggaaatttccttacggaccgtccgtcgaccaaggtgcaagcagctccaggtggcgactcttcactcggttatctttttagtggcagcaaagatggcaagtgatgtacacctgctgttagtgttcgccatgatcatgggagaaggtttctgcttaacaaaggaaaaagggaaaagaatcttgtattcccatgagtaaatatcaaactgctcatggtatctatgttgttgggattgcttgtatgtgtgtacatgttcgtgtgtgtcgtgtgttgatccacagctactggtagcaagagcttctatccctgctgatggaattgtgcgcaatgccaatgttgacattatcgtgggtgatgctattatgttgtggtgtattattggatatgtttgctgtttaatacacattgttgtagaaaaaaacatccacagttctgttcaatttcagagtgtcctgttcaattttca

SEQ ID NO: 13274 - DNA, 1615 bp, Zea Mays
ccctgcgtgtgcgtgctgcgtgctgctactatatataaattgcaagcaagctaggcaggcaggctagcccagcgctcggccctcggctccttaaggcttcatcttctcaagttccggccgtccatcgccgccgccggcctcggccggctcagttcctgcctgccagccaaaaattccacaccacccacccagagactgaggcgcgcggtggtgaagacgtgatcgaaagtcgaaaccaaaacgatatatagatggggcgcgggcgcggcaaggtggaggtgcgtcgcatcgagaacagcgtgagccggcaggtgaccttctcgaagcggcggcgcgggctggcgaagaaggcgcgggagctggccgtgctctgcgacgccgacgtcgcgctgctcgtcttctccgacaagggcaggctccacgacttcgccgcgcacggcaggaatctcatgggggagcagctcgagtccctgacgttcagagaggtacagcagcttgagcaccggatagacagcgctctgaggaacgtcagatccaggaaggtacatgtcacatgcacgctgattgtactacaaacatacaggagcactgttaactgttactcgcatcgcacgtcagtgctcacagtcacagtgcaagtttttttttttttttttttttttttgtttccaggaccacatcttgctcaactcgatccaggagctccggaacaaggcaagcatgccaaataaagaatttaccttaacatcgtcaaaaacataacatttttttattcggttgcaaagtggctagtagaatgttgatccattttctagatttctgattagttcttcagattctttattatcgcttcattgttttggttgttctcattgtttttatttgtaagaggtggcgcagtaacaggaagttctgtacttttggatcccaccttgcaggaaacttttctgatggaacaaaatggcattctagagaaggagaaggctgcagtgggggcatcatcatccctgcacaccaccaccagcaccgcagcagcttcttccacggcagcggcggcggcggcccttccaaacctgaacatctgtcccgacgactccgacgagccaggaatggcggcggcggcggggatcaggttgccgtggtggatgctccagccatctgccgtcagccaacggcaggaacagcactgaactgcttgtcttctcagatgatccacgctgcttgttccagctcgattctagtttctattagaactcgattcagctaaggcgggaatttgtgatctttctattgatctgccgttcttattggttgctagatcgattttatccttgtccttcttagtatctgaacctctgctgtgtcgtttgtcgtagttcttggtcgcaaaagctccggtttgcgtctctagtttggtttggttcctgtaaaatctgctgttgtccttcaatgagctgtgcaggccagttagatgattacttccactaacactatgacagacaattaggcccgagaaggcccaggctgcctttggcatatggatcaaatttgggctccgatggcccaacttttgataaattcgagctagtccatctgggctcatttttcagaaaat

SEQ ID NO: 13275 - DNA, 744 bp, Zea Mays
cgcaaataaacctcaacttaacaccagtgacaccgatggattcttactaaactcatcatgcgcataaccatttaatctctaattggtactaaggtataattcaacattccaagagacatgcaagcttttgtttacttcaaattttcactaactcttcttataattataaaatgagtgttattttagcaccatatgaaattatctaatttggggctgacatttttatgaggcataggtaataacaatttatgactaaggtataaatttcacatacccaggttttatattttatttactacaaaaataataaattgtcaatgcaataaagcatgtgagagcaagttaaatctaaaactaattattttctgtagatgcattaccatattgagttttcttaggctactataatatcatgcaaggacagtggaacaccattttacatttttgcatctattcatcatttttaaattatttaaaactacttaaggtgcattaaacaagttaaatcactaacttaatcatacatgcacaagaattcatgaaattattaccagtcaccaaacatcacaccaagagtctactgtaaaaatttcaacctatttggagcaccagagctacagatccaaaaataacaattaaaacaatcatctttttcctatttaacatgttttaattaacacaccaagaaaacagtgaacaacatgtaagttttatatttttcctagatgaggtatgacaacatct

SEQ ID NO: 13276 - DNA, 851 bp, Zea Mays
aggcccatacatcccttgcctctttctcctcccccgcatctgcttctttctctccacgccaacccgacaccgcgcggtcggctcggctcggccatccccgccagctcccgctcgagatcccagcgccatgacgatcggcgtcgctctcttgctcgacctcacctcccgcctgccccgcgccggggcatccgccgcctccgcagccgtccgctcccaccccggtctctctaccaccgccttcgccgcgactgccgcggccgcgttgtcgtcctccggggtgccgctctccgcgcgccacctcttcggttttcatgggtttactgttgctcattgtgatgctggcacacctgctggatggaatgatggttctgatgatcttgttaatgagattaataccaagattattgattccttgcaatatgcaagaaaagactacttccagaacacaacaaaggaatacccttcagagctgaagccactcttttctgcctttgggttgaaaaattttactatcacaaccctaaggtctttcctattatattatttgccactcatacaacctaaacctcacactggttctgatgatgaggatgatgatctgcttcatgacactcaagagaaaaccatggatctggttactcccttctacaattcagtaaagcaaatcgtgcgggagacttctattgtaacgaccagacgagtatttgaaaggattgtagttcgtcatgtttcacaaagaacagcatggaaacttctcaaagcggctctcgcatgagtggagtctagagaaggaatgaccgagcctgaaatttgcttccacggaaatttgaactcaagaccttaggagtgtt

SEQ ID NO: 13277 - DNA, 1438 bp, Zea Mays
ctcacacgagtgttgggctggcgcacacgcaagccacgtcgcggcccagtagtcacagattcagttttcatgggtttactgttgctcattgtgatgctggcacacctgctggatggaatgatggttctgatgatcttgttaatgagattaataccaagattattgattccttgcaatatgcaagaaaagactacttccagaacacaacaaaggaatacccttcagagctgaagccactcttttctgcctttgggttgaaaaattttactatcacaaccctaaggtctttcctattatattatttgccactcatacaacctaaacctcacactggttctgatgatgaggatgatgatctgcttcatgacactcaagagaaaaccatggatctggttactcccttctacaattcagtaaagcaaatcgtgcgggagacttctattgtaacgaccagacgagtatttgaaaggattgtagttcgtcatgtttcacaaagaacagcatggaaacttctcaaagatgcttcaaaatcatcaaaaaggaaagctgcaagggggatgccaactccacagtacacatactgtgttgccagaacaactttccgagcacatgcactgggaataaccgctgcttgggtagtgcaatccataattgaagtatacagatgtttcatccgtaagcctagtgaggactgtgaagcactatcaagcgacggcaatgaacagtttgacgatatgaataaattcagattgtttgggaggaagatttatgggattaccatcaaaagttgtttctctttggttttggcctcagctggagcaggcattggtgccctcgtgcatccagtgcatggacaatggttgggttgtgccttgggagatgttgcaggtccaattatcgctataattgtttttaagaagatgcagctaccactatgagagactggatttttggcgaccactggttttgggtcccttgtgcaagtcatggccttcagtcttctgtgtggttggagatccctgatctaacttgaaagttcacagttgatgaataacagctttcacctcagtgctcgtagttttgtagctccctttacaagatgccttcgggtcttgtgggacatgagcatgtacttttgcagttttgctaaattttgtactgtctcagatttgaaggatccaaacaagaaatttaattttactagatttgaaaggaattggtttgagaagtaaactccatatctatggcgccttccgtgatagtacctctcatcaaccgtttaggttatctgagttcctatctcattctatctcacatcctgttgaaaactttattctacaaatagcactatttacaatataaaggattgttttgcatgaacatttatacgcaccatctgctgctggatacagccttagactgagacattgaaaaaaac

SEQ ID NO: 13278 - DNA, 1445 bp, Zea Mays
ggaacaatgcgcttcaactgggacacgtgaaacaccggatggatggttgaagtagaaggcagctccaatttttttcatgggtttactgttgctcattgtgatgctggcacacctgctggatggaatgatggttctgatgatcttgttaatgagattaataccaagattattgattccttgcaatatgcaagaaaagactacttccagaacacaacaaaggaatacccttcagagctgaagccactcttttctgcctttgggttgaaaaattttactatcacaaccctaaggtctttcctattatattatttgccactcatacaacctaaacctcacactggttctgatgatgaggatgatgatctgcttcatgacactcaagagaaaaccatggatctggttactcccttctacaattcagtaaagcaaatcgtgcgggagacttctattgtaacgaccagacgagtatttgaaaggattgtagttcgtcatgtttcacaaagaacagcatggaaacttctcaaagatgcttcaaaatcatcaaaaaggaaagctgcaagggggatgccaactccacagtacacatactgtgttgccagaacaactttccgagcacatgcactgggaataaccgctgcttgggtagtgcaatccataattgaagtatacagatgtttcatccgtaagcctagtgaggactgtgaagcactatcaagcgacggcaatgaacagtttgacgatatgaataaattcagattgtttgggaggaagatttatgggattaccatcaaaagttgtttctctttggttttggcctcagctggagcaggcattggtgccctcgtgcatccagtgcatggacaatggttgggttgtgccttgggagatgttgcaggtccaattatcgctataattgtttttaagaagatgcagctaccactatgagagactggatttttggcgaccactggttttgggtcccttgtgcaagtcatggccttcagtcttctgtgtggttggagatccctgatctaacttgaaagttcacagttgatgaataacagctttcacctcagtgctcgtagttttgtagctccctttacaagatgccttcgggtcttgtgggacatgagcatgtacttttgcagttttgctaaattttgtactgtctcagatttgaaggatccaaacaagaaatttaattttactagatttgaaaggaattggtttgagaagtaaactccatatctatggcgccttccgtgatagtacctctcatcaaccgtttaggttatctgagttcctatctcattctatctcacatcctgttgaaaactttattctacaaatagcactatttacaatataaaggattgttttgcatgaacatttatacgcaccatctgctgctggatacagccttagactgagacattgaaaaaaac

SEQ ID NO: 13279 - DNA, 1496 bp, Zea Mays
atttatacattatatgtttggtttcacagcacacatctgattatggtcacaattgctcttgccctaaatttacatcattgtaaatttggaagttgtgtgatgctggcagagcgaaaattcccttttcatgggtttactgttgctcattgtgatgctggcacacctgctggatggaatgatggttctgatgatcttgttaatgagattaataccaagattattgattccttgcaatatgcaagaaaagactacttccagaacacaacaaaggaatacccttcagagctgaagccactcttttctgcctttgggttgaaaaattttactatcacaaccctaaggtctttcctattatattatttgccactcatacaacctaaacctcacactggttctgatgatgaggatgatgatctgcttcatgacactcaagagaaaaccatggatctggttactcccttctacaattcagtaaagcaaatcgtgcgggagacttctattgtaacgaccagacgagtatttgaaaggattgtagttcgtcatgtttcacaaagaacagcatggaaacttctcaaagatgcttcaaaatcatcaaaaaggaaagctgcaagggggatgccaactccacagtacacatactgtgttgccagaacaactttccgagcacatgcactgggaataaccgctgcttgggtagtgcaatccataattgaagtatacagatgtttcatccgtaagcctagtgaggactgtgaagcactatcaagcgacggcaatgaacagtttgacgatatgaataaattcagattgtttgggaggaagatttatgggattaccatcaaaagttgtttctctttggttttggcctcagctggagcaggcattggtgccctcgtgcatccagtgcatggacaatggttgggttgtgccttgggagatgttgcaggtccaattatcgctataattgtttttaagaagatgcagctaccactatgagagactggatttttggcgaccactggttttgggtcccttgtgcaagtcatggccttcagtcttctgtgtggttggagatccctgatctaacttgaaagttcacagttgatgaataacagctttcacctcagtgctcgtagttttgtagctccctttacaagatgccttcgggtcttgtgggacatgagcatgtacttttgcagttttgctaaattttgtactgtctcagatttgaaggatccaaacaagaaatttaattttactagatttgaaaggaattggtttgagaagtaaactccatatctatggcgccttccgtgatagtacctctcatcaaccgtttaggttatctgagttcctatctcattctatctcacatcctgttgaaaactttattctacaaatagcactatttacaatataaaggattgttttgcatgaacatttatacgcaccatctgctgctggatacagccttagactgagacattgaaaaaaac

SEQ ID NO: 13280 - DNA, 947 bp, Zea Mays
agtggagtctagagaaggaatgaccgagatgcttcaaaatcatcaaaaaggaaagctgcaagggggatgccaactccacagtacacatactgtgttgccagaacaactttccgagcacatgcactgggaataaccgctgcttgggtagtgcaatccataattgaagtatacagatgtttcatccgtaagcctagtgaggactgtgaagcactatcaagcgacggcaatgaacagtttgacgatatgaataaattcagattgtttgggaggaagatttatgggattaccatcaaaagttgtttctctttggttttggcctcagctggagcaggcattggtgccctcgtgcatccagtgcatggacaatggttgggttgtgccttgggagatgttgcaggtccaattatcgctataattgtttttaagaagatgcagctaccactatgagagactggatttttggcgaccactggttttgggtcccttgtgcaagtcatggccttcagtcttctgtgtggttggagatccctgatctaacttgaaagttcacagttgatgaataacagctttcacctcagtgctcgtagttttgtagctccctttacaagatgccttcgggtcttgtgggacatgagcatgtacttttgcagttttgctaaattttgtactgtctcagatttgaaggatccaaacaagaaatttaattttactagatttgaaaggaattggtttgagaagtaaactccatatctatggcgccttccgtgatagtacctctcatcaaccgtttaggttatctgagttcctatctcattctatctcacatcctgttgaaaactttattctacaaatagcactatttacaatataaaggattgttttgcatgaacatttatacgcaccatctgctgctggatacagccttagactgagacattgaaaaaaac

SEQ ID NO: 13281 - DNA, 968 bp, Zea Mays
aaagggaaaagttgaaatcgtttatttccatcccctcctcccttatctcccgcgctctgctcctcccagtcccagactcccatcctcgtctccgccatggccgccgtcggcatcccctcccctccggcgccacacgtcttcgcgcccgccgcatctccttcctcctccacgtactccacactggccccccgccgtctccgcctctccacccgactcggactcgccgccgccgcggcgtcgtgccgtacgcggtgcgccgccgctgccgatggcggggccgcggcctcggagggtgcctctgcggtggcggagctggagggggaccccgacgctggcacagacgttgccggaggcgccgcgacctccacgcggccgccctactcgctcatctccgcggacaacgtgcagaaggcgatgcgcggcctcgcaattacagatgctgaccactatgggaggcttggagtcaccaggctagcttctactgatgaggaatcatttactatactatcaaccgaggaagaacgaagattatatgattggagcttgtcaagaagtggacagcctgagcgatatgtctggccatttgaagttgatccattggagttggcaccagatcctccaaaggaaccagaagatgagttcccaaccaagctcgttggctacttcttactggcgtggttcatactctctgttggcctctcggtggccctcaacaaatgaagattttctccccaaaagaacatgaattgtaatccaataatctctctgccatgtacatcaatgacgctgttgtgtgcacagaagcatatggatgtacatgccatgctcttggcaattagccgaaacatataacaacacgttctgcacagattgaagtcgtgaatcttgtgcctggagttttcacaatcctgaattaagtatatgcccattttcaaacaaaacacatactactggacctgcagttcttt

SEQ ID NO: 13282 - DNA, 2311 bp, Zea Mays
atgcagccgttccaacttccttccaaattccaacgagagtccagtctaccagcctccaacactgaggacaaagcgaaaagaaaaaggggaaaaggggctggtgcgcaaaaccctagcacagtcgcatccatcatggcgatgtccatcttcggcggctgcgtcggcggcgactccggtgcgctcatcgcgccgtccgcgtcctcgctccgcccgccgttccgtcttgtcgctggtcccaaggttcggactcctgctcggctgctccccgtcccataaaccctagcatttatttagtttatcctgcgtgtttgaggtggaattagtacgagtatgcggctttcgattggctcgggaggcccagttttctgcggggagatgctccggtaggctgctggaagtccgccgtgcggttgttactcttcggcgtttgtgcatgcctctgaaggtccgatgggtgggtgaggctgcctcgtgtcagtctgacgaatgtgcgaagtgcatttttatgttgattggtaggctaaatgttcaagtgcatcttaggaactgggaatggaggaattaatttgacaagacaaaatagagatttagtgcccacattggtgtgaggtaggcccatggaacacttgcatttctggaaaacgttaaggccctctttgagtttgcttgccccaaacgtttattagccccaaatgttgaagccccaagcaaaataataaatgtttaaggcaagcaaaataatgacctgttgcgacctttcacttcaagccgtctgtctgttttcgtttggttcgtccggggtttgccatgggaagtcggagccaccggctgcttttcaatctagcttggaagcgatgactcatggcagttatgtgtgctcttacgcgtcgtgttggtgggttagcccttcgtgtgttcagtgtttgctccacgttgggctaccttcttgtatttgttagattttgggcccggtttttccttaaaacagggttaattccattcttaattgagaggcggaccattacgttcaaaaaaaggtttgccaaaccctaccggaggggagaagctctttttttttgtactaggttggtgaagccacctaaatgtggctgctccagattctgtcttcttagattagttgtttgcaaagaagcccgaccaaacatggcctaaggattacctgtacttttagatctgcatttttcctagatttgacattttattattttgcttgccccaacattcttgggatgtacgttttttggattctaaatatctgggttgatatgtaagcatcatgtcatagaaaagaggtgtcgtgtactgattgtcctaccatgaataagtgccctgtatttgatttttaggtgaaaggatcttctcgtcatgtttttatgtgttggcttatatgtgcagcttttgtatcccatttgatggttctgcccaaactcaaagtcaaccactttgtctcctttcgtattggtcttctccatagcaatcagttatcagtatatgtgatgtgtaggctaattgctaatgtattgtaaaaaaatatagagtttagtctgacaaagtacctgtaattttaaattggcagtggtttgattcctatatttcacatgggttccctaagcttgtgaggtcggtgtgtttgttatagtgctagcaatattagccttgcttaataataccagactgtctgatttccatgtctaggtttgcttggtactggccgatttttgggctgttctttattttccttccctttgttctgcctccatctcctatagtatggttatctcgtttcatactttgcaaatatcagtattactgacactatccaaaccggatgattccttcttttctttcattgacatgtttttcatagtacagtactacatggtagatctagagggtatgttgttggataggtagttagaaaagaggaaaatctgtatgtataatattgtgtatcatgttcctttcaatttctttgatataaacctcaagttaagcatcgtttgttttcagtgctgaaatgagaaattgcaacatgagagtagactggctttgtcattaagatttataagagaactgaggctaactttgtgcatatatgatgcattcactcgatcaaatgtggtttgtttccgccctgtagttatgttatcattgctctattaggtgtctttctgttcattcattcgatcaaatgtggtttgtttcatgtgcatatttcttcagtttacagaaggcctgaatgtatgcttactcatgcaataactcaacatacatgtgtgtgtatttaaac

SEQ ID NO: 13283 - DNA, 743 bp, Zea Mays
tttcctcagctcagtctatcattccattgtctggtcatttgtccccggccggcacgtaataatcaccactatggccagcggacggagaaagagcggcattccagctctggggtggtggctcatggcagtcggcaccatccgctccgccatcgtgtggtcctgcctcttcagttctgcatcgctctgcttggccgtctaccccgagagagcgagctatggctgcgtggactctgctatcctgcacgctctgcttcctgtgcgcgttcaacatggacagcaagccgctctacgtggccaccttcatgtccttcgtctacgtcgccggctacctgctcgtggagtgcttcttctaccacagcgtccatgcagccagtatcgctccgtactgcttcatcgcagggacatccatggtttggatgctgcttcaatggaactcccatggccgtggccgccgtccccgtgaggctagcaagcagccctgatccaacctctggttcttttgccatcgatgtgattggggcggtctactatacagacgatgaataaattatttatttacaaaaaaatgtattatatatataagatgcacaccgagttccgtacgttgttgctgttgacttgttgaatgtaagaagtgacgactagaatgggtgtcgtctaagttgagttgtattgtgtcgtagcatcttgatataaccctataatctgttgttggaaaaaaatgtttgctcagtcacatcgcc

SEQ ID NO: 13284 - DNA, 1512 bp, Zea Mays
accagttccgcagaataaacgagcgtgcaagcgctgctgggctggtgtcagtcacctgagcaaggaagagagatggccacgctgcctcgcgagggcgccgcggcggcggactccgaccagcttttggtagaagcacatggctctacacgaacgctgattttgaataggccaaagcagctcaatgcactctcctctgaaatgattaaaggtctcctatggtatttcacagcttttgagaaagatgatggagtcagattgttgattatgaaggaaactggaaatgggtcgatgatttcttccaaaatgaatatttgctaaattacatcattgcgacttacataaaacctcaggtttccattcttagtggaattgtcatgggtggaggagctggtgtttcaatacatggaagatttcgagttgccactgataacacgatttttgcaatgccagaaacagctctaggcctctttccagatgtaggggcctcttattttctatctcggctaccagggttctatggagaatatgttggtctaactggtgccagattggatggtgcggaaatgcttgcctgtggcctggcaactcattttgtcccgtcaaagaggttgccattgcttgaggaatcgcttaaaaagctggacacgtccagtacttttgctgtgtcgggtattatcgaccagttttcacagaggccattagtgaaagatagcagctctttaaataggatggaaaccatcaacaaatgcttctccaaaaggacagttgaagaaatcatagatgctcttgaacaagaaatctcaaatgtttcagacaaatgggttgctgcaacaatcaagtccctgaaaaaggcttcccccaccagcctaaaaatttctctgagatcgataagagaagggagaacacaaactcttggggagtgcctgcgtcgggaatatagagtggtttgccatgtcctgcgtggcaccttcagccgagacttgtctgagggatttagggctgtgctactagaaaaagacaacaagccagagtggattcctccaaggttggaacaagttcctgacgaggcagttgagcaatatttcttgagaattgatgatccccagtgggaagatctgaacctgcctgcgagacttccccaccgaagaaatattgagtccaagatttgattgaggtcttggacgaagagtgagcctcggtcaggataactcgtcaactcatgtttgaagttgtgtgcggaatgttgacgacgattgataaataataaacgcggactgaatatatgtcttataagttcacgtttatcgctaaataatttttgttgcttttgtgtgaagttgtacctgttagccttgttcggttacagggatgaaattctaccatagatataattcgggtctagattggatgaatcgatacctcacccaatcatatggtaagattaaatccatcatttaatacatacacctcccaaaactagttattcttttcatttatggattctaatataaa

SEQ ID NO: 13285 - DNA, 1616 bp, Zea Mays
accagttccgcagaataaacgagcgtgcaagcgctgctgggctggtgtcagtcacctgagcaaggaagagagatggccacgctgcctcgcgagggcgccgcggcggcggactccgaccagcttttggtagaagcacatggctctacacgaacgctgattttgaataggccaaagcagctcaatgcactctcctctgaaatgattaaaggtctcctatggtatttcacagcttttgagaaagatgatggagtcagattgttgattatgaaggggaatagaagagtattttgctctggaggtgatattgctcaatgtgcccggtgtttatataatggaaactggaaatgggtcgatgatttcttccaaaatgaatatttgctaaattacatcattgcgacttacataaaacctcaggtttccattcttagtggaattgtcatgggtggaggagctggtgtttcaatacatggaagatttcgagttgccactgataacacgatttttgcaatgccagaaacagctctaggcctctttccagatgtaggggcctcttattttctatctcggctaccagggttctatgattgtgttagctgatagactgttgacatatctttctccaggagaatatgttggtctaactggtgccagattggatggtgcggaaatgcttgcctgtggcctggcaactcattttgtcccgtcaaagaggttgccattgcttgaggaatcgcttaaaaagctggacacgtccagtacttttgctgtgtcgggtattatcgaccagttttcacagaggccattagtgaaagatagcagctctttaaataggatggaaaccatcaacaaatgcttctccaaaaggacagttgaagaaatcatagatgctcttgaacaagaaatctcaaatgtttcagacaaatgggttgctgcaacaatcaagtccctgaaaaaggcttcccccaccagcctaaaaatttctctgagatcgataagagaagggagaacacaaactcttggggagtgcctgcgtcgggaatatagagtggtttgccatgtcctgcgtggcaccttcagccgagacttgtctgagggatttagggctgtgctactagaaaaagacaacaagccagagtggattcctccaaggttggaacaagttcctgacgaggcagttgagcaatatttcttgagaattgatgatccccagtgggaagatctgaacctgcctgcgagacttccccaccgaagaaatattgagtccaagatttgattgaggtcttggacgaagagtgagcctcggtcaggataactcgtcaactcatgtttgaagttgtgtgcggaatgttgacgacgattgataaataataaacgcggactgaatatatgtcttataagttcacgtttatcgctaaataatttttgttgcttttgtgtgaagttgtacctgttagccttgttcggttacagggatgaaattctaccatagatataattcgggtctagattggatgaatcgatacctcacccaatcatatggtaagattaaatccatcatttaatacatacacctcccaaaactagttattcttttcatttatggattctaatataaa

SEQ ID NO: 13286 - DNA, 1542 bp, Zea Mays
gtgaaggaggccaatttgtggaaggagaggatgcgacaagcggtgattcgtgaaaggagcaggaggagtacgcgcgcggctccatgcttttggtagaagcacatggctctacacgaacgctgattttgaataggccaaagcagctcaatgcactctcctctgaaatgattaaaggtctcctatggtatttcacagcttttgagaaagatgatggagtcagattgttgattatgaaggggaatagaagagtattttgctctggaggtgatattgctcaatgtgcccggtgtttatataatggaaactggaaatgggtcgatgatttcttccaaaatgaatatttgctaaattacatcattgcgacttacataaaacctcaggtttccattcttagtggaattgtcatgggtggaggagctggtgtttcaatacatggaagatttcgagttgccactgataacacgatttttgcaatgccagaaacagctctaggcctctttccagatgtaggggcctcttattttctatctcggctaccagggttctatggagaatatgttggtctaactggtgccagattggatggtgcggaaatgcttgcctgtggcctggcaactcattttgtcccgtcaaagaggttgccattgcttgaggaatcgcttaaaaagctggacacgtccagtacttttgctgtgtcgggtattatcgaccagttttcacagaggccattagtgaaagatagcagctctttaaataggatggaaaccatcaacaaatgcttctccaaaaggacagttgaagaaatcatagatgctcttgaacaagaaatctcaaatgtttcagacaaatgggttgctgcaacaatcaagtccctgaaaaaggcttcccccaccagcctaaaaatttctctgagatcgataagagaagggagaacacaaactcttggggagtgcctgcgtcgggaatatagagtggtttgccatgtcctgcgtggcaccttcagccgagacttgtctgagggatttagggctgtgctactagaaaaagacaacaagccagagtggattcctccaaggttggaacaagttcctgacgaggcagttgagcaatatttcttgagaattgatgatccccagtgggaagatctgaacctgcctgcgagacttccccaccgaagaaatattgagtccaagatttgattgaggtcttggacgaagagtgagcctcggtcaggataactcgtcaactcatgtttgaagttgtgtgcggaatgttgacgacgattgataaataataaacgcggactgaatatatgtcttataagttcacgtttatcgctaaataatttttgttgcttttgtgtgaagttgtacctgttagccttgttcggttacagggatgaaattctaccatagatataattcgggtctagattggatgaatcgatacctcacccaatcatatggtaagattaaatccatcatttaatacatacacctcccaaaactagttattcttttcatttatggattctaatataaa

SEQ ID NO: 13287 - DNA, 593 bp, Zea Mays
gcaactgatatatcatcatgaagatgagcaatggccaatggacacacatgttcctatttctccagtatatttatgatcagagcccgcatatggtacaactcagcaacatgagtgggattaaatgaacaccaccaacaacaataacggcatcaaaactaagcaacacattacgaatttcataagcctttgtgaagacgaacaccagtgtctcggcgacctcagtatgaaatgaatggatttgtaacacaattgtgatacataatgattcatctggggtagtttccccatgttggcagcaaccatccttcggtaaaatctgggggtagtttctctccaaggtgagcgccttatgtccatccaatacaaatgagagaaaaaacatgcttggcctggttgtttccaactcatttgtacaggctgagtcccaggcccccaatatacagaacagtatgcctcttgatgctctcctatcctatgaccttcctgatgacataccagaggtggcatgtatctccaaggagtgctccggtatgtaagcaaggcctgcagggcaacaatcacttctcaagtcttaaaaggataaaaggtagatg

SEQ ID NO: 13288 - DNA, 1238 bp, Zea Mays
ctttgttgctcgtagctctctaccctttttcttttgctgctgcttgtctctcgttccttcttctgggtgctaggagtcgtcgtcttcttcttccacgggcacggataaaggagggagagcacacacatccgccatcgtcgctgcttcacgtacgacgagtattctgtattcatggagagccagggacagggagggaggaggcggcagatcccggcgttcgggaggtggaaccagcacagcgtcggcgacgaggtgcccatcacgcagtacttcgagtcggcagtacaggccagcctcctcgccaggcccggccactgctaccacgacgccggcgccggcgaggtgctgctgttccggtcgtccgcctcgccgcctccgcacaagccgcccaagaaggtgcggagcacgacggagtgtcacggtcaccaccagcaggttcaggttgaggaggtggggagcaggaggaggcagcagcagcggcggcggcaggagccgttgccgccgttcgtgtccggcgacgtgtcccgcgcggcgaggccgagggtcgttagggcggcggtggacgaggacctgtacaaggtcccttccgatatgctacgcaagaagaaagggaggaagcatgtgaggagcgtgtggatgggctgcgtgggcctcacctgcgtcgcctgacatgaccagtagtagcctttcttccacctttatcggatcgcgtggatggcaagaaagagagtccaagaggacgacgacccgaacccgaccacaagcatccaaaagccgaccccgaatgctagccgtttcagtccattcaatggtgatcgtcagtcaccaactcaccacgttgagcacagggatgcaagcaactcggtatactactgcaccacctcgtgctccatgcaccgtcgtcagtccgtcgcggctgagcttttgttccgccggacacagagatgcaagcccgtactgcacatcgtcgtggacaacacaagagctagtacgtacgtgatgcctgccgtctatccgatctgtggatgggtagctgatgagttcttcatcgtgtcattgcgcgcgcgcgcgagttgtccatatctatgtatgcattcttttagaaatggatttggcttcaatctgtttgggaccaatatcatcactcttggttatctgttaaggaaccgaaatagttaaattgataaaaccttctccccatgtcctctctattagattctatggcgtctaggatttct

SEQ ID NO: 13289 - DNA, 1241 bp, Zea Mays
ctttgttgctcgtagctctctaccctttttcttttgctgctgcttgtctctcgttccttcttctgggtgctaggagtcgtcgtcttcttcttccacgggcacggataaaggagggagagcacacacatccgccatcgtcgctgcttcacgtacgacgagtattctgtattcatggagcagagccagggacagggagggaggaggcggcagatcccggcgttcgggaggtggaaccagcacagcgtcggcgacgaggtgcccatcacgcagtacttcgagtcggcagtacaggccagcctcctcgccaggcccggccactgctaccacgacgccggcgccggcgaggtgctgctgttccggtcgtccgcctcgccgcctccgcacaagccgcccaagaaggtgcggagcacgacggagtgtcacggtcaccaccagcaggttcaggttgaggaggtggggagcaggaggaggcagcagcagcggcggcggcaggagccgttgccgccgttcgtgtccggcgacgtgtcccgcgcggcgaggccgagggtcgttagggcggcggtggacgaggacctgtacaaggtcccttccgatatgctacgcaagaagaaagggaggaagcatgtgaggagcgtgtggatgggctgcgtgggcctcacctgcgtcgcctgacatgaccagtagtagcctttcttccacctttatcggatcgcgtggatggcaagaaagagagtccaagaggacgacgacccgaacccgaccacaagcatccaaaagccgaccccgaatgctagccgtttcagtccattcaatggtgatcgtcagtcaccaactcaccacgttgagcacagggatgcaagcaactcggtatactactgcaccacctcgtgctccatgcaccgtcgtcagtccgtcgcggctgagcttttgttccgccggacacagagatgcaagcccgtactgcacatcgtcgtggacaacacaagagctagtacgtacgtgatgcctgccgtctatccgatctgtggatgggtagctgatgagttcttcatcgtgtcattgcgcgcgcgcgcgagttgtccatatctatgtatgcattcttttagaaatggatttggcttcaatctgtttgggaccaatatcatcactcttggttatctgttaaggaaccgaaatagttaaattgataaaaccttctccccatgtcctctctattagattctatggcgtctaggatttct

SEQ ID NO: 13290 - DNA, 3034 bp, Zea Mays
atgcggaagcttaacccagagacgatgaaattagagattggtggtggaaaagagattccaatcactgagcatagtgtttggtgtgttttgcaattaccaaacattggccgtgacccgccccccatgtctgatgcagatgctcgtgccttgcgggacgagctgggagagcaaatttgtggcaactcttatagacgcatatctggtatcaatctatctgttatcactgatcgactgcagaagaggattctcactggggagctgggcctgagagcctttttcatggctgcatttcagtgtctgctattctccaacactgacactcgcatcaggattgatgatgtaaagtatactcaggacatccagaacatggccaacaagaactggtgcaaagcggtagttgacaggctcaacatagctgctcgtctttataaaaaagattttgcggagaaaggcatcaacgcacccatcagtggatgcgggatcttcgtagctatgctttacgtcgacaacctgcaacatggatttgacacaagtcccttttcgatccctcgatgtaatttcttggactcgaagacgattgatgcgatagcaaataaggatctcaggggagatgttcctcctggcaccaccgagtttggacacctcaggctgagaagtatcgctgacatgtgctacggcgtccccattggtgctctagcaatattacatgctctagtaccaacacctgccctagtagcagaccctaacccaacagtagcacctaacccaggagcagcagcatctgccctagtagcagcaacacccactgctactggcacatctgctgatgtgcttggcacatcccatgatcccggcggtcatgcttccttcaatatccaacccccagtcttctaccagtaccctagcttcagttcttcttttggtcagagcattatcgatttagttggaaggagtaggaagtcagatgcgctgaacatcttgaaggcttttgatgaaagcactagggaagctcagtcgtacgcacagaaggctgccaagtattcaacaatatcccgcgaccttatggcaaaagctcaccacgagtgctacattggcattcagaagcttatcgctgacgctatcgctgagaagcgagctgccaaagagcgcaggaggaaggtgaacaatgacactagagcaggagcaggatcaggaactacttcaattgcatcggaggaccaatctggaggaggtgatagtgaagaaattatacggagtcccgttgcaattgacactagagcaggagcaggctgcgcccttctgcgcgtcgaccccaggccgcgccatctccctgcgcgacatcacccggccgcgccctcctctggccatggctccttcagatctgccaccccacccaccgtcgacgacaccactgcgctgaccgtagctaagcacgcgccctcgcccaagctctccaggcagagcaggaggcggccaccgctgcccaggagtgcgacgtggttgccgaacgcgttcgcgccgccctcgcacgcgctgattgtgctcgcgccctcgctgctcaggatgccactaatgacatcccgaacgacaacgacgctcagttccacatctctgagccaacagacccaacagtatgttcatggcactctacaaggacaggaaggtgccccactgcagcacaacctgcagaccgacgctctgcagggaggtatttcccaggttccctatggcatcctgggatagtcggccactccatattgggtgcccagtcccttcagcaccgtgtccctgactccgccccagcagatcggctggtacttcaacacaggtgcaacctcccacatgacctcaaacgccggtaccctatcaaacacttcaactccctctcttactacaccttcctccgtgattgtcggtgacggctcccttcttccagtcatttccactggctccaccactttacatgatttctgttcgccggtttaccactgataataattgttccattgaatttgatccctctggttgctctgtgaaggatatgttgtctcgaaacgtgatcgtcaggtgcaatagctccgggccgctataacccatgtgcctccctgctgcacacagcttcgtcgccagctccactccactttggcatcgtcgtcttggccatcctggtcacgagaccctatccaagctcgcatcagtcattgctatgtgtaataaggatgctagatccactttatgccatgcctgtcagttgagtcgtcgtgttcatcttccgttccgtacgtctacttctcgtgcggttaacaatttcgatctcattcgctgtgattcgtggacgtcccctattttaagtgtctcgggctacaaatattatttagtcattcttgataattactcccattacttatggacttttcctttacgcctgaaatcggatactttcccgaccctcactcagtttttcgcctatgtgaaaacacagtttggcatcaccattaaagatgtgcaatgtgacaatggacgtgtggtttccaacagactcaagggcatgattatgctgaaacttttgcaccagttgcccatatgactattgttcgtactttgattgcagttgagcctcatcctcttaaactctctcagatggatgtcaaaaatgtttttcttcatagtaatctgcatgaataagtttatttttttctcgaaaatgcatgagaactgcacctcaatatattaaagtcatgtttggaagcaacccagtttttaagaaaccagtttttattttttagctaggagaggctagcttcttggtttttaagaaactgtgaaaccaatttataaaaattgaggcataaactggtattttttggaaccaccttagtttccataaaccaatttcttaaaaattgggtggttcgaaagaggccctaagaagaagaaagaaataaaggtcaaagagacctgatacaaaggtctccttaaggaggccaaaaacacaaaaaaatccatcaaactcacccaagcaacaacctctagt

SEQ ID NO: 13291 - DNA, 2942 bp, Zea Mays
ctcaatgcaatattattagacgcattacaaacaatctctccttccttcactcaagcatgcaggagagctgcgtatctttgtattaagacataattctgtggataatataaaagaagattttatgcttcatcatattttctttgtactctagtggtgaaatactttttgaaataattatgtgatactgtaatatgggctttgcagtctactggagcaactggaatctattgagcaatctttgaatgagtctggcttagaagctctctcatcctttctgaaaaccaaaaagaatttagaccaactggaagatgcaaaagatttggatgaaaatggcggcgttcacgttttgctgaagaccttgctgtcattatcttatctaagatcaattctaatgaagggtctggaaagtggccttagaaatgatgctccagatagtgctattgcaatgcgacaaaagtggcgtctttgtgaaattgggcttgaggattattcgtttgtattgttaagtagatacatcaatgctcttgaagctttaggtggatcagcttcacttgcagagggtcttcctacaaatacaagtctatgggatgatgcccttgatgcccttatcattggcataaatcaagtttgcttttcaggttggaaaccaaatgagtgttctgcaatagtgaatgagcttctttcttggaagcagaaaggtctatctgaatttgaaggcaatgaggatggaaagtatatttgggcactgagactcaaagccactcttgatagaacaggaagactaacagaagaatactctgaagcacttctttcaatattccctgaaaaagtcaaggttgaaagaatagctcctggatcattgccgtcatccatgaaagaacctgtcgtgctagttgtaaacaaggcagatggagatgaagaggtcaaagctgctggggataacatagtgggcgttgttcttctacaagaattacctcacctatcacatcttggtgttagagctcgtcaagagaaagttgtatttgtaacttgtgaagacgatgacacgattaaaaacatgaggttacttgagggaaaacatgtcaggttgggtgcatcatccaataatgttgatctttcagttgtatcaaacaaagatgactgtgctgccatgtcttcagagccatccgctggaggagatctatttgcacagcaattctcactattgactacagacaagaagttagaattgtctgaggttaactttcttttgcctcaaatcatgtaatcaaagcatgccaatccaccacatcttgctaactacatgttacaacacatgtttttatacttgctcctactttttttcttttccctaactctaagggaccttcacttcagcaaaagagctatacttccgtagcaaatggtatgtctggtgtgctcgagctttcagaggcatcgattgaatcatctggtgcaaaagctgctgcatgtggaactctttcggttctttcctcaatgtcaaataaagtttacaatgaccaaggaactccagcagcattcagagttcctgcaggtgctgtgattccttttggatccatggaggacgccttgaagaaaagtggatcactcaaatcctacactaatcttctagagaggatcgaaacagctcaaattgaaaatggtgaacttgatagcctatcctcgaagcttcaagcaactgtttcacttctttctccatcggaagaaatcattgaatctttgaagaaaacatttgatcagaatgttcgactaattgtgagatctactgctaatgtggaggatttggctggaatgtctgctgctggactctatgaatcaattcctaatgtcagtctctctgaccctagatcctttggagctgcggttggacaggtttgggcatcattatacacaaggagagcaatccttagccgtcgagcagccggtgtacctcagagagacgcaaagatggcggttctcgtgcaggaaatgctgcagccagatctctcttttgtgcttcatacaattagcccagttgaccatgatcccaaattagtagaggctgaggttgcccctggtcttggagaaaccctcgcttctggtacccgtggcactccatggagactctcatgtcacaagcttgatggcaaagtcacaactctagcttttgcgaatttcagtgaagagcttatggtgctcaactctggccctaccgatggtgaaatgagtcgtaggaccgtagactacagcaagaagccgttatctgttgatgcaacctttagggagcagtttggtcagcgccttgccgccattggacagtatctggaacagaagtttggaagtgcccaagatgtggaaggttgcctggttggccccgatatatttatagttcagagcaggccacaaccacaataaacaaaaagttttgtgtggttacctggctagctgaataaaaatggatactggctgaagaaatatatggacttcgtagcacgcgtagcagtgatcgagtcttttttaatatgctatctcaggtaaaataataatttattggcacaggtttagccattcactaacttgtatcaattttgtgaactaaagaacttactattacatgtgggagccacatgctattctatttcgatggtacctattttttcgactgtttgaaaatctatatgacgtataggcctgtttgttttagcttcttggccgcttctgcccaccagaattggattctcgtaaacaaccgcccggcggccgaagcgattgtgggggagcagcctttcaaccgcagccgagaagcggctaagaggccgtggccgatggaagcggaaaggattcttcggagaacgttagtttgtgttcggtttgatttttgaccttggcttttttcccttaaaagctactaaaagccaaactaatataaaccagctttttat

SEQ ID NO: 13292 - DNA, 2859 bp, Zea Mays
ttttctttgtactctagtggtgaaatactttttgaaataattatgtgatactgtaatatgggctttgcagtctactggagcaactggaatctattgagcaatctttgaatgagtctggcttagaagctctctcatcctttctgaaaaccaaaaagaatttagaccaactggaagatgcaaaagatttggatgaaaatggcggcgttcacgttttgctgaagaccttgctgtcattatcttatctaagatcaattctaatgaagggtctggaaagtggccttagaaatgatgctccagatagtgctattgcaatgcgacaaaagtggcgtctttgtgaaattgggcttgaggattattcgtttgtattgttaagtagatacatcaatgctcttgaagctttaggtggatcagcttcacttgcagagggtcttcctacaaatacaagtctatgggatgatgcccttgatgcccttatcattggcataaatcaagtttgcttttcaggttggaaaccaaatgagtgttctgcaatagtgaatgagcttctttcttggaagcagaaaggtctatctgaatttgaaggcaatgaggatggaaagtatatttgggcactgagactcaaagccactcttgatagaacaggaagactaacagaagaatactctgaagcacttctttcaatattccctgaaaaagtcaaggttcttgggaaagcccttggaatacccgagaacagtgtcagaacatacactgaggctgaaattcgtgctaggtctcgaaactttgcactgtacttttaaaagcaactcgagcagttcttgggtcgtctgtgtgggatgttcttgttcctggagtggcccatggagccttgatacaggttgaaagaatagctcctggatcattgccgtcatccatgaaagaacctgtcgtgctagttgtaaacaaggcagatggagatgaagaggtcaaagctgctggggataacatagtgggcgttgttcttctacaagaattacctcacctatcacatcttggtgttagagctcgtcaagagaaagttgtatttgtaacttgtgaagacgatgacacgattaaaaacatgaggttacttgagggaaaacatgtcaggttgggtgcatcatccaataatgttgatctttcagttgtatcaaacaaagatgactgtgctgccatgtcttcagagccatccgctggaggagatctatttgcacagcaattctcactattgactacagacaagaagttagaattgtctgagggaccttcacttcagcaaaagagctatacttccgtagcaaatggtatgtctggtgtgctcgagctttcagaggcatcgattgaatcatctggtgcaaaagctgctgcatgtggaactctttcggttctttcctcaatgtcaaataaagtttacaatgaccaaggaactccagcagcattcagagttcctgcaggtgctgtgattccttttggatccatggaggacgccttgaagaaaagtggatcactcaaatcctacactaatcttctagagaggatcgaaacagctcaaattgaaaatggtgaacttgatagcctatcctcgaagcttcaagcaactgtttcacttctttctccatcggaagaaatcattgaatctttgaagaaaacatttgatcagaatgttcgactaattgtgagatctactgctaatgtggaggatttggctggaatgtctgctgctggactctatgaatcaattcctaatgtcagtctctctgaccctagatcctttggagctgcggttggacaggtttgggcatcattatacacaaggagagcaatccttagccgtcgagcagccggtgtacctcagagagacgcaaagatggcggttctcgtgcaggaaatgctgcagccagatctctcttttgtgcttcatacaattagcccagttgaccatgatcccaaattagtagaggctgaggttgcccctggtcttggagaaaccctcgcttctggtacccgtggcactccatggagactctcatgtcacaagcttgatggcaaagtcacaactctagcttttgcgaatttcagtgaagagcttatggtgctcaactctggccctaccgatggtgaaatgagtcgtaggaccgtagactacagcaagaagccgttatctgttgatgcaacctttagggagcagtttggtcagcgccttgccgccattggacagtatctggaacagaagtttggaagtgcccaagatgtggaaggttgcctggttggccccgatatatttatagttcagagcaggccacaaccacaataaacaaaaagttttgtgtggttacctggctagctgaataaaaatggatactggctgaagaaatatatggacttcgtagcacgcgtagcagtgatcgagtcttttttaatatgctatctcaggtaaaataataatttattggcacaggtttagccattcactaacttgtatcaattttgtgaactaaagaacttactattacatgtgggagccacatgctattctatttcgatggtacctattttttcgactgtttgaaaatctatatgacgtataggcctgtttgttttagcttcttggccgcttctgcccaccagaattggattctcgtaaacaaccgcccggcggccgaagcgattgtgggggagcagcctttcaaccgcagccgagaagcggctaagaggccgtggccgatggaagcggaaaggattcttcggagaacgttagtttgtgttcggtttgatttttgaccttggcttttttcccttaaaagctactaaaagccaaactaatataaaccagctttttat

SEQ ID NO: 13293 - DNA, 2795 bp, Zea Mays
ttttctttgtactctagtggtgaaatactttttgaaataattatgtgatactgtaatatgggctttgcagtctactggagcaactggaatctattgagcaatctttgaatgagtctggcttagaagctctctcatcctttctgaaaaccaaaaagaatttagaccaactggaagatgcaaaagatttggatgaaaatggcggcgttcacgttttgctgaagaccttgctgtcattatcttatctaagatcaattctaatgaagggtctggaaagtggccttagaaatgatgctccagatagtgctattgcaatgcgacaaaagtggcgtctttgtgaaattgggcttgaggattattcgtttgtattgttaagtagatacatcaatgctcttgaagctttaggtggatcagcttcacttgcagagggtcttcctacaaatacaagtctatgggatgatgcccttgatgcccttatcattggcataaatcaagtttgcttttcaggttggaaaccaaatgagtgttctgcaatagtgaatgagcttctttcttggaagcagaaaggtctatctgaatttgaaggcaatgaggatggaaagtatatttgggcactgagactcaaagccactcttgatagaacaggaagactaacagaagaatactctgaagcacttctttcaatattccctgaaaaagtcaaggttcttgggaaagcccttggaatacccgagaacagtgtcagaacatacactgaggctgaaattcgtgctagtgttatttttcaggtctcgaaactttgcactgtacttttaaaagcaactcgagcagttcttgggtcgtctgtgtgggatgttcttgttcctggagtggcccatggagccttgatacaggttgaaagaatagctcctggatcattgccgtcatccatgaaagaacctgtcgtgctagttgtaaacaaggcagatggagatgaagaggtcaaagctgctggggataacatagtgggcgttgttcttctacaagaattacctcacctatcacatcttggtgttagagctcgtcaagttgggtgcatcatccaataatgttgatctttcagttgtatcaaacaaagatgactgtgctgccatgtcttcagagccatccgctggaggagatctatttgcacagcaattctcactattgactacagacaagaagttagaattgtctgagggaccttcacttcagcaaaagagctatacttccgtagcaaatggtatgtctggtgtgctcgagctttcagaggcatcgattgaatcatctggtgcaaaagctgctgcatgtggaactctttcggttctttcctcaatgtcaaataaagtttacaatgaccaaggaactccagcagcattcagagttcctgcaggtgctgtgattccttttggatccatggaggacgccttgaagaaaagtggatcactcaaatcctacactaatcttctagagaggatcgaaacagctcaaattgaaaatggtgaacttgatagcctatcctcgaagcttcaagcaactgtttcacttctttctccatcggaagaaatcattgaatctttgaagaaaacatttgatcagaatgttcgactaattgtgagatctactgctaatgtggaggatttggctggaatgtctgctgctggactctatgaatcaattcctaatgtcagtctctctgaccctagatcctttggagctgcggttggacaggtttgggcatcattatacacaaggagagcaatccttagccgtcgagcagccggtgtacctcagagagacgcaaagatggcggttctcgtgcaggaaatgctgcagccagatctctcttttgtgcttcatacaattagcccagttgaccatgatcccaaattagtagaggctgaggttgcccctggtcttggagaaaccctcgcttctggtacccgtggcactccatggagactctcatgtcacaagcttgatggcaaagtcacaactctagcttttgcgaatttcagtgaagagcttatggtgctcaactctggccctaccgatggtgaaatgagtcgtaggaccgtagactacagcaagaagccgttatctgttgatgcaacctttagggagcagtttggtcagcgccttgccgccattggacagtatctggaacagaagtttggaagtgcccaagatgtggaaggttgcctggttggccccgatatatttatagttcagagcaggccacaaccacaataaacaaaaagttttgtgtggttacctggctagctgaataaaaatggatactggctgaagaaatatatggacttcgtagcacgcgtagcagtgatcgagtcttttttaatatgctatctcaggtaaaataataatttattggcacaggtttagccattcactaacttgtatcaattttgtgaactaaagaacttactattacatgtgggagccacatgctattctatttcgatggtacctattttttcgactgtttgaaaatctatatgacgtataggcctgtttgttttagcttcttggccgcttctgcccaccagaattggattctcgtaaacaaccgcccggcggccgaagcgattgtgggggagcagcctttcaaccgcagccgagaagcggctaagaggccgtggccgatggaagcggaaaggattcttcggagaacgttagtttgtgttcggtttgatttttgaccttggcttttttcccttaaaagctactaaaagccaaactaatataaaccagctttttat

SEQ ID NO: 13294 - DNA, 2872 bp, Zea Mays
ttttctttgtactctagtggtgaaatactttttgaaataattatgtgatactgtaatatgggctttgcagtctactggagcaactggaatctattgagcaatctttgaatgagtctggcttagaagctctctcatcctttctgaaaaccaaaaagaatttagaccaactggaagatgcaaaagatttggatgaaaatggcggcgttcacgttttgctgaagaccttgctgtcattatcttatctaagatcaattctaatgaagggtctggaaagtggccttagaaatgatgctccagatagtgctattgcaatgcgacaaaagtggcgtctttgtgaaattgggcttgaggattattcgtttgtattgttaagtagatacatcaatgctcttgaagctttaggtggatcagcttcacttgcagagggtcttcctacaaatacaagtctatgggatgatgcccttgatgcccttatcattggcataaatcaagtttgcttttcaggttggaaaccaaatgagtgttctgcaatagtgaatgagcttctttcttggaagcagaaaggtctatctgaatttgaaggcaatgaggatggaaagtatatttgggcactgagactcaaagccactcttgatagaacaggaagactaacagaagaatactctgaagcacttctttcaatattccctgaaaaagtcaaggttcttgggaaagcccttggaatacccgagaacagtgtcagaacatacactgaggctgaaattcgtgctagtgttatttttcaggtctcgaaactttgcactgtacttttaaaagcaactcgagcagttcttgggtcgtctgtgtgggatgttcttgttcctggagtggcccatggagccttgatacaggttgaaagaatagctcctggatcattgccgtcatccatgaaagaacctgtcgtgctagttgtaaacaaggcagatggagatgaagaggtcaaagctgctggggataacatagtgggcgttgttcttctacaagaattacctcacctatcacatcttggtgttagagctcgtcaagagaaagttgtatttgtaacttgtgaagacgatgacacgattaaaaacatgaggttacttgagggaaaacatgtcaggttgggtgcatcatccaataatgttgatctttcagttgtatcaaacaaagatgactgtgctgccatgtcttcagagccatccgctggaggagatctatttgcacagcaattctcactattgactacagacaagaagttagaattgtctgagggaccttcacttcagcaaaagagctatacttccgtagcaaatggtatgtctggtgtgctcgagctttcagaggcatcgattgaatcatctggtgcaaaagctgctgcatgtggaactctttcggttctttcctcaatgtcaaataaagtttacaatgaccaaggaactccagcagcattcagagttcctgcaggtgctgtgattccttttggatccatggaggacgccttgaagaaaagtggatcactcaaatcctacactaatcttctagagaggatcgaaacagctcaaattgaaaatggtgaacttgatagcctatcctcgaagcttcaagcaactgtttcacttctttctccatcggaagaaatcattgaatctttgaagaaaacatttgatcagaatgttcgactaattgtgagatctactgctaatgtggaggatttggctggaatgtctgctgctggactctatgaatcaattcctaatgtcagtctctctgaccctagatcctttggagctgcggttggacaggtttgggcatcattatacacaaggagagcaatccttagccgtcgagcagccggtgtacctcagagagacgcaaagatggcggttctcgtgcaggaaatgctgcagccagatctctcttttgtgcttcatacaattagcccagttgaccatgatcccaaattagtagaggctgaggttgcccctggtcttggagaaaccctcgcttctggtacccgtggcactccatggagactctcatgtcacaagcttgatggcaaagtcacaactctagcttttgcgaatttcagtgaagagcttatggtgctcaactctggccctaccgatggtgaaatgagtcgtaggaccgtagactacagcaagaagccgttatctgttgatgcaacctttagggagcagtttggtcagcgccttgccgccattggacagtatctggaacagaagtttggaagtgcccaagatgtggaaggttgcctggttggccccgatatatttatagttcagagcaggccacaaccacaataaacaaaaagttttgtgtggttacctggctagctgaataaaaatggatactggctgaagaaatatatggacttcgtagcacgcgtagcagtgatcgagtcttttttaatatgctatctcaggtaaaataataatttattggcacaggtttagccattcactaacttgtatcaattttgtgaactaaagaacttactattacatgtgggagccacatgctattctatttcgatggtacctattttttcgactgtttgaaaatctatatgacgtataggcctgtttgttttagcttcttggccgcttctgcccaccagaattggattctcgtaaacaaccgcccggcggccgaagcgattgtgggggagcagcctttcaaccgcagccgagaagcggctaagaggccgtggccgatggaagcggaaaggattcttcggagaacgttagtttgtgttcggtttgatttttgaccttggcttttttcccttaaaagctactaaaagccaaactaatataaaccagctttttat

SEQ ID NO: 13295 - DNA, 2780 bp, Zea Mays
ttttctttgtactctagtggtgaaatactttttgaaataattatgtgatactgtaatatgggctttgcagtctactggagcaactggaatctattgagcaatctttgaatgagtctggcttagaagctctctcatcctttctgaaaaccaaaaagaatttagaccaactggaagatgcaaaagatttggatgaaaatggcggcgttcacgttttgctgaagaccttgctgtcattatcttatctaagatcaattctaatgaagggtctggaaagtggccttagaaatgatgctccagatagtgctattgcaatgcgacaaaagtggcgtctttgtgaaattgggcttgaggattattcgtttgtattgttaagtagatacatcaatgctcttgaagctttaggtggatcagcttcacttgcagagggtcttcctacaaatacaagtctatgggatgatgcccttgatgcccttatcattggcataaatcaagtttgcttttcaggttggaaaccaaatgagtgttctgcaatagtgaatgagcttctttcttggaagcagaaaggtctatctgaatttgaaggcaatgaggatggaaagtatatttgggcactgagactcaaagccactcttgatagaacaggaagactaacagaagaatactctgaagcacttctttcaatattccctgaaaaagtcaaggttcttgggaaagcccttggaatacccgagaacagtgtcagaacatacactgaggctgaaattcgtgctagtgttatttttcaggtctcgaaactttgcactgtacttttaaaagcaactcgagcagttcttgggtcgtctgtgtgggatgttcttgttcctggagtggcccatggagccttgatacaggttgaaagaatagctcctggatcattgccgtcatccatgaaagaacctgtcgtgctagttgtaaacaaggcagatggagatgaagaggtcaaagctgctggggataacatagtgggcgttgttcttctacaagaattacctcacctatcacatcttggtgttagagctcgtcaagttgggtgcatcatccaataatgttgatctttcagttgtatcaaacaaagatgactgtgctgccatgtcttcagagccatccgctggaggagatctatttgcacagcaattctcactattgactacagacaagaagttagaattgtctgagcaaaagagctatacttccgtagcaaatggtatgtctggtgtgctcgagctttcagaggcatcgattgaatcatctggtgcaaaagctgctgcatgtggaactctttcggttctttcctcaatgtcaaataaagtttacaatgaccaaggaactccagcagcattcagagttcctgcaggtgctgtgattccttttggatccatggaggacgccttgaagaaaagtggatcactcaaatcctacactaatcttctagagaggatcgaaacagctcaaattgaaaatggtgaacttgatagcctatcctcgaagcttcaagcaactgtttcacttctttctccatcggaagaaatcattgaatctttgaagaaaacatttgatcagaatgttcgactaattgtgagatctactgctaatgtggaggatttggctggaatgtctgctgctggactctatgaatcaattcctaatgtcagtctctctgaccctagatcctttggagctgcggttggacaggtttgggcatcattatacacaaggagagcaatccttagccgtcgagcagccggtgtacctcagagagacgcaaagatggcggttctcgtgcaggaaatgctgcagccagatctctcttttgtgcttcatacaattagcccagttgaccatgatcccaaattagtagaggctgaggttgcccctggtcttggagaaaccctcgcttctggtacccgtggcactccatggagactctcatgtcacaagcttgatggcaaagtcacaactctagcttttgcgaatttcagtgaagagcttatggtgctcaactctggccctaccgatggtgaaatgagtcgtaggaccgtagactacagcaagaagccgttatctgttgatgcaacctttagggagcagtttggtcagcgccttgccgccattggacagtatctggaacagaagtttggaagtgcccaagatgtggaaggttgcctggttggccccgatatatttatagttcagagcaggccacaaccacaataaacaaaaagttttgtgtggttacctggctagctgaataaaaatggatactggctgaagaaatatatggacttcgtagcacgcgtagcagtgatcgagtcttttttaatatgctatctcaggtaaaataataatttattggcacaggtttagccattcactaacttgtatcaattttgtgaactaaagaacttactattacatgtgggagccacatgctattctatttcgatggtacctattttttcgactgtttgaaaatctatatgacgtataggcctgtttgttttagcttcttggccgcttctgcccaccagaattggattctcgtaaacaaccgcccggcggccgaagcgattgtgggggagcagcctttcaaccgcagccgagaagcggctaagaggccgtggccgatggaagcggaaaggattcttcggagaacgttagtttgtgttcggtttgatttttgaccttggcttttttcccttaaaagctactaaaagccaaactaatataaaccagctttttat

SEQ ID NO: 13296 - DNA, 2587 bp, Zea Mays
ttttctttgtactctagtggtgaaatactttttgaaataattatgtgatactgtaatatgggctttgcagtctactggagcaactggaatctattgagcaatctttgaatgagtctggcttagaagctctctcatcctttctgaaaaccaaaaagaatttagaccaactggaagatgcaaaagatttggatgaaaatggcggcgttcacgttttgctgaagaccttgctgtcattatcttatctaagatcaattctaatgaagggtctggaaagtggccttagaaatgatgctccagatagtgctattgcaatgcgacaaaagtggcgtctttgtgaaattgggcttgaggattattcgtttgtattgttaagtagatacatcaatgctcttgaagctttaggtggatcagcttcacttgcagagggtcttcctacaaatacaagtctatgggatgatgcccttgatgcccttatcattggcataaatcaagtttgcttttcaggttggaaaccaaatgagtgttctgcaatagtgaatgagcttctttcttggaagcagaaaggtctatctgaatttgaaggcaatgaggatggaaagtatatttgggcactgagactcaaagccactcttgatagaacaggaagactaacagaagaatactctgaagcacttctttcaatattccctgaaaaagtcaaggttcttgggaaagcccttggaatacccgagaacagtgtcagaacatacactgaggctgaaattcgtgctaggtctcgaaactttgcactgtacttttaaaagcaactcgagcagttcttgggtcgtctgtgtgggatgttcttgttcctggagtggcccatggagccttgatacaggttgaaagaatagctcctggatcattgccgtcatccatgaaagaacctgtcgtgctagttgtaaacaaggcagatggagatgaagaggtcaaagctgctggggataacatagtgggcgttgttcttctacaagaattacctcacctatcacatcttggtgttagagctcgtcaagttgggtgcatcatccaataatgttgatctttcagttgtatcaaacaaagatgactgtgctgccatgtcttcagagccatccgctggaggagatctatttgcacagcaattctcactattgactacagacaagaagttagaattgtctgagggaccttcacttcagcaaaagagctatacttccgtagcaaatggtatgtctggtgtgctcgagctttcagaggcatcgattgaatcatctggtgcaaaagctgctgcatgtggaactctttcggttctttcctcaatgtcaaataaagtttacaatgaccaaggaactccagcagcattcagagttcctgcaggtgctgtgattccttttggatccatggaggacgccttgaagaaaagtggatcactcaaatcctacactaatcttctagagaggatcgaaacagctcaaattgaaaatggtgaacttgatagcctatcctcgaagcttcaagcaactgtttcacttctttctccatcggaagaaatcattgaatctttgaagaaaacatttgatcagaatgttcgactaattgtgagatctactgctaatgtggaggatttggctggaatgtctgctgctggactctatgaatcaattcctaatgtcagtctctctgaccctagatcctttggagctgcggttggacaggtttgggcatcattatacacaaggagagcaatccttagccgtcgagcagccggtgtacctcagagagacgcaaagatggcggttctcgtgcaggaaatgctgcagccagatctctcttttgtgcttcatacaattagcccagttgaccatgatcccaaattagtagaggctgaggttgcccctggtcttggagaaaccctcgcttctggtacccgtggcactccatggagactctcatgtcacaagcttgatggcaaagtcacaactctagcttttgcgaatttcagtgaagagcttatggtgctcaactctggccctaccgatggtgaaatgagtcgtaggaccgtagactacagcaagaagccgttatctgttgatgcaacctttagggagcagtttggtcagcgccttgccgccattggacagtatctggaacagaagtttggaagtgcccaagatgtggaaggttgcctggttggccccgatatatttatagttcagagcaggccacaaccacaataaacaaaaagttttgtgtggttacctggctagctgaataaaaatggatactggctgaagaaatatatggacttcgtagcacgcgtagcagtgatcgagtcttttttaatatgctatctcagaattggattctcgtaaacaaccgcccggcggccgaagcgattgtgggggagcagcctttcaaccgcagccgagaagcggctaagaggccgtggccgatggaagcggaaaggattcttcggagaacgttagtttgtgttcggtttgatttttgaccttggcttttttcccttaaaagctactaaaagccaaactaatataaaccagctttttat

SEQ ID NO: 13297 - DNA, 7322 bp, Zea Mays
gaaaaaatgggaaaaaagagcccatacaggcgttagcgttacaggcccgtaccgccctcctctgtagtccttccctccgccactccgcggctatgcccagcaattcaaaagaaaccgaacacccttccggaaattccctcgggcaatggcgtcgggctcgtctcgcccccaaatcgaccagttcttcccggccaagaagcggaggccctcgtcgcggaagggcgagtcgccgcgacccgggacgcagcatgagagccccggcggcgccaaggggtccctggaagggtacctcgtccgttcgccttgcaaccgtgccgtggcagcggcatcggtggtccccgtgggctcgcccaggggcggggacccgggcgccaggcgtagcctctcggccgcaatggatgtcgacgtcggttcctcggcttcggtggctgcggcggcaggtgacggggcagactttgatctcaggaggagcacggcggatttcttgtcccattcctgcagtgctatcctgcctttgaggggtgactgtgattacagcgagcagtgccagatgaagcagaagcggagtgcgtcccagtcattcttggttccttgtgacaacgactatgtcaagaagcagcgagttgcccattgtggtggctttgaagctctaaaggaatctgttgagggggaacatataaaagttgggttttctctagcacctgtggaaaccctaaagtctgtatcgaggaattcccttacttcacctggtgaggagttctggaatgcagcaattgaactcgctgatgggatatctgcccaggctgataaggtccgtggaaggccagaatttgatgcagcagaagacaagtcatcttgtgcagtagcagcattctttaagactcttcctagatcaggaagggatgagcttgactgtcaaaacacagtaggcagcaatgatacacatcatatagagaaattgtcaaataaagttgaatcactggcagtaaactgtcagcatataattagctcacctttgcctgtgaagcagctagatttctttcatgaggatgatattaaagtttcaggttcaaaatttgaaacaaaaggcagctatgaaacttgtaatgcacaagcagaccgtgttccactgaaaggcagtggccgcctagaaaaggaaaatctcatggaccctgtggatgtgttgaagagaagtgctattaatttgcacactgattctgcagccatgagatgtcagggtgttttcaagtcaacaactgaagggaaggttcatccaactcaagaggctgaaagagattctaatcttattaggagagatctcaatcagccaacccacaatgaaaataaatcacttgctgcatattcaaataatcgcaagacttggatagattccaagagtaaagttgcttctcaggaagtggaagctagcacacctactagctccattcctctaaaggatcactcaaagatatcaagttggcttcctcctgacctttgtgctatatacatgaaaaaaggcatttcagagctgtacccttggcaggttgaatgtttacttgtagaaggtgtcttgggcaaaaggaatcttgtgtattgtgcatccacgagtgctggtaaaagttttgttgctgaagttctgatgttgaggcagatactgtcaactgggaatatggcaattcttgtccttccctatgtgtcaatatgcgctgaaaaggctgaacatcttgaacaacttcttgagccactgggtaggcatgtccgtagcttctacggaaaccaggggggaggctcacttcctaaagatacagcagttgctgtatgtaccatagagaaggcaaactctttggtaaacaagttgttggaggatggccgcctctctgaacttggtgtaattgtcatagatgaacttcatatggttggtgaccaacatagaggatatcttttagagctgatgttgacaaagcttcgatatgctgctggtgaagggactttacagtcatgtagcggagaagtttcaagttctagcagtgggaagattgcaagtcatgggttgcagataattggtatgagtgctactatgcccaacatcgctgcggtggctgattggcttcaagctgctctttatcaaactgactttcgaccagttccactggaggaattcataaaagttggtaatcaaatatttgataaagacatgaacgttgttcgtgtccttcccaaagtagctgaccatggtggcaaggatccagatcatattgttgaattgtgtaatgaggttgttcttcagggccattctgtgcttttgttttgctccagtcgtaaaggctgcgaatcaactgcaaggcatgttgccaagttcttgaaactaccctctgttggaacaactgatgttagttcggagttttcagatgctgcagctgctattgaggccttgaggaggtgccctgctggattggatccaatattgggagaaacccttccttttggtgttgcatatcatcatgctggtcttacggtcgaggagagggagattgtggaatcatgctaccgtaaaggccttgtccgtgttctgactgccacttcaactttagctgctggtgttaacttgcctgctagacgggttatattcaggcagcccaagataggtcgtgattttattgatgggactcgctatagacagatggctggtcgtgctggtcgaactggaatagacacaaaaggagaaagtatacttgtatgcaggcctgaagaggtcaagagagttacaggtattattagaagcaattgccctcccttggagtcctgcctctcagaagataaaaatggaatgactcatgcaattatggaggttgttgctggtgggattgttcaaactgcaaatgatattcatcgttatgtgcggtgtacgctgcttaattccacaagaccttttgatgatgtcgtgaagtcagctcaagactcccttcgttggttatgccataaaagctttcttgagtggaaccatgagaccaagatatactccgctactccccttggtagagctgcttttggaagttcactcaaccctgaggaatcattggttgttcttgatgatctttcgagggcaagagaaggctttgttctggcatctgatttacatttagtttacttggtcacacccataaatgtagaccttgaacctgattgggaattatattacgagaaattcatgcaactttcttctcttgagcagtcagtaggcaatcgggttggagtaattgaacccttcttgatgcacatggctcatggggcgtcgataccttttcgtgcaaggcctgagagaaacaccgggttaagtaacaagtctgcacaagctgctggaaatactcttgttagtgagcacacaatcagagtgtctaagcgcttttatgtggctttaatgttatcgaggcttgctcaggagattcctattgctgatgtttgtgagacatttaaggtcgccagaggtatgattcaggcactgcaggaaaatgctggcaggtttgcttcaatggtttctgcattttgtcaaaggcttggttggaatgatttagaaggccttgtttcgaaattccaaaatcgtgtctcttttggagttagggcagagattgcagaactgacatcaattccatttgtcaagggttcacgtgcaagggctttgtacaagtctggtctgcgtactcctgttgccattgctgaagcatctattcctgaaattgcaaaagctctttttgaatcttctgcttggtctgggcaaggtgattctggtttacgacgaatgcaatttggtgtagcaaaaaaaataaaaaatggagcccgcaaaattgtcctggaggaggcagaagccgccagagtagcagcattctcagctttcaagtcacttggtgtggaagttccccagttcactgcacctccactcgcagctattgaggaatatccaactcacgataccatagaccaagctaagttaaataagctagcttctggtacccattctagagatgataaaaatatgaatacttgctctgattatgctactccaagggcttctacatacagtctaagaaaggacacaagtcctgctccttccattcaaatgaaagagaatgcaggactatctaaaaatgtgcaaatcactagacagggagcatcatcatctttgtcaacagaaattgctgatggatctagtagagatgtggctgaaaaaggtcctgtccatgcatataacttcccagggggatttgattgttttcttgatcaatggtccacagctagtaattttttctttgatgttcattttatcaagagatcgatgaaaccatctttgaacctttttgaagtttttgggttggctgtctgttgggaaaaatctcccatatactactgcaacttcccaaaagatctagtcactactggcaacaataacatcaaggaaatgtggggtaattttcagagaagatgggaaaaaatagcggacattatgaaacaaaagagtgtccaaaaaatgacatggaatttaaagatccagatccaggcacttaaatcaccttatatttcttgccaacggcttgaaaggtttcatcttgaccataaaatgctggacaaagttgaagtgcttaacaactcatatatgttgttatcaccagtctctgtctacaatggattggatatatgtctgctggcgtgggttctatggccagatgaggaaagcagagcggttccaaatcttgagaagtttgtcaagaggcgacttcatagtcaagaagctgctgctgcaaatcgcgatggaagatggagaaatcagatgcacaaagcagcacacaatggctgctgtagacgtgctgcacagacacgggctttgtatactgttctgaagaaattacttactcaaaatctttctgttttggttgaaacaatcgaggccccattggttaatgttcttgctgatatggagctttggggaattggcgctgacatggatgcttgtctccgtgcgaggcatattataacaaaaaagctgaaggaactagagaaagaagcttacagattggcaggcaagaatttctctctaaatgctactgctgatatcgcagacattctatatacacacctaaaattgccagttccaaaaggctgtgagaaagggaagctgcatcctagcactgacaagcagtctttggaccacctaagggatcaacaccccattatcccattaattaaggaacacagaacattagcaaaactgttaaatggcacgttgtggtccatttgttcacgtgctcaattgtgcactcaatcacaaaggtacatcatacatggaaattggcttcagacgtcaactgccactggccgtttgtccatggaggagccaaatctgcagtgtgttgagcatgtggtggaattcgatacagggaaaagcgataaagattactcaagcatttcagttgatgatcatcataaaatcaatgcccgtgattttttcatacctaccaaggagaactggttattcataactgctgattactcacagattgagttgcgtttaatggctcacttttctaaagatcatatgttggttgaacttctaaagaaacctgatggtgatgtttttaccatgattgcttcaagatgggctgagaaagaagaggccttgatttcttccaaagagagagaaaacactaaaagattcatatatggcatcctttatggaatgggtgcaaactcccttgcagaacaacttcagtgcagcactgaggaagctgcacagaaaattcaaagctttaggagattttttcctggtgtttcctcatggttacatgaagttgtgttatcctgtcgccaaaaaggatttgttgagactttattaggccggcgacgtgttcttacaaaaataacggctggcaatagcaaagagaaagctaaagcacagaggcaagcagtaaattctatttgccagggttctgctgctgatattattaaggtggctatgattagagttcattcaataattactaacagaactagtgcagctgattccacagatgaagttacaaggaaattttcagaacttggtggccagtgtcaccttattttgcaggtgcatgatgagttggtattagaagttgatccgtgcatggtagcacaggctggaaggttgttacagatatgtatggaagaagcagcttcactattggtacctttgcgcacaaagataaaggtgggaaaaacttggggttcactagaaccattccatcctgagccttgtttgatgcaaatggtgaatgtcagttggatgccaatgtttcatgacatgcaaggtcctggaagaaggctgaacaatttccaatatgcccccacaggggaccttggtgattctgtctggtgttcttcggtagaaccttcattgctatgtctacagtcttctgtcattgctgaccgtatgtgaaatcaacgcaacagcgaccagctccattactgaggatttgctatggactggtgattatcattatgattccatgtggcatgcaagaagcatatatatatcaccaatagatgctgttaaagggtttaaggtgtatttgaaaggtcttcctagttatactgcgaatcttttagataaacccttaagaaattggagggcctagtatatggtgatttttcttttgctaggcccagcgctaaaaaaccgattatggggtttattcaaagatgaaatttcatcctgtaactacaggttcaaggtgtatttggtttgatggatatcactatggacaagcgatggttggtttttgtacaagttggatgttgataaaaatgttggtatccatgccacacaaaaaaagcctaaccagcacccatattttgtaatccttgtcaagtatgttatatggtttacttgatagctctagcgaggctatccagtacctcaccttcaccctcatatttgtaatccttgtccacataattattagtatgttatatggttatttagtaattacgatggaaatattatttttggtaagcgcaaatatgcatgtttcgtatatcatttagggaaatacatttgttgtaattagtgttatgataacaaaattagtattggtgcatatttattagtgtataaatgttattatttttagataatatagatgtagttagttaattgttctttaccatctaaaaaatggtttatcctatttatcctatcacatagcaatatggattgttggaaatggaaatcctaaccctacttaggacggacacttgtatatatatagtgaactatacatggggttgggtcaaag

SEQ ID NO: 13298 - DNA, 6019 bp, Zea Mays
cccttccggaaattccctcgggcaatggcgtcgggctcgtctcgcccccaaatcgaccagttcttcccggccaagaagcggaggccctcgtcgcggaagggcgagtcgccgcgacccgggacgcagcatgagagccccggcggcgccaaggggtccctggaagggtacctcgtccgttcgccttgcaaccgtgccgtggcagcggcatcggtggtccccgtgggctcgcccaggggcggggacccgggcgccaggcgtagcctctcggccgcaatggatgtcgacgtcggttcctcggcttcggtggctgcggcggcaggtgacggggcagactttgatctcaggaggagcacggcggatttcttgtcccattcctgcagtgctatcctgcctttgaggggtgactgtgattacagcgagcagtgccagatgaagcagaagcggagtgcgtcccagtcattcttggttccttgtgacaacgactatgtcaagaagcagcgagttgcccattgtggtggctttgaagctctaaaggagttagatgataatgtagcttccatgaagcaatgcatcaatcaccatggtggctcagaggctgtggaggaatctgttgagggggaacatgtgagttgtgttgggttttcggccttgcaaagatgtagctttaccccaagtactgcacagataaaagttgggttttctctagcacctgtggaaaccctaaagtctgtatcgaggaattcccttacttcacctggtgaggagttctggaatgcagcaattgaactcgctgatgggatatctgcccaggctgataaggtccgtggaaggccagaatttgatgcagcagaagacaagtcatcttgtgcagtagcagcattctttaagactcttcctagatcaggaagggatgagcttgactgtcaaaacacagtaggcagcaatgatacacatcatatagagaaattgtcaaataaagttgaatcactggcagtaaactgtcagcatataattagctcacctttgcctgtgaagcagctagatttctttcatgaggatgatattaaagtttcaggttcaaaatttgaaacaaaaggcagctatgaaacttgtaatgcacaagcagaccgtgttccactgaaaggcagtggccgcctagaaaaggaaaatctcatggaccctgtggatgtgttgaagagaagtgctattaatttgcacactgattctgcagccatgagatgtcagggtgttttcaagtcaacaactgaagggaaggttcatccaactcaagaggctgaaagagattctaatcttattaggagagatctcaatcagccaacccacaatgaaaataaatcacttgctgcatattcaaataatcgcaagacttggatagattccaagagtaaagttgcttctcaggaagtggaagctagcacacctactagctccattcctctaaaggatcactcaaagatatcaagttggcttcctcctgacctttgtgctatatacatgaaaaaaggcatttcagagctgtacccttggcaggttgaatgtttacttgtagaaggtgtcttgggcaaaaggaatcttgtgtattgtgcatccacgagtgctggtaaaagttttgttgctgaagttctgatgttgaggcagatactgtcaactgggaatatggcaattcttgtccttccctatgtgtcaatatgcgctgaaaaggctgaacatcttgaacaacttcttgagccactgggtaggcatgtccgtagcttctacggaaaccaggggggaggctcacttcctaaagatacagcagttgctgtatgtaccatagagaaggcaaactctttggtaaacaagttgttggaggatggccgcctctctgaacttggtgtaattgtcatagatgaacttcatatggttggtgaccaacatagaggatatcttttagagctgatgttgacaaagcttcgatatgctgctggtgaagggactttacagtcatgtagcggagaagtttcaagttctagcagtgggaagattgcaagtcatgggttgcagataattggtatgagtgctactatgcccaacatcgctgcggtggctgattggcttcaagctgctctttatcaaactgactttcgaccagttccactggaggaattcataaaagttggtaatcaaatatttgataaagacatgaacgttgttcgtgtccttcccaaagtagctgaccatggtggcaaggatccagatcatattgttgaattgtgtaatgaggttgttcttcagggccattctgtgcttttgttttgctccagtcgtaaaggctgcgaatcaactgcaaggcatgttgccaagttcttgaaactaccctctgttggaacaactgatgttagttcggagttttcagatgctgcagctgctattgaggccttgaggaggtgccctgctggattggatccaatattgggagaaacccttccttttggtgttgcatatcatcatgctggtcttacggtcgaggagagggagattgtggaatcatgctaccgtaaaggccttgtccgtgttctgactgccacttcaactttagctgctggtgttaacttgcctgctagacgggttatattcaggcagcccaagataggtcgtgattttattgatgggactcgctatagacagatggctggtcgtgctggtcgaactggaatagacacaaaaggagaaagtatacttgtatgcaggcctgaagaggtcaagagagttacaggtattattagaagcaattgccctcccttggagtcctgcctctcagaagataaaaatggaatgactcatgcaattatggaggttgttgctggtgggattgttcaaactgcaaatgatattcatcgttatgtgcggtgtacgctgcttaattccacaagaccttttgatgatgtcgtgaagtcagctcaagactcccttcgttggttatgccataaaagctttcttgagtggaaccatgagaccaagatatactccgctactccccttggtagagctgcttttggaagttcactcaaccctgaggaatcattggttgttcttgatgatctttcgagggcaagagaaggctttgttctggcatctgatttacatttagtttacttggtcacacccataaatgtagaccttgaacctgattgggaattatattacgagaaattcatgcaactttcttctcttgagcagtcagtaggcaatcgggttggagtaattgaacccttcttgatgcacatggctcatggggcgtcgataccttttcgtgcaaggcctgagagaaacaccgggttaagtaacaagtctgcacaagctgctggaaatactcttgttagtgagcacacaatcagagtgtctaagcgcttttatgtggctttaatgttatcgaggcttgctcaggagattcctattgctgatgtttgtgagacatttaaggtcgccagaggtatgattcaggcactgcaggaaaatgctggcaggtttgcttcaatggtttctgcattttgtcaaaggcttggttggaatgatttagaaggccttgtttcgaaattccaaaatcgtgtctcttttggagttagggcagagattgcagaactgacatcaattccatttgtcaaggtgtgctttaattaccatgcatatatgaattatctaagtgtctctggatcttatttcagtatggtcatgtaaaatatgaaatagggttcacgtgcaagggctttgtacaagtctggtctgcgtactcctgttgccattgctgaagcatctattcctgaaattgcaaaagctctttttgaatcttctgcttggtctgggcaaggtgattctggtttacgacgaatgcaatttggtgtagcaaaaaaaataaaaaatggagcccgcaaaattgtcctggaggaggcagaagccgccagagtagcagcattctcagctttcaagtcacttggtgtggaagttccccagttcactgcacctccactcgcagctattgaggaatatccaactcacgataccatagaccaagctaagttaaataagctagcttctggtacccattctagagatgataaaaatatgaatacttgctctgattatgctactccaagggcttctacatacagtctaagaaaggacacaagtcctgctccttccattcaaatgaaagagaatgcaggactatctaaaaatgtgcaaatcactagacagggagcatcatcatctttgtcaacagaaattgctgatggatctagtagagatgtggctgaaaaaggtcctgtccatgcatataacttcccagggggatttgattgttttcttgatcaatggtccacagctagtaattttttctttgatgttcattttatcaagagatcgatgaaaccatctttgaacctttttgaagtttttgggttggctgtctgttgggaaaaatctcccatatactactgcaacttcccaaaagatctagtcactactggcaacaataacatcaaggaaatgtggggtaattttcagagaagatgggaaaaaatagcggacattatgaaacaaaagagtgtccaaaaaatgacatggaatttaaagatccagatccaggcacttaaatcaccttatatttcttgccaacggcttgaaaggtttcatcttgaccataaaatgctggacaaagttgaagtgcttaacaactcatatatgttgttatcaccagtctctgtctacaatggattggatatatgtctgctggcgtgggttctatggccagatgaggaaagcagagcggttccaaatcttgagaagtttgtcaagaggcgacttcatagtcaagaagctgctgctgcaaatcgcgatggaagatggagaaatcagatgcacaaagcagcacacaatggctgctgtagacgtgctgcacagacacgggctttgtatactgttctgaagaaattacttactcaaaatctttctgttttggttgaaacaatcgaggccccattggttaatgttcttgctgatatggagctttggggaattggcgctgacatggatgcttgtctccgtgcgaggcatattataacaaaaaagctgaaggaactagagaaagaagcttacagattggcaggcaagaatttctctctaaatgctactgctgatatcgcagacattctatatacacacctaaaattgccagttccaaaaggctgtgagaaagggaagctgcatcctagcactgacaagcagtctttggaccacctaagggatcaacaccccattatcccattaattaaggaacacagaacattagcaaaactgttaaatggcacgttgtggtccatttgttcacgtgctcaattgtgcactcaatcacaaaggtacatcatacatggaaattggcttcagacgtcaactgccactggccgtttgtccatggaggagccaaatctgcagtgtgttgagcatgtggtggaattcgatacagggaaaagcgataaagattactcaagcatttcagttgatgatcatcataaaatcaatgcccgtgattttttcatacctaccaaggagaactggttattcataactgctgattactcacagattgagttgcgtttaatggctcacttttctaaagatcatatgttggttgaacttctaaagaaacctgatggtgatgtttttaccatgattgcttcaagatgggctgagaaagaagaggccttgatttcttccaaagagagagaaaacactaaaagattcatatatggcatcctttatggaatgggtgcaaactcccttgcagaacaacttcagtgcagcactgaggaagctgcacagaaaattcaaagctttaggagattttttcctggtgtttcctcatggttacatgaagttgtgttatcctgtcgccaaaaagggctagtttcgaaatgcaacaagggaccacaatatcgatgatacagctaggcatacatcaaag

SEQ ID NO: 13299 - DNA, 7321 bp, Zea Mays
atggcgtcgggctcgtctcgcccccaaatcgaccagttcttcccggccaagaagcggaggccctcgtcgcggaagggcgagtcgccgcgacccgggacgcagcatgagagccccggcggcgccaaggggtccctggaagggtacctcgtccgttcgccttgcaaccgtgccgtggcagcggcatcggtggtccccgtgggctcgcccaggggcggggacccgggcgccaggcgtagcctctcggccgcaatggatgtcgacgtcggttcctcggcttcggtggctgcggcggcaggtgacggggcagactttgatctcaggaggagcacggcggatttcttgtcccattcctgcagtgctatcctgcctttgaggggtgactgtgattacagcgagcagtgccagatgaagcagaagcggagtgcgtcccagtcattcttggttccttgtgacaacgactatgtcaagaagcagcgagttgcccattgtggtggctttgaagctctaaagtttggttctttgcaggagttagatgataatgtagcttccatgaagcaatgcatcaatcaccatggtggctcagaggctgtggaggaatctgttgagggggaacatgtgagttgtgttgggttttcggccttgcaaagatgtagctttaccccaagtactgcacagataaaagttgggttttctctagcacctgtggaaaccctaaagtctgtatcgaggaattcccttacttcacctggtgaggagttctggaatgcagcaattgaactcgctgatgggatatctgcccaggctgataaggtccgtggaaggccagaatttgatgcagcagaagacaagtcatcttgtgcagtagcagcattctttaagactcttcctagatcaggaagggatgagcttgactgtcaaaacacagtaggcagcaatgatacacatcatatagagaaattgtcaaataaagttgaatcactggcagtaaactgtcagcatataattagctcacctttgcctgtgaagcagctagatttctttcatgaggatgatattaaagtttcaggttcaaaatttgaaacaaaaggcagctatgaaacttgtaatgcacaagcagaccgtgttccactgaaaggcagtggccgcctagaaaaggaaaatctcatggaccctgtggatgtgttgaagagaagtgctattaatttgcacactgattctgcagccatgagatgtcagggtgttttcaagtcaacaactgaagggaaggttcatccaactcaagaggctgaaagagattctaatcttattaggagagatctcaatcagccaacccacaatgaaaataaatcacttgctgcatattcaaataatcgcaagacttggatagattccaagagtaaagttgcttctcaggaagtggaagctagcacacctactagctccattcctctaaaggatcactcaaagatatcaagttggcttcctcctgacctttgtgctatatacatgaaaaaaggcatttcagagctgtacccttggcaggttgaatgtttacttgtagaaggtgtcttgggcaaaaggaatcttgtgtattgtgcatccacgagtgctggtaaaagttttgttgctgaagttctgatgttgaggcagatactgtcaactgggaatatggcaattcttgtccttccctatgtgtcaatatgcgctgaaaaggctgaacatcttgaacaacttcttgagccactgggtaggcatgtccgtagcttctacggaaaccaggggggaggctcacttcctaaagatacagcagttgctgtatgtaccatagagaaggcaaactctttggtaaacaagttgttggaggatggccgcctctctgaacttggtgtaattgtcatagatgaacttcatatggttggtgaccaacatagaggatatcttttagagctgatgttgacaaagcttcgatatgctgctggtgaagggactttacagtcatgtagcggagaagtttcaagttctagcagtgggaagattgcaagtcatgggttgcagataattggtatgagtgctactatgcccaacatcgctgcggtggctgattggcttcaagctgctctttatcaaactgactttcgaccagttccactggaggaattcataaaagttggtaatcaaatatttgataaagacatgaacgttgttcgtgtccttcccaaagtagctgaccatggtggcaaggatccagatcatattgttgaattgtgtaatgaggttgttcttcagggccattctgtgcttttgttttgctccagtcgtaaaggctgcgaatcaactgcaaggcatgttgccaagttcttgaaactaccctctgttggaacaactgatgttagttcggagttttcagatgctgcagctgctattgaggccttgaggaggtgccctgctggattggatccaatattgggagaaacccttccttttggtgttgcatatcatcatgctggtcttacggtcgaggagagggagattgtggaatcatgctaccgtaaaggccttgtccgtgttctgactgccacttcaactttagctgctggtgttaacttgcctgctagacgggttatattcaggcagcccaagataggtcgtgattttattgatgggactcgctatagacagatggctggtcgtgctggtcgaactggaatagacacaaaaggagaaagtatacttgtatgcaggcctgaagaggtcaagagagttacaggtattattagaagcaattgccctcccttggagtcctgcctctcagaagataaaaatggaatgactcatgcaattatggaggttgttgctggtgggattgttcaaactgcaaatgatattcatcgttatgtgcggtgtacgctgcttaattccacaagaccttttgatgatgtcgtgaagtcagctcaagactcccttcgttggttatgccataaaagctttcttgagtggaaccatgagaccaagatatactccgctactccccttggtagagctgcttttggaagttcactcaaccctgaggaatcattggttgttcttgatgatctttcgagggcaagagaaggctttgttctggcatctgatttacatttagtttacttggtcacacccataaatgtagaccttgaacctgattgggaattatattacgagaaattcatgcaactttcttctcttgagcagtcagtaggcaatcgggttggagtaattgaacccttcttgatgcacatggctcatggggcgtcgataccttttcgtgcaaggcctgagagaaacaccgggttaagtaacaagtctgcacaagctgctggaaatactcttgttagtgagcacacaatcagagtgtctaagcgcttttatgtggctttaatgttatcgaggcttgctcaggagattcctattgctgatgtttgtgagacatttaaggtcgccagaggtatgattcaggcactgcaggaaaatgctggcaggtttgcttcaatggtttctgcattttgtcaaaggcttggttggaatgatttagaaggccttgtttcgaaattccaaaatcgtgtctcttttggagttagggcagagattgcagaactgacatcaattccatttgtcaagggttcacgtgcaagggctttgtacaagtctggtctgcgtactcctgttgccattgctgaagcatctattcctgaaattgcaaaagctctttttgaatcttctgcttggtctgggcaaggtgattctggtttacgacgaatgcaatttggtgtagcaaaaaaaataaaaaatggagcccgcaaaattgtcctggaggaggcagaagccgccagagtagcagcattctcagctttcaagtcacttggtgtggaagttccccagttcactgcacctccactcgcagctattgaggaatatccaactcacgataccatagaccaagctaagttaaataagctagcttctggtacccattctagagatgataaaaatatgaatacttgctctgattatgctactccaagggcttctacatacagtctaagaaaggacacaagtcctgctccttccattcaaatgaaagagaatgcaggactatctaaaaatgtgcaaatcactagacagggagcatcatcatctttgtcaacagaaattgctgatggatctagtagagatgtggctgaaaaaggtcctgtccatgcatataacttcccagggggatttgattgttttcttgatcaatggtccacagctagtaattttttctttgatgttcattttatcaagagatcgatgaaaccatctttgaacctttttgaagtttttgggttggctgtctgttgggaaaaatctcccatatactactgcaacttcccaaaagatctagtcactactggcaacaataacatcaaggaaatgtggggtaattttcagagaagatgggaaaaaatagcggacattatgaaacaaaagagtgtccaaaaaatgacatggaatttaaagatccagatccaggcacttaaatcaccttatatttcttgccaacggcttgaaaggtttcatcttgaccataaaatgctggacaaagttgaagtgcttaacaactcatatatgttgttatcaccagtctctgtctacaatggattggatatatgtctgctggcgtgggttctatggccagatgaggaaagcagagcggttccaaatcttgagaagtttgtcaagaggcgacttcatagtcaagaagctgctgctgcaaatcgcgatggaagatggagaaatcagatgcacaaagcagcacacaatggctgctgtagacgtgctgcacagacacgggctttgtatactgttctgaagaaattacttactcaaaatctttctgttttggttgaaacaatcgaggccccattggttaatgttcttgctgatatggagctttggggaattggcgctgacatggatgcttgtctccgtgcgaggcatattataacaaaaaagctgaaggaactagagaaagaagcttacagattggcaggcaagaatttctctctaaatgctactgctgatatcgcagacattctatatacacacctaaaattgccagttccaaaaggctgtgagaaagggaagctgcatcctagcactgacaagcagtctttggaccacctaagggatcaacaccccattatcccattaattaaggaacacagaacattagcaaaactgttaaatggcacgttgtggtccatttgttcacgtgctcaattgtgcactcaatcacaaaggtacatcatacatggaaattggcttcagacgtcaactgccactggccgtttgtccatggaggagccaaatctgcagtgtgttgagcatgtggtggaattcgatacagggaaaagcgataaagattactcaagcatttcagttgatgatcatcataaaatcaatgcccgtgattttttcatacctaccaaggagaactggttattcataactgctgattactcacagattgagttgcgtttaatggctcacttttctaaagatcatatgttggttgaacttctaaagaaacctgatggtgatgtttttaccatgattgcttcaagatgggctgagaaagaagaggccttgatttcttccaaagagagagaaaacactaaaagattcatatatggcatcctttatggaatgggtgcaaactcccttgcagaacaacttcagtgcagcactgaggaagctgcacagaaaattcaaagctttaggagattttttcctggtgtttcctcatggttacatgaagttgtgttatcctgtcgccaaaaaggatttgttgagactttattaggccggcgacgtgttcttacaaaaataacggctggcaatagcaaagagaaagctaaagcacagaggcaagcagtaaattctatttgccagggttctgctgctgatattattaaggtggctatgattagagttcattcaataattactaacagaactagtgcagctgattccacagatgaagttacaaggaaattttcagaacttggtggccagtgtcaccttattttgcaggtgcatgatgagttggtattagaagttgatccgtgcatggtagcacaggctggaaggttgttacagatatgtatggaagaagcagcttcactattggtacctttgcgcacaaagataaaggtgggaaaaacttggggttcactagaaccattccatcctgagccttgtttgatgcaaatggtgaatgtcagttggatgccaatgtttcatgacatgcaaggtcctggaagaaggctgaacaatttccaatatgcccccacaggggaccttggtgattctgtctggtgttcttcggtagaaccttcattgctatgtctacagtcttctgtcattgctgaccgtatgtgaaatcaacgcaacagcgaccagctccattactgaggatttgctatggactggtgattatcattatgattccatgtggcatgcaagaagcatatatatatcaccaatagatgctgttaaagggtttaaggtgtatttgaaaggtcttcctagttatactgcgaatcttttagataaacccttaagaaattggagggcctagtatatggtgatttttcttttgctaggcccagcgctaaaaaaccgattatggggtttattcaaagatgaaatttcatcctgtaactacaggttcaaggtgtatttggtttgatggatatcactatggacaagcgatggttggtttttgtacaagttggatgttgataaaaatgttggtatccatgccacacaaaaaaagcctaaccagcacccatattttgtaatccttgtcaagtatgttatatggtttacttgatagctctagcgaggctatccagtacctcaccttcaccctcatatttgtaatccttgtccacataattattagtatgttatatggttatttagtaattacgatggaaatattatttttggtaagcgcaaatatgcatgtttcgtatatcatttagggaaatacatttgttgtaattagtgttatgataacaaaattagtattggtgcatatttattagtgtataaatgttattatttttagataatatagatgtagttagttaattgttctttaccatctaaaaaatggtttatcctatttatcctatcacatagcaatatggattgttggaaatggaaatcctaaccctacttaggacggacacttgtatatatatagtgaactatacatggggttgggtcaaag

SEQ ID NO: 13300 - DNA, 7141 bp, Zea Mays
atggcgtcgggctcgtctcgcccccaaatcgaccagttcttcccggccaagaagcggaggccctcgtcgcggaagggcgagtcgccgcgacccgggacgcagcatgagagccccggcggcgccaaggggtccctggaagggtacctcgtccgttcgccttgcaaccgtgccgtggcagcggcatcggtggtccccgtgggctcgcccaggggcggggacccgggcgccaggcgtagcctctcggccgcaatggatgtcgacgtcggttcctcggcttcggtggctgcggcggcaggtgacggggcagactttgatctcaggaggagcacggcggatttcttgtcccattcctgcagcgagcagtgccagatgaagcagaagcggagtgcgtcccagtcattcttggttccttgtgacaacgactatgtcaagaagcagcgagttgcccattgtggtggctttgaagctctaaaggaatctgttgagggggaacatataaaagttgggttttctctagcacctgtggaaaccctaaagtctgtatcgaggaattcccttacttcacctggtgaggagttctggaatgcagcaattgaactcgctgatgggatatctgcccaggctgataaggtccgtggaaggccagaatttgatgcagcagaagacaagtcatcttgtgcagtagcagcattctttaagactcttcctagatcaggaagggatgagcttgactgtcaaaacacagtaggcagcaatgatacacatcatatagagaaattgtcaaataaagttgaatcactggcagtaaactgtcagcatataattagctcacctttgcctgtgaagcagctagatttctttcatgaggatgatattaaagtttcaggttcaaaatttgaaacaaaaggcagctatgaaacttgtaatgcacaagcagaccgtgttccactgaaaggcagtggccgcctagaaaaggaaaatctcatggaccctgtggatgtgttgaagagaagtgctattaatttgcacactgattctgcagccatgagatgtcagggtgttttcaagtcaacaactgaagggaaggttcatccaactcaagaggctgaaagagattctaatcttattaggagagatctcaatcagccaacccacaatgaaaataaatcacttgctgcatattcaaataatcgcaagacttggatagattccaagagtaaagttgcttctcaggaagtggaagctagcacacctactagctccattcctctaaaggatcactcaaagatatcaagttggcttcctcctgacctttgtgctatatacatgaaaaaaggcatttcagagctgtacccttggcaggttgaatgtttacttgtagaaggtgtcttgggcaaaaggaatcttgtgtattgtgcatccacgagtgctggtaaaagttttgttgctgaagttctgatgttgaggcagatactgtcaactgggaatatggcaattcttgtccttccctatgtgtcaatatgcgctgaaaaggctgaacatcttgaacaacttcttgagccactgggtaggcatgtccgtagcttctacggaaaccaggggggaggctcacttcctaaagatacagcagttgctgtatgtaccatagagaaggcaaactctttggtaaacaagttgttggaggatggccgcctctctgaacttggtgtaattgtcatagatgaacttcatatggttggtgaccaacatagaggatatcttttagagctgatgttgacaaagcttcgatatgctgctggtgaagggactttacagtcatgtagcggagaagtttcaagttctagcagtgggaagattgcaagtcatgggttgcagataattggtatgagtgctactatgcccaacatcgctgcggtggctgattggcttcaagctgctctttatcaaactgactttcgaccagttccactggaggaattcataaaagttggtaatcaaatatttgataaagacatgaacgttgttcgtgtccttcccaaagtagctgaccatggtggcaaggatccagatcatattgttgaattgtgtaatgaggttgttcttcagggccattctgtgcttttgttttgctccagtcgtaaaggctgcgaatcaactgcaaggcatgttgccaagttcttgaaactaccctctgttggaacaactgatgttagttcggagttttcagatgctgcagctgctattgaggccttgaggaggtgccctgctggattggatccaatattgggagaaacccttccttttggtgttgcatatcatcatgctggtcttacggtcgaggagagggagattgtggaatcatgctaccgtaaaggccttgtccgtgttctgactgccacttcaactttagctgctggtgttaacttgcctgctagacgggttatattcaggcagcccaagataggtcgtgattttattgatgggactcgctatagacagatggctggtcgtgctggtcgaactggaatagacacaaaaggagaaagtatacttgtatgcaggcctgaagaggtcaagagagttacaggtattattagaagcaattgccctcccttggagtcctgcctctcagaagataaaaatggaatgactcatgcaattatggaggttgttgctggtgggattgttcaaactgcaaatgatattcatcgttatgtgcggtgtacgctgcttaattccacaagaccttttgatgatgtcgtgaagtcagctcaagactcccttcgttggttatgccataaaagctttcttgagtggaaccatgagaccaagatatactccgctactccccttggtagagctgcttttggaagttcactcaaccctgaggaatcattggttgttcttgatgatctttcgagggcaagagaaggctttgttctggcatctgatttacatttagtttacttggtcacacccataaatgtagaccttgaacctgattgggaattatattacgagaaattcatgcaactttcttctcttgagcagtcagtaggcaatcgggttggagtaattgaacccttcttgatgcacatggctcatggggcgtcgataccttttcgtgcaaggcctgagagaaacaccgggttaagtaacaagtctgcacaagctgctggaaatactcttgttagtgagcacacaatcagagtgtctaagcgcttttatgtggctttaatgttatcgaggcttgctcaggagattcctattgctgatgtttgtgagacatttaaggtcgccagaggtatgattcaggcactgcaggaaaatgctggcaggtttgcttcaatggtttctgcattttgtcaaaggcttggttggaatgatttagaaggccttgtttcgaaattccaaaatcgtgtctcttttggagttagggcagagattgcagaactgacatcaattccatttgtcaagggttcacgtgcaagggctttgtacaagtctggtctgcgtactcctgttgccattgctgaagcatctattcctgaaattgcaaaagctctttttgaatcttctgcttggtctgggcaaggtgattctggtttacgacgaatgcaatttggtgtagcaaaaaaaataaaaaatggagcccgcaaaattgtcctggaggaggcagaagccgccagagtagcagcattctcagctttcaagtcacttggtgtggaagttccccagttcactgcacctccactcgcagctattgaggaatatccaactcacgataccatagaccaagctaagttaaataagctagcttctggtacccattctagagatgataaaaatatgaatacttgctctgattatgctactccaagggcttctacatacagtctaagaaaggacacaagtcctgctccttccattcaaatgaaagagaatgcaggactatctaaaaatgtgcaaatcactagacagggagcatcatcatctttgtcaacagaaattgctgatggatctagtagagatgtggctgaaaaaggtcctgtccatgcatataacttcccagggggatttgattgttttcttgatcaatggtccacagctagtaattttttctttgatgttcattttatcaagagatcgatgaaaccatctttgaacctttttgaagtttttgggttggctgtctgttgggaaaaatctcccatatactactgcaacttcccaaaagatctagtcactactggcaacaataacatcaaggaaatgtggggtaattttcagagaagatgggaaaaaatagcggacattatgaaacaaaagagtgtccaaaaaatgacatggaatttaaagatccagatccaggcacttaaatcaccttatatttcttgccaacggcttgaaaggtttcatcttgaccataaaatgctggacaaagttgaagtgcttaacaactcatatatgttgttatcaccagtctctgtctacaatggattggatatatgtctgctggcgtgggttctatggccagatgaggaaagcagagcggttccaaatcttgagaagtttgtcaagaggcgacttcatagtcaagaagctgctgctgcaaatcgcgatggaagatggagaaatcagatgcacaaagcagcacacaatggctgctgtagacgtgctgcacagacacgggctttgtatactgttctgaagaaattacttactcaaaatctttctgttttggttgaaacaatcgaggccccattggttaatgttcttgctgatatggagctttggggaattggcgctgacatggatgcttgtctccgtgcgaggcatattataacaaaaaagctgaaggaactagagaaagaagcttacagattggcaggcaagaatttctctctaaatgctactgctgatatcgcagacattctatatacacacctaaaattgccagttccaaaaggctgtgagaaagggaagctgcatcctagcactgacaagcagtctttggaccacctaagggatcaacaccccattatcccattaattaaggaacacagaacattagcaaaactgttaaatggcacgttgtggtccatttgttcacgtgctcaattgtgcactcaatcacaaaggtacatcatacatggaaattggcttcagacgtcaactgccactggccgtttgtccatggaggagccaaatctgcagtgtgttgagcatgtggtggaattcgatacagggaaaagcgataaagattactcaagcatttcagttgatgatcatcataaaatcaatgcccgtgattttttcatacctaccaaggagaactggttattcataactgctgattactcacagattgagttgcgtttaatggctcacttttctaaagatcatatgttggttgaacttctaaagaaacctgatggtgatgtttttaccatgattgcttcaagatgggctgagaaagaagaggccttgatttcttccaaagagagagaaaacactaaaagattcatatatggcatcctttatggaatgggtgcaaactcccttgcagaacaacttcagtgcagcactgaggaagctgcacagaaaattcaaagctttaggagattttttcctggtgtttcctcatggttacatgaagttgtgttatcctgtcgccaaaaaggatttgttgagactttattaggccggcgacgtgttcttacaaaaataacggctggcaatagcaaagagaaagctaaagcacagaggcaagcagtaaattctatttgccagggttctgctgctgatattattaaggtggctatgattagagttcattcaataattactaacagaactagtgcagctgattccacagatgaagttacaaggaaattttcagaacttggtggccagtgtcaccttattttgcaggtgcatgatgagttggtattagaagttgatccgtgcatggtagcacaggctggaaggttgttacagatatgtatggaagaagcagcttcactattggtacctttgcgcacaaagataaaggtgggaaaaacttggggttcactagaaccattccatcctgagccttgtttgatgcaaatggtgaatgtcagttggatgccaatgtttcatgacatgcaaggtcctggaagaaggctgaacaatttccaatatgcccccacaggggaccttggtgattctgtctggtgttcttcggtagaaccttcattgctatgtctacagtcttctgtcattgctgaccgtatgtgaaatcaacgcaacagcgaccagctccattactgaggatttgctatggactggtgattatcattatgattccatgtggcatgcaagaagcatatatatatcaccaatagatgctgttaaagggtttaaggtgtatttgaaaggtcttcctagttatactgcgaatcttttagataaacccttaagaaattggagggcctagtatatggtgatttttcttttgctaggcccagcgctaaaaaaccgattatggggtttattcaaagatgaaatttcatcctgtaactacaggttcaaggtgtatttggtttgatggatatcactatggacaagcgatggttggtttttgtacaagttggatgttgataaaaatgttggtatccatgccacacaaaaaaagcctaaccagcacccatattttgtaatccttgtcaagtatgttatatggtttacttgatagctctagcgaggctatccagtacctcaccttcaccctcatatttgtaatccttgtccacataattattagtatgttatatggttatttagtaattacgatggaaatattatttttggtaagcgcaaatatgcatgtttcgtatatcatttagggaaatacatttgttgtaattagtgttatgataacaaaattagtattggtgcatatttattagtgtataaatgttattatttttagataatatagatgtagttagttaattgttctttaccatctaaaaaatggtttatcctatttatcctatcacatagcaatatggattgttggaaatggaaatcctaaccctacttaggacggacacttgtatatatatagtgaactatacatggggttgggtcaaag

SEQ ID NO: 13301 - DNA, 5597 bp, Zea Mays
tgggagctgggtggtggtgggtggtggcacatcatcagttggcgtcgtggtggggggtatgcctccatacccgggcaagccataggggcagcttgctggaagggacagcgccgctgatgcaggcggagtctccactgctgcaatgcgtgaggacatggaggacatctgcgttgcgaaggcccctagttggcgctggacttcggcaagggcggtggtgatcgctgccaactccgacgcctgggtggcggacgctacactgtcgtcggtgttggatcctggcatctccgataccaaattggctgctctttatcaaactgactttcgaccagttccactggaggaattcataaaagttggtaatcaaatatttgataaagacatgaacgttgttcgtgtccttcccaaagtagctgaccatggtggcaaggatccagatcatattgttgaattgtgtaatgaggttgttcttcagggccattctgtgcttttgttttgctccagtcgtaaaggctgcgaatcaactgcaaggcatgttgccaagttcttgaaactaccctctgttggaacaactgatgttagttcggagttttcagatgctgcagctgctattgaggccttgaggaggtgccctgctggattggatccaatattgggagaaacccttccttttggtgttgcatatcatcatgctggtcttacggtcgaggagagggagattgtggaatcatgctaccgtaaaggccttgtccgtgttctgactgccacttcaactttagctgctggtgttaacttgcctgctagacgggttatattcaggcagcccaagataggtcgtgattttattgatgggactcgctatagacagatggctggtcgtgctggtcgaactggaatagacacaaaaggagaaagtatacttgtatgcaggcctgaagaggtcaagagagttacaggtattattagaagcaattgccctcccttggagtcctgcctctcagaagataaaaatggaatgactcatgcaattatggaggttgttgctggtgggattgttcaaactgcaaatgatattcatcgttatgtgcggtgtacgctgcttaattccacaagaccttttgatgatgtcgtgaagtcagctcaagactcccttcgttggttatgccataaaagctttcttgagtggaaccatgagaccaagatatactccgctactccccttggtagagctgcttttggaagttcactcaaccctgaggaatcattggttgttcttgatgatctttcgagggcaagagaaggctttgttctggcatctgatttacatttagtttacttggtcacacccataaatgtagaccttgaacctgattgggaattatattacgagaaattcatgcaactttcttctcttgagcagtcagtaggcaatcgggttggagtaattgaacccttcttgatgcacatggctcatggggcgtcgataccttttcgtgcaaggcctgagagaaacaccgggttaagtaacaagtctgcacaagctgctggaaatactcttgttagtgagcacacaatcagagtgtctaagcgcttttatgtggctttaatgttatcgaggcttgctcaggagattcctattgctgatgtttgtgagacatttaaggtcgccagaggtatgattcaggcactgcaggaaaatgctggcaggtttgcttcaatggtttctgcattttgtcaaaggcttggttggaatgatttagaaggccttgtttcgaaattccaaaatcgtgtctcttttggagttagggcagagattgcagaactgacatcaattccatttgtcaagggttcacgtgcaagggctttgtacaagtctggtctgcgtactcctgttgccattgctgaagcatctattcctgaaattgcaaaagctctttttgaatcttctgcttggtctgggcaaggtgattctggtttacgacgaatgcaatttggtgtagcaaaaaaaataaaaaatggagcccgcaaaattgtcctggaggaggcagaagccgccagagtagcagcattctcagctttcaagtcacttggtgtggaagttccccagttcactgcacctccactcgcagctattgaggaatatccaactcacgataccatagaccaagctaagttaaataagctagcttctggtacccattctagagatgataaaaatatgaatacttgctctgattatgctactccaagggcttctacatacagtctaagaaaggacacaagtcctgctccttccattcaaatgaaagagaatgcaggactatctaaaaatgtgcaaatcactagacagggagcatcatcatctttgtcaacagaaattgctgatggatctagtagagatgtggctgaaaaaggtcctgtccatgcatataacttcccagggggatttgattgttttcttgatcaatggtccacagctagtaattttttctttgatgttcattttatcaagagatcgatgaaaccatctttgaacctttttgaagtttttgggttggctgtctgttgggaaaaatctcccatatactactgcaacttcccaaaagatctagtcactactggcaacaataacatcaaggaaatgtggggtaattttcagagaagatgggaaaaaatagcggacattatgaaacaaaagagtgtccaaaaaatgacatggaatttaaagatccagatccaggcacttaaatcaccttatatttcttgccaacggcttgaaaggtttcatcttgaccataaaatgctggacaaagttgaagtgcttaacaactcatatatgttgttatcaccagtctctgtctacaatggattggatatatgtctgctggcgtgggttctatggccagatgaggaaagcagagcggttccaaatcttgagaagtttgtcaagaggcgacttcatagtcaagaagctgctgctgcaaatcgcgatggaagatggagaaatcagatgcacaaagcagcacacaatggctgctgtagacgtgctgcacagacacgggctttgtatactgttctgaagaaattacttactcaaaatctttctgttttggttgaaacaatcgaggccccattggttaatgttcttgctgatatggagctttggggaattggcgctgacatggatgcttgtctccgtgcgaggcatattataacaaaaaagctgaaggaactagagaaagaagcttacagattggcaggcaagaatttctctctaaatgctactgctgatatcgcagacattctatatacacacctaaaattgccagttccaaaaggctgtgagaaagggaagctgcatcctagcactgacaagcagtctttggaccacctaagggatcaacaccccattatcccattaattaaggaacacagaacattagcaaaactgttaaatggcacgttgtggtccatttgttcacgtgctcaattgtgcactcaatcacaaaggtacatcatacatggaaattggcttcagacgtcaactgccactggccgtttgtccatggaggagccaaatctgcagtgtgttgagcatgtggtggaattcgatacagggaaaagcgataaagattactcaagcatttcagttgatgatcatcataaaatcaatgcccgtgattttttcatacctaccaaggagaactggttattcataactgctgattactcacagattgagttgcgtttaatggctcacttttctaaagatcatatgttggttgaacttctaaagaaacctgatggtgatgtttttaccatgattgcttcaagatgggctgagaaagaagaggccttgatttcttccaaagagagagaaaacactaaaagattcatatatggcatcctttatggaatgggtgcaaactcccttgcagaacaacttcagtgcagcactgaggaagctgcacagaaaattcaaagctttaggagattttttcctggtgtttcctcatggttacatgaagttgtgttatcctgtcgccaaaaagggctagtttcgaaatgcaacaagggaccacaatatcgatgatacagctaggcatacatcaaagaagtttctaattcgttatcactcctcagatttgttgagactttattaggccggcgacgtgttcttacaaaaataacggctggcaatagcaaagagaaagctaaagcacagaggcaagcagtaaattctatttgccagggttctgctgctgatattattaaggtggctatgattagagttcattcaataattactaacagaactagtgcagctgattccacagatgaagttacaaggaaattttcagaacttggtggccagtgtcaccttattttgcaggtgcatgatgagttggtattagaagttgatccgtgcatggtagcacaggctggaaggttgttacagatatgtatggaagaagcagcttcactattggtacctttgcgcacaaagataaaggtgggaaaaacttggggttcactagaaccattccatcctgagccttgtttgatgcaaatggtgaatgtcagttggatgccaatgtttcatgacatgcaaggtcctggaagaaggctgaacaatttccaatatgcccccacaggggaccttggtgattctgtctggtgttcttcggtagaaccttcattgctatgtctacagtcttctgtcattgctgaccgtatgtgaaatcaacgcaacagcgaccagctccattactgaggatttgctatggactggtgattatcattatgattccatgtggcatgcaagaagcatatatatatcaccaatagatgctgttaaagggtttaaggtgtatttgaaaggtcttcctagttatactgcgaatcttttagataaacccttaagaaattggagggcctagtatatggtgatttttcttttgctaggcccagcgctaaaaaaccgattatggggtttattcaaagatgaaatttcatcctgtaactacaggttcaaggtgtatttggtttgatggatatcactatggacaagcgatggttggtttttgtacaagttggatgttgataaaaatgttggtatccatgccacacaaaaaaagcctaaccagcacccatattttgtaatccttgtcaagtatgttatatggtttacttgatagctctagcgaggctatccagtacctcaccttcaccctcatatttgtaatccttgtccacataattattagtatgttatatggttatttagtaattacgatggaaatattatttttggtaagcgcaaatatgcatgtttcgtatatcatttagggaaatacatttgttgtaattagtgttatgataacaaaattagtattggtgcatatttattagtgtataaatgttattatttttagataatatagatgtagttagttaattgttctttaccatctaaaaaatggtttatcctatttatcctatcacatagcaatatggattgttggaaatggaaatcctaaccctacttaggacggacacttgtatatatatagtgaactatacatggggttgggtcaaag

SEQ ID NO: 13302 - DNA, 5507 bp, Zea Mays
tgggagctgggtggtggtgggtggtggcacatcatcagttggcgtcgtggtggggggtatgcctccatacccgggcaagccataggggcagcttgctggaagggacagcgccgctgatgcaggcggagtctccactgctgcaatgcgtgaggacatggaggacatctgcgttgcgaaggcccctagttggcgctggacttcggcaagggcggtggtgatcgctgccaactccgacgcctgggtggcggacgctacactgtcgtcggtgttggatcctggcatctccgataccaaattggctgctctttatcaaactgactttcgaccagttccactggaggaattcataaaagttggtaatcaaatatttgataaagacatgaacgttgttcgtgtccttcccaaagtagctgaccatggtggcaaggatccagatcatattgttgaattgtgtaatgaggttgttcttcagggccattctgtgcttttgttttgctccagtcgtaaaggctgcgaatcaactgcaaggcatgttgccaagttcttgaaactaccctctgttggaacaactgatgttagttcggagttttcagatgctgcagctgctattgaggccttgaggaggtgccctgctggattggatccaatattgggagaaacccttccttttggtgttgcatatcatcatgctggtcttacggtcgaggagagggagattgtggaatcatgctaccgtaaaggccttgtccgtgttctgactgccacttcaactttagctgctggtgttaacttgcctgctagacgggttatattcaggcagcccaagataggtcgtgattttattgatgggactcgctatagacagatggctggtcgtgctggtcgaactggaatagacacaaaaggagaaagtatacttgtatgcaggcctgaagaggtcaagagagttacaggtattattagaagcaattgccctcccttggagtcctgcctctcagaagataaaaatggaatgactcatgcaattatggaggttgttgctggtgggattgttcaaactgcaaatgatattcatcgttatgtgcggtgtacgctgcttaattccacaagaccttttgatgatgtcgtgaagtcagctcaagactcccttcgttggttatgccataaaagctttcttgagtggaaccatgagaccaagatatactccgctactccccttggtagagctgcttttggaagttcactcaaccctgaggaatcattggttgttcttgatgatctttcgagggcaagagaaggctttgttctggcatctgatttacatttagtttacttggtcacacccataaatgtagaccttgaacctgattgggaattatattacgagaaattcatgcaactttcttctcttgagcagtcagtaggcaatcgggttggagtaattgaacccttcttgatgcacatggctcatggggcgtcgataccttttcgtgcaaggcctgagagaaacaccgggttaagtaacaagtctgcacaagctgctggaaatactcttgttagtgagcacacaatcagagtgtctaagcgcttttatgtggctttaatgttatcgaggcttgctcaggagattcctattgctgatgtttgtgagacatttaaggtcgccagaggtatgattcaggcactgcaggaaaatgctggcaggtttgcttcaatggtttctgcattttgtcaaaggcttggttggaatgatttagaaggccttgtttcgaaattccaaaatcgtgtctcttttggagttagggcagagattgcagaactgacatcaattccatttgtcaagggttcacgtgcaagggctttgtacaagtctggtctgcgtactcctgttgccattgctgaagcatctattcctgaaattgcaaaagctctttttgaatcttctgcttggtctgggcaaggtgattctggtttacgacgaatgcaatttggtgtagcaaaaaaaataaaaaatggagcccgcaaaattgtcctggaggaggcagaagccgccagagtagcagcattctcagctttcaagtcacttggtgtggaagttccccagttcactgcacctccactcgcagctattgaggaatatccaactcacgataccatagaccaagctaagttaaataagctagcttctggtacccattctagagatgataaaaatatgaatacttgctctgattatgctactccaagggcttctacatacagtctaagaaaggacacaagtcctgctccttccattcaaatgaaagagaatgcaggactatctaaaaatgtgcaaatcactagacagggagcatcatcatctttgtcaacagaaattgctgatggatctagtagagatgtggctgaaaaaggtcctgtccatgcatataacttcccagggggatttgattgttttcttgatcaatggtccacagctagtaattttttctttgatgttcattttatcaagagatcgatgaaaccatctttgaacctttttgaagtttttgggttggctgtctgttgggaaaaatctcccatatactactgcaacttcccaaaagatctagtcactactggcaacaataacatcaaggaaatgtggggtaattttcagagaagatgggaaaaaatagcggacattatgaaacaaaagagtgtccaaaaaatgacatggaatttaaagatccagatccaggcacttaaatcaccttatatttcttgccaacggcttgaaaggtttcatcttgaccataaaatgctggacaaagttgaagtgcttaacaactcatatatgttgttatcaccagtctctgtctacaatggattggatatatgtctgctggcgtgggttctatggccagatgaggaaagcagagcggttccaaatcttgagaagtttgtcaagaggcgacttcatagtcaagaagctgctgctgcaaatcgcgatggaagatggagaaatcagatgcacaaagcagcacacaatggctgctgtagacgtgctgcacagacacgggctttgtatactgttctgaagaaattacttactcaaaatctttctgttttggttgaaacaatcgaggccccattggttaatgttcttgctgatatggagctttggggaattggcgctgacatggatgcttgtctccgtgcgaggcatattataacaaaaaagctgaaggaactagagaaagaagcttacagattggcaggcaagaatttctctctaaatgctactgctgatatcgcagacattctatatacacacctaaaattgccagttccaaaaggctgtgagaaagggaagctgcatcctagcactgacaagcagtctttggaccacctaagggatcaacaccccattatcccattaattaaggaacacagaacattagcaaaactgttaaatggcacgttgtggtccatttgttcacgtgctcaattgtgcactcaatcacaaaggtacatcatacatggaaattggcttcagacgtcaactgccactggccgtttgtccatggaggagccaaatctgcagtgtgttgagcatgtggtggaattcgatacagggaaaagcgataaagattactcaagcatttcagttgatgatcatcataaaatcaatgcccgtgattttttcatacctaccaaggagaactggttattcataactgctgattactcacagattgagttgcgtttaatggctcacttttctaaagatcatatgttggttgaacttctaaagaaacctgatggtgatgtttttaccatgattgcttcaagatgggctgagaaagaagaggccttgatttcttccaaagagagagaaaacactaaaagattcatatatggcatcctttatggaatgggtgcaaactcccttgcagaacaacttcagtgcagcactgaggaagctgcacagaaaattcaaagctttaggagattttttcctggtgtttcctcatggttacatgaagttgtgttatcctgtcgccaaaaaggatttgttgagactttattaggccggcgacgtgttcttacaaaaataacggctggcaatagcaaagagaaagctaaagcacagaggcaagcagtaaattctatttgccagggttctgctgctgatattattaaggtggctatgattagagttcattcaataattactaacagaactagtgcagctgattccacagatgaagttacaaggaaattttcagaacttggtggccagtgtcaccttattttgcaggtgcatgatgagttggtattagaagttgatccgtgcatggtagcacaggctggaaggttgttacagatatgtatggaagaagcagcttcactattggtacctttgcgcacaaagataaaggtgggaaaaacttggggttcactagaaccattccatcctgagccttgtttgatgcaaatggtgaatgtcagttggatgccaatgtttcatgacatgcaaggtcctggaagaaggctgaacaatttccaatatgcccccacaggggaccttggtgattctgtctggtgttcttcggtagaaccttcattgctatgtctacagtcttctgtcattgctgaccgtatgtgaaatcaacgcaacagcgaccagctccattactgaggatttgctatggactggtgattatcattatgattccatgtggcatgcaagaagcatatatatatcaccaatagatgctgttaaagggtttaaggtgtatttgaaaggtcttcctagttatactgcgaatcttttagataaacccttaagaaattggagggcctagtatatggtgatttttcttttgctaggcccagcgctaaaaaaccgattatggggtttattcaaagatgaaatttcatcctgtaactacaggttcaaggtgtatttggtttgatggatatcactatggacaagcgatggttggtttttgtacaagttggatgttgataaaaatgttggtatccatgccacacaaaaaaagcctaaccagcacccatattttgtaatccttgtcaagtatgttatatggtttacttgatagctctagcgaggctatccagtacctcaccttcaccctcatatttgtaatccttgtccacataattattagtatgttatatggttatttagtaattacgatggaaatattatttttggtaagcgcaaatatgcatgtttcgtatatcatttagggaaatacatttgttgtaattagtgttatgataacaaaattagtattggtgcatatttattagtgtataaatgttattatttttagataatatagatgtagttagttaattgttctttaccatctaaaaaatggtttatcctatttatcctatcacatagcaatatggattgttggaaatggaaatcctaaccctacttaggacggacacttgtatatatatagtgaactatacatggggttgggtcaaag

SEQ ID NO: 13303 - DNA, 3820 bp, Zea Mays
ctttgggcaggcctccccgctcaagtccctcgcaatgcttaggccctcttcaacattgcagtggacatcattgttgggaacggtgagcaaacactcttctggacagacagatggctggatggccataccatatctgaagtggcacccagcttatttagtgctgtctcgaagcggacagccaagaggaggacggtagcccaagctctccaaaaccaaagcaagatgtgccggaccaattttgtgtggaaattaacacaatccgacatttacacgagtgattctggtttacgacgaatgcaatttggtgtagcaaaaaaaataaaaaatggagcccgcaaaattgtcctggaggaggcagaagccgccagagtagcagcattctcagctttcaagtcacttggtgtggaagttccccagttcactgcacctccactcgcagctattgaggaatatccaactcacgataccatagaccaagctaagttaaataagctagcttctggtacccattctagagatgataaaaatatgaatacttgctctgattatgctactccaagggcttctacatacagtctaagaaaggacacaagtcctgctccttccattcaaatgaaagagaatgcaggactatctaaaaatgtgcaaatcactagacagggagcatcatcatctttgtcaacagaaattgctgatggatctagtagagatgtggctgaaaaaggtcctgtccatgcatataacttcccagggggatttgattgttttcttgatcaatggtccacagctagtaattttttctttgatgttcattttatcaagagatcgatgaaaccatctttgaacctttttgaagtttttgggttggctgtctgttgggaaaaatctcccatatactactgcaacttcccaaaagatctagtcactactggcaacaataacatcaaggaaatgtggggtaattttcagagaagatgggaaaaaatagcggacattatgaaacaaaagagtgtccaaaaaatgacatggaatttaaagatccagatccaggcacttaaatcaccttatatttcttgccaacggcttgaaaggtttcatcttgaccataaaatgctggacaaagttgaagtgcttaacaactcatatatgttgttatcaccagtctctgtctacaatggattggatatatgtctgctggcgtgggttctatggccagatgaggaaagcagagcggttccaaatcttgagaagtttgtcaagaggcgacttcatagtcaagaagctgctgctgcaaatcgcgatggaagatggagaaatcagatgcacaaagcagcacacaatggctgctgtagacgtgctgcacagacacgggctttgtatactgttctgaagaaattacttactcaaaatctttctgttttggttgaaacaatcgaggccccattggttaatgttcttgctgatatggagctttggggaattggcgctgacatggatgcttgtctccgtgcgaggcatattataacaaaaaagctgaaggaactagagaaagaagcttacagattggcaggcaagaatttctctctaaatgctactgctgatatcgcagacattctatatacacacctaaaattgccagttccaaaaggctgtgagaaagggaagctgcatcctagcactgacaagcagtctttggaccacctaagggatcaacaccccattatcccattaattaaggaacacagaacattagcaaaactgttaaatggcacgttgtggtccatttgttcacgtgctcaattgtgcactcaatcacaaaggtacatcatacatggaaattggcttcagacgtcaactgccactggccgtttgtccatggaggagccaaatctgcagtgtgttgagcatgtggtggaattcgatacagggaaaagcgataaagattactcaagcatttcagttgatgatcatcataaaatcaatgcccgtgattttttcatacctaccaaggagaactggttattcataactgctgattactcacagattgagttgcgtttaatggctcacttttctaaagatcatatgttggttgaacttctaaagaaacctgatggtgatgtttttaccatgattgcttcaagatgggctgagaaagaagaggccttgatttcttccaaagagagagaaaacactaaaagattcatatatggcatcctttatggaatgggtgcaaactcccttgcagaacaacttcagtgcagcactgaggaagctgcacagaaaattcaaagctttaggagattttttcctggtgtttcctcatggttacatgaagttgtgttatcctgtcgccaaaaaggatttgttgagactttattaggccggcgacgtgttcttacaaaaataacggctggcaatagcaaagagaaagctaaagcacagaggcaagcagtaaattctatttgccagggttctgctgctgatattattaaggtggctatgattagagttcattcaataattactaacagaactagtgcagctgattccacagatgaagttacaaggaaattttcagaacttggtggccagtgtcaccttattttgcaggtgcatgatgagttggtattagaagttgatccgtgcatggtagcacaggctggaaggttgttacagatatgtatggaagaagcagcttcactattggtacctttgcgcacaaagataaaggtgggaaaaacttggggttcactagaaccattccatcctgagccttgtttgatgcaaatggtgaatgtcagttggatgccaatgtttcatgacatgcaaggtcctggaagaaggctgaacaatttccaatatgcccccacaggggaccttggtgattctgtctggtgttcttcggtagaaccttcattgctatgtctacagtcttctgtcattgctgaccgtatgtgaaatcaacgcaacagcgaccagctccattactgaggatttgctatggactggtgattatcattatgattccatgtggcatgcaagaagcatatatatatcaccaatagatgctgttaaagggtttaaggtgtatttgaaaggtcttcctagttatactgcgaatcttttagataaacccttaagaaattggagggcctagtatatggtgatttttcttttgctaggcccagcgctaaaaaaccgattatggggtttattcaaagatgaaatttcatcctgtaactacaggttcaaggtgtatttggtttgatggatatcactatggacaagcgatggttggtttttgtacaagttggatgttgataaaaatgttggtatccatgccacacaaaaaaagcctaaccagcacccatattttgtaatccttgtcaagtatgttatatggtttacttgatagctctagcgaggctatccagtacctcaccttcaccctcatatttgtaatccttgtccacataattattagtatgttatatggttatttagtaattacgatggaaatattatttttggtaagcgcaaatatgcatgtttcgtatatcatttagggaaatacatttgttgtaattagtgttatgataacaaaattagtattggtgcatatttattagtgtataaatgttattatttttagataatatagatgtagttagttaattgttctttaccatctaaaaaatggtttatcctatttatcctatcacatagcaatatggattgttggaaatggaaatcctaaccctacttaggacggacacttgtatatatatagtgaactatacatggggttgggtcaaag

SEQ ID NO: 13304 - DNA, 3593 bp, Zea Mays
atttgggccatggagaagaatatggaacagttgggcacctcctcgctgtgattctggtttacgacgaatgcaatttggtgtagcaaaaaaaataaaaaatggagcccgcaaaattgtcctggaggaggcagaagccgccagagtagcagcattctcagctttcaagtcacttggtgtggaagttccccagttcactgcacctccactcgcagctattgaggaatatccaactcacgataccatagaccaagctaagttaaataagctagcttctggtacccattctagagatgataaaaatatgaatacttgctctgattatgctactccaagggcttctacatacagtctaagaaaggacacaagtcctgctccttccattcaaatgaaagagaatgcaggactatctaaaaatgtgcaaatcactagacagggagcatcatcatctttgtcaacagaaattgctgatggatctagtagagatgtggctgaaaaaggtcctgtccatgcatataacttcccagggggatttgattgttttcttgatcaatggtccacagctagtaattttttctttgatgttcattttatcaagagatcgatgaaaccatctttgaacctttttgaagtttttgggttggctgtctgttgggaaaaatctcccatatactactgcaacttcccaaaagatctagtcactactggcaacaataacatcaaggaaatgtggggtaattttcagagaagatgggaaaaaatagcggacattatgaaacaaaagagtgtccaaaaaatgacatggaatttaaagatccagatccaggcacttaaatcaccttatatttcttgccaacggcttgaaaggtttcatcttgaccataaaatgctggacaaagttgaagtgcttaacaactcatatatgttgttatcaccagtctctgtctacaatggattggatatatgtctgctggcgtgggttctatggccagatgaggaaagcagagcggttccaaatcttgagaagtttgtcaagaggcgacttcatagtcaagaagctgctgctgcaaatcgcgatggaagatggagaaatcagatgcacaaagcagcacacaatggctgctgtagacgtgctgcacagacacgggctttgtatactgttctgaagaaattacttactcaaaatctttctgttttggttgaaacaatcgaggccccattggttaatgttcttgctgatatggagctttggggaattggcgctgacatggatgcttgtctccgtgcgaggcatattataacaaaaaagctgaaggaactagagaaagaagcttacagattggcaggcaagaatttctctctaaatgctactgctgatatcgcagacattctatatacacacctaaaattgccagttccaaaaggctgtgagaaagggaagctgcatcctagcactgacaagcagtctttggaccacctaagggatcaacaccccattatcccattaattaaggaacacagaacattagcaaaactgttaaatggcacgttgtggtccatttgttcacgtgctcaattgtgcactcaatcacaaaggtacatcatacatggaaattggcttcagacgtcaactgccactggccgtttgtccatggaggagccaaatctgcagtgtgttgagcatgtggtggaattcgatacagggaaaagcgataaagattactcaagcatttcagttgatgatcatcataaaatcaatgcccgtgattttttcatacctaccaaggagaactggttattcataactgctgattactcacagattgagttgcgtttaatggctcacttttctaaagatcatatgttggttgaacttctaaagaaacctgatggtgatgtttttaccatgattgcttcaagatgggctgagaaagaagaggccttgatttcttccaaagagagagaaaacactaaaagattcatatatggcatcctttatggaatgggtgcaaactcccttgcagaacaacttcagtgcagcactgaggaagctgcacagaaaattcaaagctttaggagattttttcctggtgtttcctcatggttacatgaagttgtgttatcctgtcgccaaaaaggatttgttgagactttattaggccggcgacgtgttcttacaaaaataacggctggcaatagcaaagagaaagctaaagcacagaggcaagcagtaaattctatttgccagggttctgctgctgatattattaaggtggctatgattagagttcattcaataattactaacagaactagtgcagctgattccacagatgaagttacaaggaaattttcagaacttggtggccagtgtcaccttattttgcaggtgcatgatgagttggtattagaagttgatccgtgcatggtagcacaggctggaaggttgttacagatatgtatggaagaagcagcttcactattggtacctttgcgcacaaagataaaggtgggaaaaacttggggttcactagaaccattccatcctgagccttgtttgatgcaaatggtgaatgtcagttggatgccaatgtttcatgacatgcaaggtcctggaagaaggctgaacaatttccaatatgcccccacaggggaccttggtgattctgtctggtgttcttcggtagaaccttcattgctatgtctacagtcttctgtcattgctgaccgtatgtgaaatcaacgcaacagcgaccagctccattactgaggatttgctatggactggtgattatcattatgattccatgtggcatgcaagaagcatatatatatcaccaatagatgctgttaaagggtttaaggtgtatttgaaaggtcttcctagttatactgcgaatcttttagataaacccttaagaaattggagggcctagtatatggtgatttttcttttgctaggcccagcgctaaaaaaccgattatggggtttattcaaagatgaaatttcatcctgtaactacaggttcaaggtgtatttggtttgatggatatcactatggacaagcgatggttggtttttgtacaagttggatgttgataaaaatgttggtatccatgccacacaaaaaaagcctaaccagcacccatattttgtaatccttgtcaagtatgttatatggtttacttgatagctctagcgaggctatccagtacctcaccttcaccctcatatttgtaatccttgtccacataattattagtatgttatatggttatttagtaattacgatggaaatattatttttggtaagcgcaaatatgcatgtttcgtatatcatttagggaaatacatttgttgtaattagtgttatgataacaaaattagtattggtgcatatttattagtgtataaatgttattatttttagataatatagatgtagttagttaattgttctttaccatctaaaaaatggtttatcctatttatcctatcacatagcaatatggattgttggaaatggaaatcctaaccctacttaggacggacacttgtatatatatagtgaactatacatggggttgggtcaaag

SEQ ID NO: 13305 - DNA, 1437 bp, Zea Mays
acacgggaccgatcgaatcgatctcttgtcggctacacagaaccgatcgaaccgatttctattttcttcgtatccaatttccatcctttcccctctcgcgggctcgcggccacgaccccgcttccctagaattattaccacaaaccacaaaaccctcggtcccggctatggctaactccgtctccccgccgcgccgccgccgccacagccaccacgatgacgtctccccgcgccgccgcaagcgccgcgcgtccccgtatccacctcgctcgccttccctcggcgtcgacgcggaccgccgtcgcagatctagggcttcgccgcccgattccgacagccgcggccgcggccgagacgccaagccctctgaggagaaggagaacggccacgccaagcccggaagggatgaagacggcgacaaccgatctccccggcgcgacagggtttcagacggggaggaaggtggcgaacgccggaggatgcgcgatagggtttccgacgatgagaaggaggaaggacgtcgtcgcaggcgggctagggatccggatgatgagccggacgaccgccgtggcaagcgagaccgggagaaagacagacggcgccaccggcgccggagccctagctcggagtcagggtcctcgcccgacggccgtcgccatcgccgccggcgccgagacgagggttcgaggcggcgggacgaccgtaggcgaagggaggacgagggagacgagcgccgtagaagccctgtgaaggagctgaccccgccactgcctcccccaccgccgctccttccggagatgatccctgggcgcacgggtgggatctacatcccgcctttccgcatggcgcagatgatgcgtgatatggaggacaagtcgagccctgagtatcagcgcctcacctgggatgctctcaagaagagcatcaatgggctggtgaataaggtgaatgcgaccaatatcaagaatatagtgccagagctctttgcagagaaccttgttcgtgggcgggggctcttctgtcagtcttgcatcaagtcacagatggcctcgcctgggtttactgatgtatttgctgcgctagttgcggttgtgaataccaagttccctgagattgggaagttgcttcttgttcgtgtcgtgctccagctcaagagggcatataagcgaaatgacaagccccaattgcttgcagcaaccaaattcattgcgcacttggtaaatcaggtggtggcacatgaacttgtggcgctggagcttcttactgtactcctggaaaatccgactgatgatagcgtcgaggtggctgtgggttttgtcaaagagtgtggggcaatgctgcaggacttgtctcctcaagggcttcatggtaagctatttcagacaattgtctgagtatggcttgttaaacttgttagcttttggtggtgcatgatcg

SEQ ID NO: 13306 - DNA, 1992 bp, Zea Mays
ctttcccctctcgcgggctcgcggccacgaccccgcttccctagaattattaccacaaaccacaaaaccctcggtcccggctatggctaactccgtctccccgccgcgccgccgccgccacagccaccacgatgacgtctccccgcgccgccgcaagcgccgcgcgtccccgtatccacctcgctcgccttccctcggcgtcgacgcggaccgccgtcgcagatctagggcttcgccgcccgattccgacagccgcggccgcggccgagacgccaagccctctgaggagaaggagaacggccacgccaagcccggaagggatgaagacggcgacaaccgatctccccggcgcgacagggtttcagacggggaggaaggtggcgaacgccggaggatgcgcgatagggtttccgacgatgagaaggaggaaggacgtcgtcgcaggcgggctagggatccggatgatgagccggacgaccgccgtggcaagcgagaccgggagaaagacagacggcgccaccggcgccggagccctagctcggagtcagggtcctcgcccgacggccgtcgccatcgccgccggcgccgagacgagggttcgaggcggcgggacgaccgtaggcgaagggaggacgagggagacgagcgccgtagaagccctgtgaaggagctgaccccgccactgcctcccccaccgccgctccttccggagatgatccctgggcgcacgggtgggatctacatcccgcctttccgcatggcgcagatgatgcgtgatatggaggacaagtcgagccctgagtatcagcgcctcacctgggatgctctcaagaagagcatcaatgggctggtgaataaggtgaatgcgaccaatatcaagaatatagtgccagagctctttgcagagaaccttgttcgtgggcgggggctcttctgtcagtcttgcatcaagtcacagatggcctcgcctgggtttactgatgtatttgctgcgctagttgcggttgtgaataccaagttccctgagattgggaagttgcttcttgttcgtgtcgtgctccagctcaagagggcatataagcgaaatgacaaggtgagcttgtcttcattttcctcagctcaagaagtgttttagtactttgttacttttttatttaagaatgactcatttagaatctacaaacgccgggtctagttgcattccaaggtgttttcatataattagtttcacttattgtatggttgcttatctaatccttatcaagatctttgcaattttttaaaccatttacaaaatgggctatcctatttatgttagtctggaaaaaatggctacttaagtctgcagctgaaggagaactattggtgcatacaccaatagatctgctgttctgcaattacaaaggtttgtagttggctcatgaaattctttgcacaacacttcacattgctttccatttgtatttgaactcatgaactggattaatgcaggttttggaagttacataggatataccttctacttggattatggattaaagtcaaataaaagaactagcaaaagttgttgtttatacctggggcttgtatacactgacgtttgctgtttatgtacataagatgaattgttacttacatttaggatgcttaatatctgagtgtgaagaattacatatgtgcttaattgttagtttctgcataaatttcttactgaagttctcctttacttgcagccccaattgcttgcagcaaccaaattcattgcgcacttggtaaatcaggtggtggcacatgaacttgtggcgctggagcttcttactgtactcctggaaaatccgactgatgatagcgtcgaggtggctgtgggttttgtcaaagagtgtggggcaatgctgcaggacttgtctcctcaagggcttcatggtaagctatttcagacaattgtctgagtatggcttgttaaacttgttagcttttggtggtgcatgatcg

SEQ ID NO: 13307 - DNA, 1126 bp, Zea Mays
cagatgttttccaggcaaaccccaattttgttgaagatgagaaggcatatgagaatctaaagagaagcatcctgggagcagagtcttctgaagatgaagaaggatcagatgctgcttctgatgatgatgatgatgatgatgatgaatctgatgaagaggatgaggaacaaatggagataagggatagaacagagacaaatcttgtgaatcttagaagaacaatatatttgactattatgtctagtgttgattttgaagaagctggacacaagcttatgaaaattaagcttgagcctggtcaagaggttgacagaggaagacacaacatcatcttctcgtattttcataaaaatattgttccaagaattatcggagcacctgggcatacgcctactcaatgagaggctgaatgatcctaacatgcaaggttcctttgagtctatcttcccaaaggatcatccgaagaatacaaggttctcgatcaacttcttcacgtccattggtcttggtggtatcacggaaagcctgagggagtacttgaagaacatgccacgtctaataatgcagcagcagaagccagaatcatcagagtcagattcaagtggatccgaatctggttcggaaagctctagttcagggtccagttctgagcctgagtcagaatcaagccctgatgagcgtgacagaaggcgaagtaataagaggaggaagaggacttgagagcacttccaactatgctttttggaattcatgtatttggttttgtttaaatgtgcttcttcagtatacatgtgcagtatgtgatctagctcttgatgtgttagtggtaatcagaaagccgtaacagtaagatactattcgaacttgtacgtggcaggttggtagtccagcaacaaagggccaacagagatcttgtttatttttcataacttccaatgcagaacaagttctgtacgtgggtatttgtaccattgcgacatcacactgctagccatgttctgtatcctgtagtgtggtaactggtaagcatcaaatatggacatcggttttgatttttttctgctcgttttttccccagtatatagacagtcaaagctataggcttctgtggccttcacaatttttg

SEQ ID NO: 13308 - DNA, 1316 bp, Zea Mays
cagatgttttccaggcaaaccccaattttgttgaagatgagaaggcatatgagaatctaaagagaagcatcctgggagcagagtcttctgaagatgaagaaggatcagatgctgcttctgatgatgatgatgatgatgatgatgaatctgatgaagaggatgaggaacaaatggagataagggatagaacagagacaaatcttgtgaatcttagaagaacaatatatttgactattatgtctagtgttgattttgaagaagctggacacaagcttatgaaaattaagcttgagcctggtcaagagatggagctgtgcattatgcttcttgagtgttgcagtcaggagagaacatatcttcgttattatgggctgctaggacagcgtttttgcatgatcaataaagtgtaccaagagaacttcgaaaaatgctttgtgcaacaatattcgatgattcatcgtcttgaaacaaacaagttgaggaatgttgccaagttctttgcacatttgttggggactgatgcactcccttggcatgttttggcttacatcaggaattatcggagcacctgggcatacgcctactcaatgagaggctgaatgatcctaacatgcaaggttcctttgagtctatcttcccaaaggatcatccgaagaatacaaggttctcgatcaacttcttcacgtccattggtcttggtggtatcacggaaagcctgagggagtacttgaagaacatgccacgtctaataatgcagcagcagaagccagaatcatcagagtcagattcaagtggatccgaatctggttcggaaagctctagttcagggtccagttctgagcctgagtcagaatcaagccctgatgagcgtgacagaaggcgaagtaataagaggaggaagaggacttgagagcacttccaactatgctttttggaattcatgtatttggttttgtttaaatgtgcttcttcagtatacatgtgcagtatgtgatctagctcttgatgtgttagtggtaatcagaaagccgtaacagtaagatactattcgaacttgtacgtggcaggttggtagtccagcaacaaagggccaacagagatcttgtttatttttcataacttccaatgcagaacaagttctgtacgtgggtatttgtaccattgcgacatcacactgctagccatgttctgtatcctgtagtgtggtaactggtaagcatcaaatatggacatcggttttgatttttttctgctcgttttttccccagtatatagacagtcaaagctataggcttctgtggccttcacaatttttg

SEQ ID NO: 13309 - DNA, 1294 bp, Zea Mays
gatgttttccaggcaaaccccaattttgttgaagatgagaaggcatatgagaatctaaagagaagcatcctgggagcagagtcttctgaagatgaagaaggatcagatgctgcttctgatgatgatgatgatgatgatgatgaatctgatgaagaggatgaggaacaaatggagataagggatagaacagagacaaatcttgtgaatcttagaagaacaatatatttgactattatgtctagtgttgattttgaagaagctggacacaagcttatgaaaattaagcttgagcctggtcaagagatggagctgtgcattatgcttcttgagtgttgcagtcaggagagaacatatcttcgttattatgggctgctaggacagcgtttttgcatgatcaataaagtgtaccaagagaacttcgaaaaatgctttgtgcaacaatattcgatgattcatcgtcttgaaacaaacaagttgacagaggaagacacaacatcatcttctcgtattttcataaaaatattgttccaagaattatcggagcacctgggcatacgcctactcaatgagaggctgaatgatcctaacatgcaaggttcctttgagtctatcttcccaaaggatcatccgaagaatacaaggttctcgatcaacttcttcacgtccattggtcttggtggtatcacggaaagcctgagggagtacttgaagaacatgccacgtctaataatgcagcagcagaagccagaatcatcagagtcagattcaagtggatccgaatctggttcggaaagctctagttcagggtccagttctgagcctgagtcagaatcaagccctgatgagcgtgacagaaggcgaagtaataagaggaggaagaggacttgagagcacttccaactatgctttttggaattcatgtatttggttttgtttaaatgtgcttcttcagtatacatgtgcagtatgtgatctagctcttgatgtgttagtggtaatcagaaagccgtaacagtaagatactattcgaacttgtacgtggcaggttggtagtccagcaacaaagggccaacagagatcttgtttatttttcataacttccaatgcagaacaagttctgtacgtgggtatttgtaccattgcgacatcacactgctagccatgttctgtatcctgtagtgtggtaactggtaagcatcaaatatggacatcggttttgatttttttctgctcgttttttccccagtatatagacagtcaaagctataggcttctgtggccttcacaatttttg

SEQ ID NO: 13310 - DNA, 1156 bp, Zea Mays
agacgactacctttgtgggacaaattttgaatcgccgggcgactttttttgtgagacggagggagtattcatgacttgacatcactcatggagctgtgcattatgcttcttgagtgttgcagtcaggagagaacatatcttcgttattatgggctgctaggacagcgtttttgcatgatcaataaagtgtaccaagagaacttcgaaaaatgctttgtgcaacaatattcgatgattcatcgtcttgaaacaaacaagttgaggaatgttgccaagttctttgcacatttgttggggactgatgcactcccttggcatgttttggcttacatcaggttgacagaggaagacacaacatcatcttctcgtattttcataaaaatattgttccaagaattatcggagcacctgggcatacgcctactcaatgagaggctgaatgatcctaacatgcaaggttcctttgagtctatcttcccaaaggatcatccgaagaatacaaggttctcgatcaacttcttcacgtccattggtcttggtggtatcacggaaagcctgagggagtacttgaagaacatgccacgtctaataatgcagcagcagaagccagaatcatcagagtcagattcaagtggatccgaatctggttcggaaagctctagttcagggtccagttctgagcctgagtcagaatcaagccctgatgagcgtgacagaaggcgaagtaataagaggaggaagaggacttgagagcacttccaactatgctttttggaattcatgtatttggttttgtttaaatgtgcttcttcagtatacatgtgcagtatgtgatctagctcttgatgtgttagtggtaatcagaaagccgtaacagtaagatactattcgaacttgtacgtggcaggttggtagtccagcaacaaagggccaacagagatcttgtttatttttcataacttccaatgcagaacaagttctgtacgtgggtatttgtaccattgcgacatcacactgctagccatgttctgtatcctgtagtgtggtaactggtaagcatcaaatatggacatcggttttgatttttttctgctcgttttttccccagtatatagacagtcaaagctataggcttctgtggccttcacaatttttg

SEQ ID NO: 13311 - DNA, 4045 bp, Zea Mays
ccacgccctgcgccccaccagatcctcttcctcctcggtttgcgagctcatcgattgctcactcatcactctatgctcacgagctccagccttcagagcgctataattccggcccgatcctttgttggaaaccttctccgagctttccacggttcatgggagcgcgagtggtgggtgcagcaagctccagccttttctggtgggtctgagctgagctgagctttgagagatccatcgagctggtctggatcgctagtttcgctggttggccgtggagttgatttgatttctgggagcgatgtcgcgccggctgtcgctgccggcggggtcgcaagtcacggtgactgtgtcgccgacgaggggcaaggctgagagccccggggacggggtgatcaagaggagcggcggcaggatcgggctcaccagccctgcgccgaggcactcgctcggtggggcggggtcctccaccatccccactgtgcagctctcgcccgtgcgccggagcggtggcagccggtacgcgtcgctggacggcggtgcaggcgcggatgacagcgccgagttcgtgcactacaccgtgcacatcccgcccacacccgagcggacggtggcggcgtccgctgactccgtcgatgcgccagcgccgacggcgtacgacgaggacggcggcgcggcgggggtgcgggcgcagaggagctacatctccggtaccatcttcacgggcggactcaaccaggccacgcgcggccacgttctcaacacctccgccaacagcgccgcggtcgcggcctccgccaacatgtcgtgcaagatgcgcggctgcgacatgccggcgttcctgtcctctggcgccggcggcgggccgtgcgattgcggcttcatgatctgccgcgagtgctacgcggactgcgtcgcggccgcggggaactgccccgggtgcaaggagccctactctgcggggagcgacaccgacgacgatggcgaggacgatgaggccgtctcctcgtccgaggagcgggaccagctgccgctcacgtcaatggcgaagcgcttctccctcatacactccatgaagatgcccagcaacaacggtggcggcggaggaaagccggccgagttcgaccacgcgcgctggctcttcgagaccaagggcacctatggctacggcaacgcgctctggcccaaggacggacacggcggcggtggcggtggcggcggcttctctggattcgaggagccgcccaacttcggctcccgctgccgccggccgctcaccaggaagaccagcatatctcaggccatcctcagtccttacaggctgctgatcgcaatccgtctcgtagcgctggggttcttcctgacatggcgtattcggcacccgaacccagaggcggtgtggttgtgggcgctttcggtgacgtgcgaggtctggttcgccttctcctggcttctcgacagcctccccaagctctgccccatccaccgggccgccgacctggatgtccttgccgagcgcttcgagctgcccaccgcccgcaatcccaagggccactccgacctgcccggcatcgacgtcttcgtctccaccgccgacccggagaaggagccgccgctcgtcacagccaacaccatcctctccatcctcgcggccgactacccggtcgagaagctcgcctgctacctctccgacgacggcggcgcgctgctcaccttcgaagcgctcgccgagacagcaagcttcgctcgcacctgggtgccgttctgccgcaagcacggcgttgagccgcgctgcccggaggcctacttcggccagaagagggacttcctcaggaacaaggtgcgtgtggatttcgtccgggagcggcggaaggtgaagcgggagtacgacgagttcaaggtcagggtgaactcgctgcccgaggccatccgccggcgctccgacgcctacaacgccggcgaggagctgcgcgccaggagaaggcagcaggaggaggccatggcggccggcaccattcttggagcgttgcctgaggcagcaggggccgtgaaggcgacatggatgtccgacggctcgcagtggcctggcacttggctcacctctgcaccagaccactcccgtggtgatcacgctggcatcattcaggcaatgcttgcgcctccgacatcagagcccgtgctgggcgcggagccggcggagtccggcgggctgatcgacacaacgggcgtggacatccggctgccgatgctggtgtacgtgtcccgcgagaagcgcccggggtacgaccacaacaagaaggccggcgccatgaacgcgctggtgcgcacgagcgccatcatgtcgaacgggcccttcatcctcaacctcgactgcgaccactacgtgcacaactcggcggcgctccgtgaggggatgtgcttcatgctcgatcgcggcggcgaccgcgtctgctatgtccagttcccgcagcggttcgagggcatcgaccccaacgaccggtacgccaaccacaacctcgtcttcttcgacgtcgccatgcgcgccatggacgggctgcagggacctatgtacgtcggcaccggctgcgtcttccgccgcaccgcgctgtacgggttcagcccgccgcgcgccacggagcaccacggttggctcgggaggaggaagatcaagctgttgctgaggaagcccaccatgggaaagaagacggacagggagaacaacagcgataaggagatgatgctgccgccgatcgaggacgacgccttccagcagctcgacgacatcgagtcgtccgcgctgctcccgcggcggttcggcagctcggcaacgttcgtggcgtccatccccgtggcagagtaccaggggcggctcctgcaggacacgcccggcgcgcaccagggccgccccgccggagccctggccgtgcctcgcgagccgcttgacgcggacaccgtcgcggaggccatcagcgtcatctcgtgcttctacgaggacaagacggagtgggggcggcgcatcgggtggatctacgggtcggtgacggaggacgtggtgacggggtaccggatgcacaaccgcgggtggcggtccgtgtactgcgtgacgcggcgcgacgcgttccgcggcacggcgcccatcaacctcaccgaccggttgcaccaggtgctccggtgggcgacggggtccgtggagatcttcttctcccgcaacaacgccctgttcgcgtccccgcggatgaagttcctccagcgcgtggcctacttcaacgtgggcatgtacccgttcacctccatcttcctcctcgtctactgcgtgctcccggccgtctccctcttctccggcaagttcatcgtgcagtcgctcaacgccaccttcctggcgctgctgctcgtcatcaccattacgctctgcctgctggccctgctggagatcaagtggtccgggatcacgctgcacgagtggtggcgcaacgagcagttctgggtgatcggcgggactagcgcgcacccggcggccgtgctgcagggcctcctcaaggtgattgccggcgtggacatctccttcacgctgacgtcgaagccgggcaccggcgacgacggcgaggaggacgcgttcgcggagctgtacgaggtgcggtggagcttcttgatggtgccgcccgtgacgatcatgatggtgaacgcggtggcggtagccgtggcgtcggcacgcacgctgtacagcgagttcccgcagtggagcaagctgcttggcggcgccttcttcagcttctgggtgctctgccacctctacccgttcgccaagggcctcctgggccgccgcggccgtgtgccgaccatcgtgttcgtctggtcggggctcatctccatgaccatctcgctgctgtgggtctacatcagccctcctgcgggtgccagggagctcatcggtggtggcggattcagcttcccgtagtagcgagatggataccagcgattggatgtcaaaattctggtttaggagccgtcagatttgaccaaaatgaagcacaagacataattttcaagt

SEQ ID NO: 13312 - DNA, 4240 bp, Zea Mays
ccacgccctgcgccccaccagatcctcttcctcctcggtttgcgagctcatcgattgctcactcatcactctatgctcacgagctccagccttcagagcgctataattccggcccgatcctttgttggaaaccttctccgagctttccacggttcatgggagcgcgagtggtgggtgcagcaagctccagccttttctggtgggtctgagctgagctgagctttgagagatccatcgagctggtctggatcgctagtttcgctggttggccgtggagttgatttgatttctgggagcgatgtcgcgccggctgtcgctgccggcggggtcgcaagtcacggtgactgtgtcgccgacgaggggcaaggctgagagccccggggacggggtgatcaagaggagcggcggcaggatcgggctcaccagccctgcgccgaggcactcgctcggtggggcggggtcctccaccatccccactgtgcagctctcgcccgtgcgccggagcggtggcagccggtacgcgtcgctggacggcggtgcaggcgcggatgacagcgccgagttcgtgcactacaccgtgcacatcccgcccacacccgagcggacggtggcggcgtccgctgactccgtcgatgcgccagcgccgacggcgtacgacgaggacggcggcgcggcgggggtgcgggcgcagaggagctacatctccggtaccatcttcacgggcggactcaaccaggccacgcgcggccacgttctcaacacctccgccaacagcgccgcggtcgcggcctccgccaacatgtcgtgcaagatgcgcggctgcgacatgccggcgttcctgtcctctggcgccggcggcgggccgtgcgattgcggcttcatgatctgccgcgagtgctacgcggactgcgtcgcggccgcggggaactgccccgggtgcaaggagccctactctgcggggagcgacaccgacgacgatggcgaggacgatgaggccgtctcctcgtccgaggagcgggaccagctgccgctcacgtcaatggcgaagcgcttctccctcatacactccatgaagatgcccagcaacaacggtggcggcggaggaaagccggccgagttcgaccacgcgcgctggctcttcgagaccaagggcacctatggctacggcaacgcgctctggcccaaggacggacacggcggcggtggcggtggcggcggcttctctggattcgaggagccgcccaacttcggctcccgctgccgccggccgctcaccaggaagaccagcatatctcaggccatcctcagtccttacagcgctggggttcttcctgacatggcgtattcggcacccgaacccagaggcggtgtggttgtgggcgctttcggtgacgtgcgaggtctggttcgccttctcctggcttctcgacagcctccccaagctctgccccatccaccgggccgccgacctggatgtccttgccgagcgcttcgagctgcccaccgcccgcaatcccaagggccactccgacctgcccggcatcgacgtcttcgtctccaccgccgacccggagaaggagccgccgctcgtcacagccaacaccatcctctccatcctcgcggccgactacccggtcgagaagctcgcctgctacctctccgacgacggcggcgcgctgctcaccttcgaagcgctcgccgagacagcaagcttcgctcgcacctgggtgccgttctgccgcaagcacggcgttgagccgcgctgcccggaggcctacttcggccagaagagggacttcctcaggaacaaggtgcgtgtggatttcgtccgggagcggcggaaggtgaagcgggagtacgacgagttcaaggtcagggtgaactcgctgcccgaggccatccgccggcgctccgacgcctacaacgccggcgaggagctgcgcgccaggagaaggcagcaggaggaggccatggcggccggcaccattcttggagcgttgcctgaggcagcaggggccgtgaaggcgacatggatgtccgacggctcgcagtggcctggcacttggctcacctctgcaccagaccactcccgtggtgatcacgctggcatcattcaggcaatgcttgcgcctccgacatcagagcccgtgctgggcgcggagccggcggagtccggcgggctgatcgacacaacgggcgtggacatccggctgccgatgctggtgtacgtgtcccgcgagaagcgcccggggtacgaccacaacaagaaggccggcgccatgaacgcgctggtgcgcacgagcgccatcatgtcgaacgggcccttcatcctcaacctcgactgcgaccactacgtgcacaactcggcggcgctccgtgaggggatgtgcttcatgctcgatcgcggcggcgaccgcgtctgctatgtccagttcccgcagcggttcgagggcatcgaccccaacgaccggtacgccaaccacaacctcgtcttcttcgacgtcgccatgcgcgccatggacgggctgcagggacctatgtacgtcggcaccggctgcgtcttccgccgcaccgcgctgtacgggttcagcccgccgcgcgccacggagcaccacggttggctcgggaggaggaagatcaagctgttgctgaggaagcccaccatgggaaagaagacggacagggagaacaacagcgataaggagatgatgctgccgccgatcgaggacgacgccttccagcagctcgacgacatcgagtcgtccgcgctgctcccgcggcggttcggcagctcggcaacgttcgtggcgtccatccccgtggcagagtaccaggggcggctcctgcaggacacgcccggcgcgcaccagggccgccccgccggagccctggccgtgcctcgcgagccgcttgacgcggacaccgtcgcggaggccatcagcgtcatctcgtgcttctacgaggacaagacggagtgggggcggcgcatcgggtggatctacgggtcggtgacggaggacgtggtgacggggtaccggatgcacaaccgcgggtggcggtccgtgtactgcgtgacgcggcgcgacgcgttccgcggcacggcgcccatcaacctcaccgaccggttgcaccaggtgctccggtgggcgacggggtccgtggagatcttcttctcccgcaacaacgccctgttcgcgtccccgcggatgaagttcctccagcgcgtggcctacttcaacgtgggcatgtacccgttcacctccatcttcctcctcgtctactgcgtgctcccggccgtctccctcttctccggcaagttcatcgtgcagtcgctcaacgccaccttcctggcgctgctgctcgtcatcaccattacgctctgcctgctggccctgctggagatcaagtggtccgggatcacgctgcacgagtggtggcgcaacgagcagttctgggtgatcggcgggactagcgcgcacccggcggccgtgctgcagggcctcctcaaggtgattgccggcgtggacatctccttcacgctgacgtcgaagccgggcaccggcgacgacggcgaggaggacgcgttcgcggagctgtacgaggtgcggtggagcttcttgatggtgccgcccgtgacgatcatgatggtgaacgcggtggcggtagccgtggcgtcggcacgcacgctgtacagcgagttcccgcagtggagcaagctgcttggcggcgccttcttcagcttctgggtgctctgccacctctacccgttcgccaagggcctcctgggccgccgcggccgtgtgccgaccatcgtgttcgtctggtcggggctcatctccatgaccatctcgctgctgtgggtctacatcagccctcctgcgggtgccagggagctcatcggtggtggcggattcagcttcccgtagtagcgagatggataccagcggtaatgttgttatgttagcatgtgttgtctgaactgtatccgaagagaacctacatgaaggtgttcttgcttcatggggtgctgttccttaatagctgtgatggactgtgattcttcagtacctgacgagctactgtcattgtatcaaaattgcaacttgcttaagttgtttatgttttttctaactgtatcgtcacctattcatgtttctatcagtacagattggatgtcaaaattctggtttaggagccgtcagatttgaccaaaatgaagcacaagacataattttcaagt

SEQ ID NO: 13313 - DNA, 2354 bp, Zea Mays
tcccaagtttacgacccgacgtccgagggggagaggttcctctgacgtactgcagggggcagtagggtcactgcacgcgggccctgtcgcacgcgggggccacgcggcagtgccctcttcccacgtcagaggatctcgttcccgtccgaggacccccgcttctccttctccttgctcggacccctacagacaatcacacatatacacacacacgcagcaggtacccgcgctcgtgctcttaccgcgccgggatgggcgcgaaggggatggcgacggcggcggggacggcggtgttgctatacctggtgctgtcgggccggctctgcggggacgccgccggcgacggcggcaacctggatgaccagctgatatcgtcggctgtttcggcggcggctgaggcgcggaggcggaggaaggaggacgcccgggcgcggcgggagcagcggcgggcgtcgcgcaccaagtggcggtggcccgagcgcgccccggacgggtggggcgaggcggccgccttggccgcgcgcaccgtgcgcttcacctgggcggagacgctcggcaagtgggccctaggggaggtctccttcggtatcaagcactacatgcgccagcagggcaatctgcagcatgagtatgctggaagtgattctgtactactggatgggcctgaggtaaggcaggagctgatttcgctgctcagatatctgaagcaatgcatgtatttctcgaagaagccatacaacgtgtttttggagtatggtggttatggccagaatgatgttcttataaagaaatctaaggcgagggtgcatcttgaagcctgccttcacaattgtctgtgacagaagtagccaatgctttctcctcttcattaggggggctatcagtgttaaggagcggttgacagcagcaactggcgcagaggttccatttcatcacgttgtggtccaggaaggtcaagtctccaacctagtgttgggttacgctcactgtggaatggttgtagcagctcgatggattgcaaaacaagccattccttgcctgagtaaagcaatcgagcaattcccagaatatgaggttaagatcattggacattcaatgggagctgggattgcaacaatactaacatacatccttcgcgagaatgagaagctggcatcatccacttgtattgcatttgggccagctgcttgcatgacatgggacttggctgagtcgggtaaagactttgttacctccatcgttaacagaaatgacctagtgccatcacttggcctagtttctgctgccaagcttcgggcagaggttatgtcatcgtcttgggcacatgaccttcgcaaacaaattcagcagactagattcttaggttttgtgaaccgttctgtgagtttcataaggtctcatgtgccctttgtctctgatccaagatcgaaggttgtggatgttgatatgatgcaatctcagagtcctgaggctgggagtaagccttcagcagatacccatgctgtggtgaagaaacgccctgcactggcttgctggtcatgtgtggctgcacccaaacagagtatggaatcgtcaatacaaattgagggcacgaaagttcaaaccgacactggtgtccaaactgagaaaactaccgaagcggcaactgctgcgctagtctcaatccatcttggtgaactaaaccttcaagaaccagataacagagaggaaaagggatcagcattgacagaaacagatgaagacgccatggagcttctggagtccttgaccgacgagaagcagttgccatcatcgtcaagctctggtcaagagccacaccagctgtaccccccagggaaaatactccacatggttggattgccagcagcggaagaggcaaccacgagtcagcaaggagcccaggaggaggtcatcgccctatatgagacaccccgacatttgtacagtaagattcgcctggcgaggtccatgataggagaacattacatgcccaagtacatcaagacaatggagcagttgatagacaagcttgcagaggacatcgacgaccagctggactccttgtagcatcaaaagtgtgtacaggataattattgtacagatcatgaaaaggaaagtcattctttcagattgcttgtgcgtaattgtagttggtttaagttttgtgatggcgatctagaagatgtacaacactgccagttgggctctggtctgtttattcttggtcattccactttggcaggcacctcaagaaaagctcaaagagctgcgcctggtgatgatctctgtaatttcaacagcactagttttctttagctgtgaatatttaatatattaaccattaatttgtgggc

SEQ ID NO: 13314 - DNA, 1779 bp, Zea Mays
aagaaacgcccccaatctgcgcgagtttctttccctcgtgggcaatctgcagcatgagtatgctggaagtgattctgtactactggatgggcctgaggtaaggcaggagctgatttcgctgctcagatatctgaagcaatgcatgtatttctcgaagaagccatacaacgtgtttttggagtatggtggttatggccagaatgatgttcttataaagaaatctaaggcgaggatcttgaagcctgccttcacaattgtctgtgacagaagtagccaatgctttctcctcttcattaggggggctatcagtgttaaggagcggttgacagcagcaactggcgcagaggttccatttcatcacgttgtggtccaggaaggtcaagtctccaacctagtgttgggttacgctcactgtggaatggttgtagcagctcgatggattgcaaaacaagccattccttgcctgagtaaagcaatcgagcaattcccagaatatgaggttaagatcattggacattcaatgggagctgggattgcaacaatactaacatacatccttcgcgagaatgagaagctggcatcatccacttgtattgcatttgggccagctgcttgcatgacatgggacttggctgagtcgggtaaagactttgttacctccatcgttaacagaaatgacctagtgccatcacttggcctagtttctgctgccaagcttcgggcagaggttatgtcatcgtcttgggcacatgaccttcgcaaacaaattcagcagactagattcttaggttttgtgaaccgttctgtgagtttcataaggtctcatgtgccctttgtctctgatccaagatcgaaggttgtggatgttgatatgatgcaatctcagagtcctgaggctgggagtaagccttcagcagatacccatgctgtggtgaagaaacgccctgcactggcttgctggtcatgtgtggctgcacccaaacagagtatggaatcgtcaatacaaattgagggcacgaaagttcaaaccgacactggtgtccaaactgagaaaactaccgaagcggcaactgctgcgctagtctcaatccatcttggtgaactaaaccttcaagaaccagataacagagaggaaaagggatcagcattgacagaaacagatgaagacgccatggagcttctggagtccttgaccgacgagaagcagttgccatcatcgtcaagctctggtcaagagccacaccagctgtaccccccagggaaaatactccacatggttggattgccagcagcggaagaggcaaccacgagtcagcaaggagcccaggaggaggtcatcgccctatatgagacaccccgacatttgtacagtaagattcgcctggcgaggtccatgataggagaacattacatgcccaagtacatcaagacaatggagcagttgatagacaagcttgcagaggacatcgacgaccagctggactccttgtagcatcaaaagtgtgtacaggataattattgtacagatcatgaaaaggaaagtcattctttcagattgcttgtgcgtaattgtagttggtttaagttttgtgatggcgatctagaagatgtacaacactgccagttgggctctggtctgtttattcttggtcattccactttggcaggcacctcaagaaaagctcaaagagctgcgcctggtgatgatctctgtaatttcaacagcactagttttctttagctgtgaatatttaatatattaaccattaatttgtgggc

SEQ ID NO: 13315 - DNA, 1363 bp, Zea Mays
cactcttgcagtaaagtatcagcaacggactttaggattctctagtgctgagcgggaatctgaagaaaatagattgcctaagtactgagatcattggacattcaatgggagctgggattgcaacaatactaacatacatccttcgcgagaatgagaagctggcatcatccacttgtattgcatttgggccagctgcttgcatgacatgggacttggctgagtcgggtaaagactttgttacctccatcgttaacagaaatgacctagtgccatcacttggcctagtttctgctgccaagcttcgggcagaggttatgtcatcgtcttgggcacatgaccttcgcaaacaaattcagcagactagattcttaggttttgtgaaccgttctgtgagtttcataaggtctcatgtgccctttgtctctgatccaagatcgaaggttgtggatgttgatatgatgcaatctcagagtcctgaggctgggagtaagccttcagcagatacccatgctgtggtgaagaaacgccctgcactggcttgctggtcatgtgtggctgcacccaaacagagtatggaatcgtcaatacaaattgagggcacgaaagttcaaaccgacactggtgtccaaactgagaaaactaccgaagcggcaactgctgcgctagtctcaatccatcttggtgaactaaaccttcaagaaccagataacagagaggaaaagggatcagcattgacagaaacagatgaagacgccatggagcttctggagtccttgaccgacgagaagcagttgccatcatcgtcaagctctggtcaagagccacaccagctgtaccccccagggaaaatactccacatggttggattgccagcagcggaagaggcaaccacgagtcagcaaggagcccaggaggaggtcatcgccctatatgagacaccccgacatttgtacagtaagattcgcctggcgaggtccatgataggagaacattacatgcccaagtacatcaagacaatggagcagttgatagacaagcttgcagaggacatcgacgaccagctggactccttgtagcatcaaaagtgtgtacaggataattattgtacagatcatgaaaaggaaagtcattctttcagattgcttgtgcgtaattgtagttggtttaagttttgtgatggcgatctagaagatgtacaacactgccagttgggctctggtctgtttattcttggtcattccactttggcaggcacctcaagaaaagctcaaagagctgcgcctggtgatgatctctgtaatttcaacagcactagttttctttagctgtgaatatttaatatattaaccattaatttgtgggc

SEQ ID NO: 13316 - DNA, 1975 bp, Zea Mays
caaccattttacccgttgccattggtatgctcctcctctgctccctcctcgtcgtctgtcgtctcctcgcgctcgtcctccgctgcccgactccggcgtcgtccccacagtccgcaccagccgacccaaccaccgctcaagccttaacccaacatttatctgtatcccgtggcaaggagcatctgcgcgtcacatccgcgatcgcgcgctctacgtcgcctcccgccgccgccgcacggccgcgacggatgctcggccaccgcttccctaccgccctccgcctcccacatggtctgctgcagaggaggagcatcatggcccgccgcggcctgaccatcatggccggtggcgaggcggagggtccgctcgcgggtttcttcgactacatggagcggctgcgcaactacgagcgctcgggcgtgccgcgcggcgccggcaccgactccgacgacgggtttgacctcggacgcatgcgccggctcctccgccggctcggcgacccccacacccacttcccggctgtgcatatcgccggcaccaaggggaaaggttctactgctgcattcctgtccaatatcatgagggcccaaggctacaatgtaggctgttattctagtccacatcttctaacaatacgtgaacggatttctgttggaaatgatggaggccctgttccagtacgactgttgagtgatctttttgacgaggctaagaaagccattgatgaagcaatagaatcggaaaatggatccctgacacattttgaggtttttactgctctctcatttcttctattctcacaacagaatgttgacattgccatcattgaagcaggtcttggtggagctagggatgcaacaaatgttattcgaagtactgaattagcagcatctgtcataacaacagtagggagggaacatctggttgcattgggtggctccctgcaaagcatagcaatagcaaagtctggaatcatcaaacaaggacgaccggttgtgattggtggaccattttcagaagatattgagcaaattattcgtgacagggcattcttgacacaatctcccgtgatatctgcttgtggtcatggcatcaagagctttacaaaatgcatagattgggataatgtcgattgaaatgcatgacataaacctccagctgctgggagatcatcaacgtcagaatgctgtcacagctgcttgcgcagctctctgtctctgtagtcaaggatgggatatctctgacgcttctatccaagccggcttagaggagacccaacttcctggtaggagccagtttctcacagcagaggaagcctcggcacttgggttcgatagcgcatccactgtactaattgatggagctcatactgaggaatctgcaaaggctttatcaggcgtgataaaaactgtcagaccagaagggcctctagcgcttgttgtcggaatggctagtgacaaggagcatcttgcgtttgccgagcagcttctctcaggtcaaacgcctgacgttgtgctgctgacagaggcgagcgtcgccggaggaacctcccgcgcaatgccagcctcgtccctgaaagaagtatggatagccgcggcacgcgatcgtggcatcgagtacgtggacatcggtggcgtcagtggtgctgaaaccccagagcacattagtgatctcttggactgcagtccatcgtcgaattccggaagaaagcccatggtgatcgggtgccaagacgtggcgccgttctcctcgaacctgatcgttgctgcctcccagctcctggagagcagaggcacggctccaggcctcatctgcgtgaccggctccctgcatctcgtcggggccgtactgcaacagatgggacggcattagaggaaacaaccatttcatctttcatgccatataatacactggatgattgtgtctacactgaactcggagtggtgggtggtgctgctgctgacgaatctctagt

SEQ ID NO: 13317 - DNA, 756 bp, Zea Mays
cattggtatgctcctcctctgctccctcctcgtcgtctgtcgtctcctcgcgctcgtcctccgctgcccgactccggcgtcgtccccacagtccgcaccagccgacccaaccaccgctcaagccttaacccaacatttatctgtatcccgtggcaaggagcatctgcgcgtcacatccgcgatcgcgcgctctacgtcgcctcccgccgccgccgcacggccgcgacggatgctcggccaccgcttccctaccgccctccgcctcccacatggtctgctgcagaggaggagcatcatggcccgccgcggcctgaccatcatggccggtggcgaggcggagggtccgctcgcgggtttcttcgactacatggagcggctgcgcaactacgagcgctcgggcgtgccgcgcggcgccggcaccgactccgacgacgggtttgacctcggacgcatgcgccggctcctccgccggctcggcgacccccacacccacttcccggctgtgcatatcgccggcaccaaggggaaaggttctactgctgcattcctgtccaatatcatgagggcccaaggctacaatgtaggctgttattctaggatcccgccgccgaaggacaagaccttccgcatcagctggctgtcacggcgcacttgttcaccgccgcagccattcacggcgtactgcgtctcgagtcgtggacggttcatcctccgccgcagcctctgatttttctcacaccgccgccgctattcact

SEQ ID NO: 13318 - DNA, 1952 bp, Zea Mays
cattggtatgctcctcctctgctccctcctcgtcgtctgtcgtctcctcgcgctcgtcctccgctgcccgactccggcgtcgtccccacagtccgcaccagccgacccaaccaccgctcaagccttaacccaacatttatctgtatcccgtggcaaggagcatctgcgcgtcacatccgcgatcgcgcgctctacgtcgcctcccgccgccgccgcacggccgcgacggatgctcggccaccgcttccctaccgccctccgcctcccacatggtctgctgcagaggaggagcatcatggcccgccgcggcctgaccatcatggccggtggcgaggcggagggtccgctcgcgggtttcttcgactacatggagcggctgcgcaactacgagcgctcgggcgtgccgcgcggcgccggcaccgactccgacgacgggtttgacctcggacgcatgcgccggctcctccgccggctcggcgacccccacacccacttcccggctgtgcatatcgccggcaccaaggggaaaggttctactgctgcattcctgtccaatatcatgagggcccaaggctacaatgtaggctgttattctagtccacatcttctaacaatacgtgaacggatttctgttggaaatgatggaggccctgttccagtacgactgttgagtgatctttttgacgaggctaagaaagccattgatgaagcaatagaatcggaaaatggatccctgacacattttgaggtttttactgctctctcatttcttctattctcacaacagaatgttgacattgccatcattgaagtcttggtggagctagggatgcaacaaatgttattcgaagtactgaattagcagcatctgtcataacaacagtagggagggaacatctggttgcattgggtggctccctgcaaagcatagcaatagcaaagtctggaatcatcaaacaaggacgaccggttgtgattggtggaccattttcagaagatattgagcaaattattcgtgacagggcattcttgacacaatctcccgtgatatctgcttgtggtcatggcatcaagagctttacaaaatgcatagattgggataatgtcgattgaaatgcatgacataaacctccagctgctgggagatcatcaacgtcagaatgctgtcacagctgcttgcgcagctctctgtctctgtagtcaaggatgggatatctctgacgcttctatccaagccggcttagaggagacccaacttcctggtaggagccagtttctcacagcagaggaagcctcggcacttgggttcgatagcgcatccactgtactaattgatggagctcatactgaggaatctgcaaaggctttatcaggcgtgataaaaactgtcagaccagaagggcctctagcgcttgttgtcggaatggctagtgacaaggagcatcttgcgtttgccgagcagcttctctcaggtcaaacgcctgacgttgtgctgctgacagaggcgagcgtcgccggaggaacctcccgcgcaatgccagcctcgtccctgaaagaagtatggatagccgcggcacgcgatcgtggcatcgagtacgtggacatcggtggcgtcagtggtgctgaaaccccagagcacattagtgatctcttggactgcagtccatcgtcgaattccggaagaaagcccatggtgatcgggtgccaagacgtggcgccgttctcctcgaacctgatcgttgctgcctcccagctcctggagagcagaggcacggctccaggcctcatctgcgtgaccggctccctgcatctcgtcggggccgtactgcaacagatgggacggcattagaggaaacaaccatttcatctttcatgccatataatacactggatgattgtgtctacactgaactcggagtggtgggtggtgctgctgctgacgaatctctagt

SEQ ID NO: 13319 - DNA, 2006 bp, Zea Mays
cattggtatgctcctcctctgctccctcctcgtcgtctgtcgtctcctcgcgctcgtcctccgctgcccgactccggcgtcgtccccacagtccgcaccagccgacccaaccaccgctcaagccttaacccaacatttatctgtatcccgtggcaaggagcatctgcgcgtcacatccgcgatcgcgcgctctacgtcgcctcccgccgccgccgcacggccgcgacggatgctcggccaccgcttccctaccgccctccgcctcccacatggtctgctgcagaggaggagcatcatggcccgccgcggcctgaccatcatggccggtggcgaggcggagggtccgctcgcgggtttcttcgactacatggagcggctgcgcaactacgagcgctcgggcgtgccgcgcggcgccggcaccgactccgacgacgggtttgacctcggacgcatgcgccggctcctccgccggctcggcgacccccacacccacttcccggctgtgcatatcgccggcaccaaggggaaaggttctactgctgcattcctgtccaatatcatgagggcccaaggctacaatgtaggctgttattctagtccacatcttctaacaatacgtgaacggatttctgttggaaatgatggaggccctgttccagtacgactgttgagtgatctttttgacgaggctaagaaagccattgatgaagcaatagaatcggaaaatggatccctgacacattttgaggtttttactgctctctcatttcttctattctcacaacagaatgttgacattgccatcattgaagtcttggtggagctagggatgcaacaaatgttattcgaagtactgaattagcagcatctgtcataacaacagtagggagggaacatctggttgcattgggtggctccctgcaaagcatagcaatagcaaagtctggaatcatcaaacaaggacgaccggttgtgattggtggaccattttcagaagatattgagcaaattattcgtgacagggcattcttgacacaatctcccgtgatatctgcttgtggtcatggcatcaagagctttacaaaatgcatagattgggataatggtttccatctgttttcaaatcatctgactgatcagcgcaaatcatccttttcagtcgattgaaatgcatgacataaacctccagctgctgggagatcatcaacgtcagaatgctgtcacagctgcttgcgcagctctctgtctctgtagtcaaggatgggatatctctgacgcttctatccaagccggcttagaggagacccaacttcctggtaggagccagtttctcacagcagaggaagcctcggcacttgggttcgatagcgcatccactgtactaattgatggagctcatactgaggaatctgcaaaggctttatcaggcgtgataaaaactgtcagaccagaagggcctctagcgcttgttgtcggaatggctagtgacaaggagcatcttgcgtttgccgagcagcttctctcaggtcaaacgcctgacgttgtgctgctgacagaggcgagcgtcgccggaggaacctcccgcgcaatgccagcctcgtccctgaaagaagtatggatagccgcggcacgcgatcgtggcatcgagtacgtggacatcggtggcgtcagtggtgctgaaaccccagagcacattagtgatctcttggactgcagtccatcgtcgaattccggaagaaagcccatggtgatcgggtgccaagacgtggcgccgttctcctcgaacctgatcgttgctgcctcccagctcctggagagcagaggcacggctccaggcctcatctgcgtgaccggctccctgcatctcgtcggggccgtactgcaacagatgggacggcattagaggaaacaaccatttcatctttcatgccatataatacactggatgattgtgtctacactgaactcggagtggtgggtggtgctgctgctgacgaatctctagt

SEQ ID NO: 13320 - DNA, 1945 bp, Zea Mays
cattggtatgctcctcctctgctccctcctcgtcgtctgtcgtctcctcgcgctcgtcctccgctgcccgactccggcgtcgtccccacagtccgcaccagccgacccaaccaccgctcaagccttaacccaacatttatctgtatcccgtggcaaggagcatctgcgcgtcacatccgcgatcgcgcgctctacgtcgcctcccgccgccgccgcacggccgcgacggatgctcggccaccgcttccctaccgccctccgcctcccacatggtctgctgcagaggaggagcatcatggcccgccgcggcctgaccatcatggccggtggcgaggcggagggtccgctcgcgggtttcttcgactacatggagcggctgcgcaactacgagcgctcgggcgtgccgcgcggcgccggcaccgactccgacgacgggtttgacctcggacgcatgcgccggctcctccgccggctcggcgacccccacacccacttcccggctgtgcatatcgccggcaccaaggggaaaggttctactgctgcattcctgtccaatatcatgagggcccaaggctacaatgtaggctgttattctagtccacatcttctaacaatacgtgaacggatttctgttggaaatgatggaggccctgttccagtacgactgttgagtgatctttttgacgaggctaagaaagccattgatgaagcaatagaatcggaaaatggatccctgacacattttgaggtcttggtggagctagggatgcaacaaatgttattcgaagtactgaattagcagcatctgtcataacaacagtagggagggaacatctggttgcattgggtggctccctgcaaagcatagcaatagcaaagtctggaatcatcaaacaaggacgaccggttgtgattggtggaccattttcagaagatattgagcaaattattcgtgacagggcattcttgacacaatctcccgtgatatctgcttgtggtcatggcatcaagagctttacaaaatgcatagattgggataatggtaagccgtatcaacgctgttacatcagcattaagatttcaagggatgtacccttgtcgattgaaatgcatgacataaacctccagctgctgggagatcatcaacgtcagaatgctgtcacagctgcttgcgcagctctctgtctctgtagtcaaggatgggatatctctgacgcttctatccaagccggcttagaggagacccaacttcctggtaggagccagtttctcacagcagaggaagcctcggcacttgggttcgatagcgcatccactgtactaattgatggagctcatactgaggaatctgcaaaggctttatcaggcgtgataaaaactgtcagaccagaagggcctctagcgcttgttgtcggaatggctagtgacaaggagcatcttgcgtttgccgagcagcttctctcaggtcaaacgcctgacgttgtgctgctgacagaggcgagcgtcgccggaggaacctcccgcgcaatgccagcctcgtccctgaaagaagtatggatagccgcggcacgcgatcgtggcatcgagtacgtggacatcggtggcgtcagtggtgctgaaaccccagagcacattagtgatctcttggactgcagtccatcgtcgaattccggaagaaagcccatggtgatcgggtgccaagacgtggcgccgttctcctcgaacctgatcgttgctgcctcccagctcctggagagcagaggcacggctccaggcctcatctgcgtgaccggctccctgcatctcgtcggggccgtactgcaacagatgggacggcattagaggaaacaaccatttcatctttcatgccatataatacactggatgattgtgtctacactgaactcggagtggtgggtggtgctgctgctgacgaatctctagt

SEQ ID NO: 13321 - DNA, 1959 bp, Zea Mays
cattggtatgctcctcctctgctccctcctcgtcgtctgtcgtctcctcgcgctcgtcctccgctgcccgactccggcgtcgtccccacagtccgcaccagccgacccaaccaccgctcaagccttaacccaacatttatctgtatcccgtggcaaggagcatctgcgcgtcacatccgcgatcgcgcgctctacgtcgcctcccgccgccgccgcacggccgcgacggatgctcggccaccgcttccctaccgccctccgcctcccacatggtctgctgcagaggaggagcatcatggcccgccgcggcctgaccatcatggccggtggcgaggcggagggtccgctcgcgggtttcttcgactacatggagcggctgcgcaactacgagcgctcgggcgtgccgcgcggcgccggcaccgactccgacgacgggtttgacctcggacgcatgcgccggctcctccgccggctcggcgacccccacacccacttcccggctgtgcatatcgccggcaccaaggggaaaggttctactgctgcattcctgtccaatatcatgagggcccaaggctacaatgtaggctgttattctagtccacatcttctaacaatacgtgaacggatttctgttggaaatgatggaggccctgttccagtacgactgttgagtgatctttttgacgaggctaagaaagccattgatgaagcaatagaatcggaaaatggatccctgacacattttgaggtttttactgctctctcatttcttctattctcacaacagaatgttgacattgccatcattgaagcaggtcttggtggagctagggatgcaacaaatgttattcgaagtactgaattagcagcatctgtcataacaacagtagggagggaacatctggttgcattgggtggctccctgcaaagcatagcaatagcaaagtctggaatcatcaaacaaggacgaccgggcattcttgacacaatctcccgtgatatctgcttgtggtcatggcatcaagagctttacaaaatgcatagattgggataatggtaagccgtatcaacgctgttacatcagcattaagatttcaagggatgtacccttgtcgattgaaatgcatgacataaacctccagctgctgggagatcatcaacgtcagaatgctgtcacagctgcttgcgcagctctctgtctctgtagtcaaggatgggatatctctgacgcttctatccaagccggcttagaggagacccaacttcctggtaggagccagtttctcacagcagaggaagcctcggcacttgggttcgatagcgcatccactgtactaattgatggagctcatactgaggaatctgcaaaggctttatcaggcgtgataaaaactgtcagaccagaagggcctctagcgcttgttgtcggaatggctagtgacaaggagcatcttgcgtttgccgagcagcttctctcaggtcaaacgcctgacgttgtgctgctgacagaggcgagcgtcgccggaggaacctcccgcgcaatgccagcctcgtccctgaaagaagtatggatagccgcggcacgcgatcgtggcatcgagtacgtggacatcggtggcgtcagtggtgctgaaaccccagagcacattagtgatctcttggactgcagtccatcgtcgaattccggaagaaagcccatggtgatcgggtgccaagacgtggcgccgttctcctcgaacctgatcgttgctgcctcccagctcctggagagcagaggcacggctccaggcctcatctgcgtgaccggctccctgcatctcgtcggggccgtactgcaacagatgggacggcattagaggaaacaaccatttcatctttcatgccatataatacactggatgattgtgtctacactgaactcggagtggtgggtggtgctgctgctgacgaatctctagt

SEQ ID NO: 13322 - DNA, 1540 bp, Zea Mays
gcgctcttctacgacgtaggttgtacttgtggcagatctccagtcgttctctcagagatgggcgtcgatgagacgccgtgctgttgtcgacgtggaaacacaggggcagacgcgagatggagaagtccacatcttctaacaatacgtgaacggatttctgttggaaatgatggaggccctgttccagtacgactgttgagtgatctttttgacgaggctaagaaagccattgatgaagcaatagaatcggaaaatggatccctgacacattttgaggtttttactgctctctcatttcttctattctcacaacagaatgttgacattgccatcattgaagcaggtcttggtggagctagggatgcaacaaatgttattcgaagtactgaattagcagcatctgtcataacaacagtagggagggaacatctggttgcattgggtggctccctgcaaagcatagcaatagcaaagtctggaatcatcaaacaaggacgaccggttgtgattggtggaccattttcagaagatattgagcaaattattcgtgacagggcattcttgacacaatctcccgtgatatctgcttgtggtcatggcatcaagagctttacaaaatgcatagattgggataatggtaagccgtatcaacgctgttacatcagcattaagatttcaagggatgtacccttgtcgattgaaatgcatgacataaacctccagctgctgggagatcatcaacgtcagaatgctgtcacagctgcttgcgcagctctctgtctctgtagtcaaggatgggatatctctgacgcttctatccaagccggcttagaggagacccaacttcctggtaggagccagtttctcacagcagaggaagcctcggcacttgggttcgatagcgcatccactgtactaattgatggagctcatactgaggaatctgcaaaggctttatcaggcgtgataaaaactgtcagaccagaagggcctctagcgcttgttgtcggaatggctagtgacaaggagcatcttgcgtttgccgagcagcttctctcaggtcaaacgcctgacgttgtgctgctgacagaggcgagcgtcgccggaggaacctcccgcgcaatgccagcctcgtccctgaaagaagtatggatagccgcggcacgcgatcgtggcatcgagtacgtggacatcggtggcgtcagtggtgctgaaaccccagagcacattagtgatctcttggactgcagtccatcgtcgaattccggaagaaagcccatggtgatcgggtgccaagacgtggcgccgttctcctcgaacctgatcgttgctgcctcccagctcctggagagcagaggcacggctccaggcctcatctgcgtgaccggctccctgcatctcgtcggggccgtactgcaacagatgggacggcattagaggaaacaaccatttcatctttcatgccatataatacactggatgattgtgtctacactgaactcggagtggtgggtggtgctgctgctgacgaatctctagt

SEQ ID NO: 13323 - DNA, 1571 bp, Zea Mays
ctggttgcgtcaaacctacaaaaagtaataattgagaacatatgatcgagtattgagattctctgcagttaactgcagttggaccactgacgtgtaggcccggtctgagctgaccccacaagtcagtgacccaattgcaggcaaagtatcgacaaacgagtccacatcttctaacaatacgtgaacggatttctgttggaaatgatggaggccctgttccagtacgactgttgagtgatctttttgacgaggctaagaaagccattgatgaagcaatagaatcggaaaatggatccctgacacattttgaggtttttactgctctctcatttcttctattctcacaacagaatgttgacattgccatcattgaagtcttggtggagctagggatgcaacaaatgttattcgaagtactgaattagcagcatctgtcataacaacagtagggagggaacatctggttgcattgggtggctccctgcaaagcatagcaatagcaaagtctggaatcatcaaacaaggacgaccggttgtgattggtggaccattttcagaagatattgagcaaattattcgtgacagggcattcttgacacaatctcccgtgatatctgcttgtggtcatggcatcaagagctttacaaaatgcatagattgggataatggtaagccgtatcaacgctgttacatcagcattaagatttcaagggatgtacccttgtcgattgaaatgcatgacataaacctccagctgctgggagatcatcaacgtcagaatgctgtcacagctgcttgcgcagctctctgtctctgtagtcaaggatgggatatctctgacgcttctatccaagccggcttagaggagacccaacttcctggtaggagccagtttctcacagcagaggaagcctcggcacttgggttcgatagcgcatccactgtactaattgatggagctcatactgaggaatctgcaaaggctttatcaggcgtgataaaaactgtcagaccagaagggcctctagcgcttgttgtcggaatggctagtgacaaggagcatcttgcgtttgccgagcagcttctctcaggtcaaacgcctgacgttgtgctgctgacagaggcgagcgtcgccggaggaacctcccgcgcaatgccagcctcgtccctgaaagaagtatggatagccgcggcacgcgatcgtggcatcgagtacgtggacatcggtggcgtcagtggtgctgaaaccccagagcacattagtgatctcttggactgcagtccatcgtcgaattccggaagaaagcccatggtgatcgggtgccaagacgtggcgccgttctcctcgaacctgatcgttgctgcctcccagctcctggagagcagaggcacggctccaggcctcatctgcgtgaccggctccctgcatctcgtcggggccgtactgcaacagatgggacggcattagaggaaacaaccatttcatctttcatgccatataatacactggatgattgtgtctacactgaactcggagtggtgggtggtgctgctgctgacgaatctctagt

SEQ ID NO: 13324 - DNA, 1423 bp, Zea Mays
ataaattgcatattctggtgctttaagaatgttttatgctattctccgaaacaaattgggaataaaagtccacatcttctaacaatacgtgaacggatttctgttggaaatgatggaggccctgttccagtacgactgttgagtgatctttttgacgaggctaagaaagccattgatgaagcaatagaatcggaaaatggatccctgacacattttgaggtttttactgctctctcatttcttctattctcacaacagaatgttgacattgccatcattgaagtcttggtggagctagggatgcaacaaatgttattcgaagtactgaattagcagcatctgtcataacaacagtagggagggaacatctggttgcattgggtggctccctgcaaagcatagcaatagcaaagtctggaatcatcaaacaaggacgaccggttgtgattggtggaccattttcagaagatattgagcaaattattcgtgacagggcattcttgacacaatctcccgtgatatctgcttgtggtcatggcatcaagagctttacaaaatgcatagattgggataatgtcgattgaaatgcatgacataaacctccagctgctgggagatcatcaacgtcagaatgctgtcacagctgcttgcgcagctctctgtctctgtagtcaaggatgggatatctctgacgcttctatccaagccggcttagaggagacccaacttcctggtaggagccagtttctcacagcagaggaagcctcggcacttgggttcgatagcgcatccactgtactaattgatggagctcatactgaggaatctgcaaaggctttatcaggcgtgataaaaactgtcagaccagaagggcctctagcgcttgttgtcggaatggctagtgacaaggagcatcttgcgtttgccgagcagcttctctcaggtcaaacgcctgacgttgtgctgctgacagaggcgagcgtcgccggaggaacctcccgcgcaatgccagcctcgtccctgaaagaagtatggatagccgcggcacgcgatcgtggcatcgagtacgtggacatcggtggcgtcagtggtgctgaaaccccagagcacattagtgatctcttggactgcagtccatcgtcgaattccggaagaaagcccatggtgatcgggtgccaagacgtggcgccgttctcctcgaacctgatcgttgctgcctcccagctcctggagagcagaggcacggctccaggcctcatctgcgtgaccggctccctgcatctcgtcggggccgtactgcaacagatgggacggcattagaggaaacaaccatttcatctttcatgccatataatacactggatgattgtgtctacactgaactcggagtggtgggtggtgctgctgctgacgaatctctagt

SEQ ID NO: 13325 - DNA, 1442 bp, Zea Mays
gtgagcactgctatttatggctgtcagtccacatcttctaacaatacgtgaacggatttctgttggaaatgatggaggccctgttccagtacgactgttgagtgatctttttgacgaggctaagaaagccattgatgaagcaatagaatcggaaaatggatccctgacacattttgaggtttttactgctctctcatttcttctattctcacaacagaatgttgacattgccatcattgaagcaggtcttggtggagctagggatgcaacaaatgttattcgaagtactgaattagcagcatctgtcataacaacagtagggagggaacatctggttgcattgggtggctccctgcaaagcatagcaatagcaaagtctggaatcatcaaacaaggacgaccggttgtgattggtggaccattttcagaagatattgagcaaattattcgtgacagggcattcttgacacaatctcccgtgatatctgcttgtggtcatggcatcaagagctttacaaaatgcatagattgggataatggtaagccgtatcaacgctgttacatcagcattaagatttcaagggatgtacccttgtcgattgaaatgcatgacataaacctccagctgctgggagatcatcaacgtcagaatgctgtcacagctgcttgcgcagctctctgtctctgtagtcaaggatgggatatctctgacgcttctatccaagccggcttagaggagacccaacttcctggtaggagccagtttctcacagcagaggaagcctcggcacttgggttcgatagcgcatccactgtactaattgatggagctcatactgaggaatctgcaaaggctttatcaggcgtgataaaaactgtcagaccagaagggcctctagcgcttgttgtcggaatggctagtgacaaggagcatcttgcgtttgccgagcagcttctctcaggtcaaacgcctgacgttgtgctgctgacagaggcgagcgtcgccggaggaacctcccgcgcaatgccagcctcgtccctgaaagaagtatggatagccgcggcacgcgatcgtggcatcgagtacgtggacatcggtggcgtcagtggtgctgaaaccccagagcacattagtgatctcttggactgcagtccatcgtcgaattccggaagaaagcccatggtgatcgggtgccaagacgtggcgccgttctcctcgaacctgatcgttgctgcctcccagctcctggagagcagaggcacggctccaggcctcatctgcgtgaccggctccctgcatctcgtcggggccgtactgcaacagatgggacggcattagaggaaacaaccatttcatctttcatgccatataatacactggatgattgtgtctacactgaactcggagtggtgggtggtgctgctgctgacgaatctctagt

SEQ ID NO: 13326 - DNA, 1476 bp, Zea Mays
ggagaagataggggaactgttggggcgtggtattttcggtttgcaaggctaaaaccagttttcagtccacatcttctaacaatacgtgaacggatttctgttggaaatgatggaggccctgttccagtacgactgttgagtgatctttttgacgaggctaagaaagccattgatgaagcaatagaatcggaaaatggatccctgacacattttgaggtttttactgctctctcatttcttctattctcacaacagaatgttgacattgccatcattgaagtcttggtggagctagggatgcaacaaatgttattcgaagtactgaattagcagcatctgtcataacaacagtagggagggaacatctggttgcattgggtggctccctgcaaagcatagcaatagcaaagtctggaatcatcaaacaaggacgaccggttgtgattggtggaccattttcagaagatattgagcaaattattcgtgacagggcattcttgacacaatctcccgtgatatctgcttgtggtcatggcatcaagagctttacaaaatgcatagattgggataatggtaagccgtatcaacgctgttacatcagcattaagatttcaagggatgtacccttgtcgattgaaatgcatgacataaacctccagctgctgggagatcatcaacgtcagaatgctgtcacagctgcttgcgcagctctctgtctctgtagtcaaggatgggatatctctgacgcttctatccaagccggcttagaggagacccaacttcctggtaggagccagtttctcacagcagaggaagcctcggcacttgggttcgatagcgcatccactgtactaattgatggagctcatactgaggaatctgcaaaggctttatcaggcgtgataaaaactgtcagaccagaagggcctctagcgcttgttgtcggaatggctagtgacaaggagcatcttgcgtttgccgagcagcttctctcaggtcaaacgcctgacgttgtgctgctgacagaggcgagcgtcgccggaggaacctcccgcgcaatgccagcctcgtccctgaaagaagtatggatagccgcggcacgcgatcgtggcatcgagtacgtggacatcggtggcgtcagtggtgctgaaaccccagagcacattagtgatctcttggactgcagtccatcgtcgaattccggaagaaagcccatggtgatcgggtgccaagacgtggcgccgttctcctcgaacctgatcgttgctgcctcccagctcctggagagcagaggcacggctccaggcctcatctgcgtgaccggctccctgcatctcgtcggggccgtactgcaacagatgggacggcattagaggaaacaaccatttcatctttcatgccatataatacactggatgattgtgtctacactgaactcggagtggtgggtggtgctgctgctgacgaatctctagt

SEQ ID NO: 13327 - DNA, 1467 bp, Zea Mays
gaactgttggggcgtggtattttcggtttgcaaggctaaaaccagttttcagtccacatcttctaacaatacgtgaacggatttctgttggaaatgatggaggccctgttccagtacgactgttgagtgatctttttgacgaggctaagaaagccattgatgaagcaatagaatcggaaaatggatccctgacacattttgaggtttttactgctctctcatttcttctattctcacaacagaatgttgacattgccatcattgaagcaggtcttggtggagctagggatgcaacaaatgttattcgaagtactgaattagcagcatctgtcataacaacagtagggagggaacatctggttgcattgggtggctccctgcaaagcatagcaatagcaaagtctggaatcatcaaacaaggacgaccggttgtgattggtggaccattttcagaagatattgagcaaattattcgtgacagggcattcttgacacaatctcccgtgatatctgcttgtggtcatggcatcaagagctttacaaaatgcatagattgggataatggtaagccgtatcaacgctgttacatcagcattaagatttcaagggatgtacccttgtcgattgaaatgcatgacataaacctccagctgctgggagatcatcaacgtcagaatgctgtcacagctgcttgcgcagctctctgtctctgtagtcaaggatgggatatctctgacgcttctatccaagccggcttagaggagacccaacttcctggtaggagccagtttctcacagcagaggaagcctcggcacttgggttcgatagcgcatccactgtactaattgatggagctcatactgaggaatctgcaaaggctttatcaggcgtgataaaaactgtcagaccagaagggcctctagcgcttgttgtcggaatggctagtgacaaggagcatcttgcgtttgccgagcagcttctctcaggtcaaacgcctgacgttgtgctgctgacagaggcgagcgtcgccggaggaacctcccgcgcaatgccagcctcgtccctgaaagaagtatggatagccgcggcacgcgatcgtggcatcgagtacgtggacatcggtggcgtcagtggtgctgaaaccccagagcacattagtgatctcttggactgcagtccatcgtcgaattccggaagaaagcccatggtgatcgggtgccaagacgtggcgccgttctcctcgaacctgatcgttgctgcctcccagctcctggagagcagaggcacggctccaggcctcatctgcgtgaccggctccctgcatctcgtcggggccgtactgcaacagatgggacggcattagaggaaacaaccatttcatctttcatgccatataatacactggatgattgtgtctacactgaactcggagtggtgggtggtgctgctgctgacgaatctctagt

SEQ ID NO: 13328 - DNA, 1397 bp, Zea Mays
gtggtattttcggtttgcaaggctaaaaccagttttcagtccacatcttctaacaatacgtgaacggatttctgttggaaatgatggaggccctgttccagtacgactgttgagtgatctttttgacgaggctaagaaagccattgatgaagcaatagaatcggaaaatggatccctgacacattttgaggtttttactgctctctcatttcttctattctcacaacagaatgttgacattgccatcattgaagtcttggtggagctagggatgcaacaaatgttattcgaagtactgaattagcagcatctgtcataacaacagtagggagggaacatctggttgcattgggtggctccctgcaaagcatagcaatagcaaagtctggaatcatcaaacaaggacgaccgggcattcttgacacaatctcccgtgatatctgcttgtggtcatggcatcaagagctttacaaaatgcatagattgggataatggtaagccgtatcaacgctgttacatcagcattaagatttcaagggatgtacccttgtcgattgaaatgcatgacataaacctccagctgctgggagatcatcaacgtcagaatgctgtcacagctgcttgcgcagctctctgtctctgtagtcaaggatgggatatctctgacgcttctatccaagccggcttagaggagacccaacttcctggtaggagccagtttctcacagcagaggaagcctcggcacttgggttcgatagcgcatccactgtactaattgatggagctcatactgaggaatctgcaaaggctttatcaggcgtgataaaaactgtcagaccagaagggcctctagcgcttgttgtcggaatggctagtgacaaggagcatcttgcgtttgccgagcagcttctctcaggtcaaacgcctgacgttgtgctgctgacagaggcgagcgtcgccggaggaacctcccgcgcaatgccagcctcgtccctgaaagaagtatggatagccgcggcacgcgatcgtggcatcgagtacgtggacatcggtggcgtcagtggtgctgaaaccccagagcacattagtgatctcttggactgcagtccatcgtcgaattccggaagaaagcccatggtgatcgggtgccaagacgtggcgccgttctcctcgaacctgatcgttgctgcctcccagctcctggagagcagaggcacggctccaggcctcatctgcgtgaccggctccctgcatctcgtcggggccgtactgcaacagatgggacggcattagaggaaacaaccatttcatctttcatgccatataatacactggatgattgtgtctacactgaactcggagtggtgggtggtgctgctgctgacgaatctctagt

SEQ ID NO: 13329 - DNA, 3099 bp, Zea Mays
ctgattgtcatgtcaaccaacagttctcaaagtttgaacaaaacactactatagcttgccactccagtgccttgccaattgtttaaaatgatcattgactcaagaaatcacctaaaagcggcatagaatcatactgaattattgcagaactcaccaatttcacgcttgccattatcaggactatcacttccatggacaacgttcctgaaacgtcccattccatcataatttttttgatatgcaggtaaaatgtaagcacattccaactaaagtttaacaggtgagttacatgattaaatattacaacataaacacatgaaagagggtgactgccaaccttccagtttgaactgcaagatcaccccttatagtccctggttcagcttgaagggggttagtagctcctattaatttccgagctgatgcaacaacaccatcaccctcccaggcctttacagaatagaatagcaagattgtagctgtgaactttgcattggtcaaagtttggagttgcaaatatgtctatcccataagaaaaatatataccatgcagacaacagggccagaagttatgtaatcgatcagcttaggaaagaaaggtttatccttcaaatccttgtaatgctcctgagagaaaaggaagggtgaacaagacagagtatatgaaaagtattatgactgagctgattcaacataatgaacacctgggtccattttttatgtgaaaacgaagcacagaaagaatcaaagataggttgactagattccattggtgttttagtgaatgttaacataaaagatgaaagtgttaagttaatgacaaagggagatgtaggcaacgtcgctatcaacaattagtactaaaaaacacaagacagagcactcactcaaagaaaaagaacgatatggttcaggcagcaactcattctagcacttaatataagaaaaaatggtaatcaagcgctattacagcatcagatcagtacttagcacaccaaaaatcaaaggtacacaataagaatacgaaactatctgaatatcaggaacttctttaagggaataactgataataatagaagaaaagttggacggtatttctatgtagaaaggatacacataagggtcctaagctaaaattatagcactgggaggtatatttgacagacaaagatgataatgatgagcaacgttgcaagaaccacaatagttgtgcaacattgatgtgtttcgagaagcaaacctgcgccaagtccttggggcactggaaaagttttaagcctttcaacaaaaaccctttcttctcaaagcgagaaataatctctccaacctatatgcatcagatacattatgttttatctgaactgaaacatgaaagaaggtaaggaatagcaccatactggcaaaagtgtgggtgtgatgactttgtgatgtgggctctggataagcacaggcatttcattactatatctttgtacatgattctatccagcagggggatgcctagtagagttggtattatttgaaagtgtaagatcactctgaaaatttaattcttcctttggcaagttttcaataacaaacttcaagtagcgcaaactctaattagtagaggggttggaggggtaatagaaattgctgtatatgtggagttcctgaatcggttggtcatattttctttaaatgtgccttagctacattgatctgagcaattctgaaagtggtgcttaatttggcatctgttccaatgtctataaaggagttctccgatgtctggcttcagggcaagtggcccttaccgattcgtttagtcaagtttctttttgcgggttttgcttgggctctttggaccactaggaacaagatggccacatagaaaagattctcaaaagctccaactgatgtaatctatgttgctctatccttgttgcagaaatggagtttgttgttaaatgaagggcacatggagcgtctactccaagagaaggacaaggttgtttgttggatgatttgcttttagcccgaatgtgttgaatgttgatgtctacaagatctaaacttgtaatagggcttgttctgttttgatctttccttggaactggtataccccagcattgtactcattactgctttcttaaaagctgaggtttttgctctttaaaaaaaagtatgggtgtagggaacttgggaatgcataccagaccacgctgaacaccatctggtttgatcataatgtagctttgctcaacctcctacagattgtaagttcttgttaagcaaggtctcatcgtggaaaagtaagggactaaatgaaattgaagtagagtgctcaacttatcataattgatgtcaaaggatatcaacgtcgtcaaaaaaattcagacgtgtcacgaattctaaacttacacacaggcaccgttgccctgtgagacctaggcttgggcctttttggtccatgctttggccaggggacagatgaggatattgttttacccttagggctaatttggcaactccattttcccaagggattctcattttcctaaggtgaaatgaactaatttcctttgggaaaaatgaaaatctcttgggaaaatagggttgccaaactagcccttaggctgaaatttttcccatcgggagctaaacacaagacctgagggggtgctactcgagggctctaactgtctcatctagaggcttttccagtaaagtatgcaacacatatggcaacagaaataagacattctgtaaattcatgataaaaccactgacaaacaacaactataaccacgattatagtgtgtagggatatgtttgtgtgaagagaaagcatggtgcactaagttcatttcaatgtgtgcctttatagagttcaacgacaaatgtgagatcagttccctaaatgaatcaccgatgactgaccatggttattaaaacgtcgtttaaacgacgattaagcgtcgtttaaacgctaaaacgtgattagcggctaaagcgtccgcacgttttacaaaaacgcgtagaacgtccgttctggacgtttaaacgacgtttacacgtcggaacgtccgttctagacgttttctctgttatttggac

SEQ ID NO: 13330 - DNA, 287 bp, Zea Mays
gaccaaccgaggaggcgacgatgcgccgcgggacggcgcgagccctggccgccctcccgctccccgccggcgccgtgctcagccccagcccgagccggccgcggggcgtcgttgaagcggcggcgaaggagagggacgccgtcggcctcagcgcgcatgagggccggcgaatggtcccagcaaggggcggcgccgtcctcgcgagagccgacatggtctccatcctttaccacgagtccgtgcgaggcgagagcagagcagagcacagcacgcgacttttggattag

SEQ ID NO: 13331 - DNA, 3519 bp, Zea Mays
cgccacctcccttcccccgcaacgtccacatcatcccagtcccaaccgctctcttctcttcgagcgccatcgccgttcgaaaccagcgccgcccgatcccgagaatacccaccacccctctccctccctcccgctgccgcccccacctccagcagacgcgacgcgagcgcagtccaccctctacgactacacacactctctttctctctctgttctcctttcatctccactcgtccgctttgtcggaaccgttgctggtggctccggggttctgcgactgcgcatagggaatggcgatggcggcggcggttttggaggaggcgctgcgatggggtggaggaagcgttggggacgacaacgtggccgcgcgcagggcagaggaggccgcgataagaaggcatgaagcagccagttggttgcgaaaaacggttgggatagtgtgtgcaaaggacctgccggaagagccctctgaggaggaattccagcttggtctgagaaatggcattgtcctctgcaacgcactgaataaggtccagccaggcgccatacccaagattgtcggagtccagtcagatactgcggtccctgcagatggctcagctttgtgtgcttatcagtacttcgaaaatctgcgaaacttcgttgtcgttatacaagattttggcctcccaacatttgaggtgtctgatttggaaaagggtggcaaaagtgttcgaattgtggactgtgttcttgctctgaagtcattcagtgaaaaagaggctaccctgaatggttttcgaggagagcaaaacttatctcttgattgttctccagaatcctatgaggtaattacttcagacaaccttagcacgattattcgcacaattctcttagataaaaaaccagaagaaatcccactgattgttgaatcactactaaacaaagttattcaggaatacgagcttcgctttgcaaatcagaacttgatggatgaagagaagcaaaataacttgactacgaaggaggaagccagttttgcagtaaatggtagtaatgcagctcaaaagttccatctgaaggctgaaataaattttgatctacagcacaaacagatcaaggggttgagaggtactgtttcttctatcaagtctggaatggaacaactgaaattgcactactctgaggagttcactaaacttgggaagcatttgtacactatatccaatgctgcttctggataccataaagttcttgaggaaaatcgcaagctgtacaaccagatacaggatcttaaaggaaatattagagtttattgtcgagtgaggcctttcctacctgggcaaataagttccttaagcagtgttgctggaatggaagaaagaaccattacaataatgactcctacaaaatatggaaaagatggaaacaaatctttcactttcaacaaagtctttggtccagcagccactcaagatgaggtcttttcagatatgcaaccattgatacgatcagttcttgatggttttaatgtctgtatatttgcatatggccaaacaggatctgggaagacttatacaatgagcggacctaaagttttaacagaggaaagcctaggtgtcaactataaagcattaaatgacttatttaatcttcaagcacagagaaaggggacaatagattatgatatttctgtacagatgattgagatatacaatgaacaagtgagagatctccttcaggatagtggaaacagaagattagaaattaaaaatacatcacagaaaggacttgcggttccagatgcaagcatagttcctgtcacatctacgtctgatgttgttgaactgatgaatcaaggccaaaagaatcgtgcagtgggttcaacagccataaatgaccgcagtagccgctcccacagttgcttgactgttcatgtgcaaggaagagatttgacatctgggacagttttaagaggttgcatgcatctggtcgatctagcaggcagtgaaagggttgataagtccgaggttgttggagatagactaaaggaggctcagtacataaacaagtcactttcagcactgggagatgtgattgcatccctttcccaaaagaacacacatgtaccttaccgaaacagcaagctcacccagctcttgcaagattcacttgggggacaagcaaaaacacttatgtttgttcacataagcccagaacttgacgctgctggtgagaccataagcaccttgaaattcgctgaacgtgttgcctccgttgaacttggtgcagccaagcaaaataaagaaggcagcgagattagagagctcaaagaacagattgcttccctcaaggctgcattggctaagaaggaaggagaaccagagaacattctaagcacacggtcaagcccaagcatatacagaattagaaaaggcaatgcaacacctgcaactcctaaagacaggcagccaatggaagaagttgggagcctagaggtccagaatgtcttcactccagctcaaaagaggtcaaaaatgcatttgcttggcatcctcactgagaacaactcgtctaactcggttcagaattgcaatgttcctcagaaggaaataggattaggtggttgggttgacaagatggctcttggagacaaccactttgagaactctaattccatcctagagttggagcctgacacagcacagcttccaacttctttttatcatcaaagatatagtcctgtgcaacaaagctgtaggaccgaatcagtaccatcattgggcctacatggctttgattctgctactagttgttctaaccaagagattgtagtgtcaaccatgggactaaaagcttctggtgttgccaatagaggcgcctcaactgtaaaaaagtatgaagctacatcaacgaggagtacaaatctagcaagcaagtctccattgttgcagaaaaaactgcaaacaccaaccaggaacaggaaccagctaacttcgagcaccataggtggaagaagaacaccaaatggaaaaattggcattgcaaagtaatcaattaatgtgaaggcagatttgctgtgaccatgcttagaatggaaaaattggcattgcaaagtaatcaattaatgtcaaggtgggatagcacggagcctaaaaggactgcggtttttgaacctgcagaaggatcaagatcaatcatgtaaactgatgcacattccgataggtagcacattttatttattacattgaagttggaaacagacaccaaagaggacagaaagatgataaatatgaaggaaattcgaattgaggcttctgtacattttccacacttataaagtaatgttgtatcatgtgcctattagccatgacacatcatcacctgaaagttgcttgtattagacatgtgctaagtttacagtttctctgtctcatgtatgttaccctttctcataatggatcgccactcacagactaagagggtgattggtttcacccaactaaaatttagtcccttttacattgaattgaatgtttg

SEQ ID NO: 13332 - DNA, 3379 bp, Zea Mays
aaccagcgccgcccgatcccgagaatacccaccacccctctccctccctcccgctgccgcccccacctccagcagacgcgacgcgagcgcagtccaccctctacgactacacacactctctttctctctctgttctcctttcatctccactcgtccgctttgtcggaaccgttgctggtggctccggggttctgcgactgcgcatagggaatggcgatggcggcggcggttttggaggaggcgctgcgatggggtggaggaagcgttggggacgacaacgtggccgcgcgcagggcagaggaggccgcgataagaaggcatgaagcagccagttggttgcgaaaaacggttgggatagtgtgtgcaaaggacctgccggaagagccctctgaggaggaattccagcttggtctgagaaatggcattgtcctctgcaacgcactgaataaggtccagccaggcgccatacccaagattgtcggagtccagtcagatactgcggtccctgcagatggctcagctttgtgtgcttatcagtacttcgaaaatctgcgaaacttcgttgtcgttatacaagattttggcctcccaacatttgaggtgtctgatttggaaaagggtggcaaaagtgttcgaattgtggactgtgttcttgctctgaagtcattcagtgaaaaagaggctaccctgaatggttttcgaggagagcaaaacttatctcttgattgttctccagaatcctatgaggtaattacttcagacaaccttagcacgattattcgcacaattctcttagataaaaaaccagaagaaatcccactgattgttgaatcactactaaacaaagttattcaggaatacgagcttcgctttgcaaatcagaacttgatggatgaagagaagcaaaataacttgactacgaaggaggaagccagttttgcagtaaatggtagtaatgcagctcaaaagttccatctgaaggctgaaataaattttgatctacagcacaaacagatcaaggggttgagaggtactgtttcttctatcaagtctggaatggaacaactgaaattgcactactctgaggagttcactaaacttgggaagcatttgtacactatatccaatgctgcttctggataccataaagttcttgaggaaaatcgcaagctgtacaaccagatacaggatcttaaaggaaatattagagtttattgtcgagtgaggcctttcctacctgggcaaataagttccttaagcagtgttgctggaatggaagaaagaaccattacaataatgactcctacaaaatatggaaaagatggaaacaaatctttcactttcaacaaagtctttggtccagcagccactcaagatgaggtcttttcagatatgcaaccattgatacgatcagttcttgatggttttaatgtctgtatatttgcatatggccaaacaggatctgggaagacttatacaatgagcggacctaaagttttaacagaggaaagcctaggtgtcaactataaagcattaaatgacttatttaatcttcaagcacagagaaaggggacaatagattatgatatttctgtacagatgattgagatatacaatgaacaaaaaggacttgcggttccagatgcaagcatagttcctgtcacatctacgtctgatgttgttgaactgatgaatcaaggccaaaagaatcgtgcagtgggttcaacagccataaatgaccgcagtagccgctcccacagttgcttgactgttcatgtgcaaggaagagatttgacatctgggacagttttaagaggttgcatgcatctggtcgatctagcaggcagtgaaagggttgataagtccgaggttgttggagatagactaaaggaggctcagtacataaacaagtcactttcagcactgggagatgtgattgcatccctttcccaaaagaacacacatgtaccttaccgaaacagcaagctcacccagctcttgcaagattcacttgggggacaagcaaaaacacttatgtttgttcacataagcccagaacttgacgctgctggtgagaccataagcaccttgaaattcgctgaacgtgttgcctccgttgaacttggtgcagccaagcaaaataaagaaggcagcgagattagagagctcaaagaacagattgcttccctcaaggctgcattggctaagaaggaaggagaaccagagaacattctaagcacacggtcaagcccaagcatatacagaattagaaaaggcaatgcaacacctgcaactcctaaagacaggcagccaatggaagaagttgggagcctagaggtccagaatgtcttcactccagctcaaaagaggtcaaaaatgcatttgcttggcatcctcactgagaacaactcgtctaactcggttcagaattgcaatgttcctcagaaggaaataggattaggtggttgggttgacaagatggctcttggagacaaccactttgagaactctaattccatcctagagttggagcctgacacagcacagcttccaacttctttttatcatcaaagatatagtcctgtgcaacaaagctgtaggaccgaatcagtaccatcattgggcctacatggctttgattctgctactagttgttctaaccaagagattgtagtgtcaaccatgggactaaaagcttctggtgttgccaatagaggcgcctcaactgtaaaaaagtatgaagctacatcaacgaggagtacaaatctagcaagcaagtctccattgttgcagaaaaaactgcaaacaccaaccaggaacaggaaccagctaacttcgagcaccataggtggaagaagaacaccaaatggaaaaattggcattgcaaagtaatcaattaatgtgaaggcagatttgctgtgaccatgcttagaatggaaaaattggcattgcaaagtaatcaattaatgtcaaggtgggatagcacggagcctaaaaggactgcggtttttgaacctgcagaaggatcaagatcaatcatgtaaactgatgcacattccgataggtagcacattttatttattacattgaagttggaaacagacaccaaagaggacagaaagatgataaatatgaaggaaattcgaattgaggcttctgtacattttccacacttataaagtaatgttgtatcatgtgcctattagccatgacacatcatcacctgaaagttgcttgtattagacatgtgctaagtttacagtttctctgtctcatgtatgttaccctttctcataatggatcgccactcacagactaagagggtgattggtttcacccaactaaaatttagtcccttttacattgaattgaatgtttg

SEQ ID NO: 13333 - DNA, 3543 bp, Zea Mays
cgagaatacccaccacccctctccctccctcccgctgccgcccccacctccagcagacgcgacgcgagcgcagtccaccctctacgactacacacactctctttctctctctgttctcctttcatctccactcgtccgctttgtcggaaccgttgctggtggctccggggttctgcgactgcgcatagggaatggcgatggcggcggcggttttggaggaggcgctgcgatggggtggaggaagcgttggggacgacaacgtggccgcgcgcagggcagaggaggccgcgataagaaggcatgaagcagccagttggttgcgaaaaacggttgggatagtgtgtgcaaaggacctgccggaagagccctctgaggaggaattccagcttggtctgagaaatggcattgtcctctgcaacgcactgaataaggtccagccaggcgccatacccaagattgtcggagtccagtcagatactgcggtccctgcagatggctcagctttgtgtgcttatcagtacttcgaaaatctgcgaaacttcgttgtcgttatacaagattttggcctcccaacatttgaggtgtctgatttggaaaagggtggcaaaagtgttcgaattgtggactgtgttcttgctctgaagtcattcagtgaaagtaagaaaacagggagacaagctgcatgtaaatatggtggcattttgaagcctttggtttccggaaattatttcatacttaagaattgtgatgcttttatgaataaaaatgcgagaattcacacagaagaggctaccctgaatggttttcgaggagagcaaaacttatctcttgattgttctccagaatcctatgagattacttcagacaaccttagcacgattattcgcacaattctcttagataaaaaaccagaagaaatcccactgattgttgaatcactactaaacaaagttattcaggaatacgagcttcgctttgcaaatcagaacttgatggatgaagagaagcaaaataacttgactacgaaggaggaagccagttttgcagtaaatggtagtaatgcagctcaaaagttccatctgaaggctgaaataaattttgatctacagcacaaacagatcaaggggttgagaggtactgtttcttctatcaagtctggaatggaacaactgaaattgcactactctgaggagttcactaaacttgggaagcatttgtacactatatccaatgctgcttctggataccataaagttcttgaggaaaatcgcaagctgtacaaccagatacaggatcttaaaggaaatattagagtttattgtcgagtgaggcctttcctacctgggcaaataagttccttaagcagtgttgctggaatggaagaaagaaccattacaataatgactcctacaaaatatggaaaagatggaaacaaatctttcactttcaacaaagtctttggtccagcagccactcaagatgaggtcttttcagatatgcaaccattgatacgatcagttcttgatggttttaatgtctgtatatttgcatatggccaaacaggatctgggaagacttatacaatgagcggacctaaagttttaacagaggaaagcctaggtgtcaactataaagcattaaatgacttatttaatcttcaagcacagagaaaggggacaatagattatgatatttctgtacagatgattgagatatacaatgaacaagtgagagatctccttcaggatagtggaaacagaagattagaaattaaaaatacatcacagaaaggacttgcggttccagatgcaagcatagttcctgtcacatctacgtctgatgttgttgaactgatgaatcaaggccaaaagaatcgtgcagtgggttcaacagccataaatgaccgcagtagccgctcccacagttgcttgactgttcatgtgcaaggaagagatttgacatctgggacagttttaagaggttgcatgcatctggtcgatctagcaggcagtgaaagggttgataagtccgaggttgttggagatagactaaaggaggctcagtacataaacaagtcactttcagcactgggagatgtgattgcatccctttcccaaaagaacacacatgtaccttaccgaaacagcaagctcacccagctcttgcaagattcacttgggggacaagcaaaaacacttatgtttgttcacataagcccagaacttgacgctgctggtgagaccataagcaccttgaaattcgctgaacgtgttgcctccgttgaacttggtgcagccaagcaaaataaagaaggcagcgagattagagagctcaaagaacagattgcttccctcaaggctgcattggctaagaaggaaggagaaccagagaacattctaagcacacggtcaagcccaagcatatacagaattagaaaaggcaatgcaacacctgcaactcctaaagacaggcagccaatggaagaagttgggagcctagaggtccagaatgtcttcactccagctcaaaagaggtcaaaaatgcatttgcttggcatcctcactgagaacaactcgtctaactcggttcagaattgcaatgttcctcagaaggaaataggattaggtggttgggttgacaagatggctcttggagacaaccactttgagaactctaattccatcctagagttggagcctgacacagcacagcttccaacttctttttatcatcaaagatatagtcctgtgcaacaaagctgtaggaccgaatcagtaccatcattgggcctacatggctttgattctgctactagttgttctaaccaagagattgtagtgtcaaccatgggactaaaagcttctggtgttgccaatagaggcgcctcaactgtaaaaaagtatgaagctacatcaacgaggagtacaaatctagcaagcaagtctccattgttgcagaaaaaactgcaaacaccaaccaggaacaggaaccagctaacttcgagcaccataggtggaagaagaacaccaaatggaaaaattggcattgcaaagtaatcaattaatgtgaaggcagatttgctgtgaccatgcttagaatggaaaaattggcattgcaaagtaatcaattaatgtcaaggtgggatagcacggagcctaaaaggactgcggtttttgaacctgcagaaggatcaagatcaatcatgtaaactgatgcacattccgataggtagcacattttatttattacattgaagttggaaacagacaccaaagaggacagaaagatgataaatatgaaggaaattcgaattgaggcttctgtacattttccacacttataaagtaatgttgtatcatgtgcctattagccatgacacatcatcacctgaaagttgcttgtattagacatgtgctaagtttacagtttctctgtctcatgtatgttaccctttctcataatggatcgccactcacagactaagagggtgattggtttcacccaactaaaatttagtcccttttacattgaattgaatgtttg

SEQ ID NO: 13334 - DNA, 3456 bp, Zea Mays
gcgcagtccaccctctacgactacacacactctctttctctctctgttctcctttcatctccactcgtccgctttgtcggaaccgttgctggtggctccggggttctgcgactgcgcatagggaatggcgatggcggcggcggttttggaggaggcgctgcgatggggtggaggaagcgttggggacgacaacgtggccgcgcgcagggcagaggaggccgcgataagaaggcatgaagcagccagttggttgcgaaaaacggttgggatagtgtgtgcaaaggacctgccggaagagccctctgaggaggaattccagcttggtctgagaaatggcattgtcctctgcaacgcactgaataaggtccagccaggcgccatacccaagattgtcggagtccagtcagatactgcggtccctgcagatggctcagctttgtgtgcttatcagtacttcgaaaatctgcgaaacttcgttgtcgttatacaagattttggcctcccaacatttgaggtgtctgatttggaaaagggtggcaaaagtgttcgaattgtggactgtgttcttgctctgaagtcattcagtgaaagtaagaaaacagggagacaagctgcatgtaaatatggtggcattttgaagcctttggtttccggaaattatttcatacttaagaattgtgatgcttttatgaataaaaatgcgagaattcacacagaagaggctaccctgaatggttttcgaggagagcaaaacttatctcttgattgttctccagaatcctatgaggtaattacttcagacaaccttagcacgattattcgcacaattctcttagataaaaaaccagaagaaatcccactgattgttgaatcactactaaacaaagttattcaggaatacgagcttcgctttgcaaatcagaacttgatggatgaagagaagcaaaataacttgactacgaaggaggaagccagttttgcagtaaatggtagtaatgcagctcaaaagttccatctgaaggctgaaataaattttgatctacagcacaaacagatcaaggggttgagaggtactgtttcttctatcaagtctggaatggaacaactgaaattgcactactctgaggagttcactaaacttgggaagcatttgtacactatatccaatgctgcttctggataccataaagttcttgaggaaaatcgcaagctgtacaaccagatacaggatcttaaaggaaatattagagtttattgtcgagtgaggcctttcctacctgggcaaataagttccttaagcagtgttgctggaatggaagaaagaaccattacaataatgactcctacaaaatatggaaaagatggaaacaaatctttcactttcaacaaagtctttggtccagcagccactcaagatgaggtcttttcagatatgcaaccattgatacgatcagttcttgatggttttaatgtctgtatatttgcatatggccaaacaggatctgggaagacttatacaatgagcggacctaaagttttaacagaggaaagcctaggtgtcaactataaagcattaaatgacttatttaatcttcaagcacagagaaaggggacaatagattatgatatttctgtacagatgattgagatatacaatgaacaagtgagagatctccttcaggatagtggaaacagaagattagaaattaaaaatacatcacagaaaggacttgcggttccagatgcaagcatagttcctgtcacatctacgtctgatgttgttgaactgatgaatcaaggccaaaagaatcgtgcagtgggttcaacagccataaatgaccgcagtagccgctcccacaggaagagatttgacatctgggacagttttaagaggttgcatgcatctggtcgatctagcaggcagtgaaagggttgataagtccgaggttgttggagatagactaaaggaggctcagtacataaacaagtcactttcagcactgggagatgtgattgcatccctttcccaaaagaacacacatgtaccttaccgaaacagcaagctcacccagctcttgcaagattcacttgggggacaagcaaaaacacttatgtttgttcacataagcccagaacttgacgctgctggtgagaccataagcaccttgaaattcgctgaacgtgttgcctccgttgaacttggtgcagccaagcaaaataaagaaggcagcgagattagagagctcaaagaacagattgcttccctcaaggctgcattggctaagaaggaaggagaaccagagaacattctaagcacacggtcaagcccaagcatatacagaattagaaaaggcaatgcaacacctgcaactcctaaagacaggcagccaatggaagaagttgggagcctagaggtccagaatgtcttcactccagctcaaaagaggtcaaaaatgcatttgcttggcatcctcactgagaacaactcgtctaactcggttcagaattgcaatgttcctcagaaggaaataggattaggtggttgggttgacaagatggctcttggagacaaccactttgagaactctaattccatcctagagttggagcctgacacagcacagcttccaacttctttttatcatcaaagatatagtcctgtgcaacaaagctgtaggaccgaatcagtaccatcattgggcctacatggctttgattctgctactagttgttctaaccaagagattgtagtgtcaaccatgggactaaaagcttctggtgttgccaatagaggcgcctcaactgtaaaaaagtatgaagctacatcaacgaggagtacaaatctagcaagcaagtctccattgttgcagaaaaaactgcaaacaccaaccaggaacaggaaccagctaacttcgagcaccataggtggaagaagaacaccaaatggaaaaattggcattgcaaagtaatcaattaatgtgaaggcagatttgctgtgaccatgcttagaatggaaaaattggcattgcaaagtaatcaattaatgtcaaggtgggatagcacggagcctaaaaggactgcggtttttgaacctgcagaaggatcaagatcaatcatgtaaactgatgcacattccgataggtagcacattttatttattacattgaagttggaaacagacaccaaagaggacagaaagatgataaatatgaaggaaattcgaattgaggcttctgtacattttccacacttataaagtaatgttgtatcatgtgcctattagccatgacacatcatcacctgaaagttgcttgtattagacatgtgctaagtttacagtttctctgtctcatgtatgttaccctttctcataatggatcgccactcacagactaagagggtgattggtttcacccaactaaaatttagtcccttttacattgaattgaatgtttg

SEQ ID NO: 13335 - DNA, 3384 bp, Zea Mays
ctctctttctctctctgttctcctttcatctccactcgtccgctttgtcggaaccgttgctggtggctccggggttctgcgactgcgcatagggaatggcgatggcggcggcggttttggaggaggcgctgcgatggggtggaggaagcgttggggacgacaacgtggccgcgcgcagggcagaggaggccgcgataagaaggcatgaagcagccagttggttgcgaaaaacggttgggatagtgtgtgcaaaggacctgccggaagagccctctgaggaggaattccagcttggtctgagaaatggcattgtcctctgcaacgcactgaataaggtccagccaggcgccatacccaagattgtcggagtccagtcagatactgcggtccctgcagatggctcagctttgtgtgcttatcagtacttcgaaaatctgcgaaacttcgttgtcgttatacaagattttggcctcccaacatttgaggtgtctgatttggaaaagggtggcaaaagtgttcgaattgtggactgtgttcttgctctgaagtcattcagtgaaagtaagaaaacagggagacaagctgcatgtaaatatggtggcattttgaagcctttggtttccggaaattatttcatacttaagaattgtgatgcttttatgaataaaaatgcgagaattcacacagaagaggctaccctgaatggttttcgaggagagcaaaacttatctcttgattgttctccagaatcctatgaggtaattacttcagacaaccttagcacgattattcgcacaattctcttagataaaaaaccagaagaaatcccactgattgttgaatcactactaaacaaagttattcaggaatacgagcttcgctttgcaaatcagaacttgatggatgaagagaagcaaaataacttgactacgaaggaggaagccagttttgcagtaaatggtagtaatgcagctcaaaagttccatctgaaggctgaaataaattttgatctacagcacaaacagatcaaggggttgagaggtactgtttcttctatcaagtctggaatggaacaactgaaattgcactactctgaggagttcactaaacttgggaagcatttgtacactatatccaatgctgcttctggataccataaagttcttgaggaaaatcgcaagctgtacaaccagatacaggatcttaaaggaaatattagagtttattgtcgagtgaggcctttcctacctgggcaaataagttccttaagcagtgttgctggaatggaagaaagaaccattacaataatgactcctacaaaatatggaaaagatggaaacaaatctttcactttcaacaaagtctttggtccagcagccactcaagatgaggtcttttcagatatgcaaccattgatacgatcagttcttgatggttttaatgtctgtatatttgcatatggccaaacaggatctgggaagacttatacaatgagcggacctaaagttttaacagaggaaagcctaggtgtcaactataaagcattaaatgacttatttaatcttcaagcacagagaaaggggacaatagattatgatatttctgtacagatgattgagatatacaatgaacaaaaaggacttgcggttccagatgcaagcatagttcctgtcacatctacgtctgatgttgttgaactgatgaatcaaggccaaaagaatcgtgcagtgggttcaacagccataaatgaccgcagtagccgctcccacagttgcttgactgttcatgtgcaaggaagagatttgacatctgggacagttttaagaggttgcatgcatctggtcgatctagcaggcagtgaaagggttgataagtccgaggttgttggagatagactaaaggaggctcagtacataaacaagtcactttcagcactgggagatgtgattgcatccctttcccaaaagaacacacatgtaccttaccgaaacagcaagctcacccagctcttgcaagattcacttgggggacaagcaaaaacacttatgtttgttcacataagcccagaacttgacgctgctggtgagaccataagcaccttgaaattcgctgaacgtgttgcctccgttgaacttggtgcagccaagcaaaataaagaaggcagcgagattagagagctcaaagaacagattgcttccctcaaggctgcattggctaagaaggaaggagaaccagagaacattctaagcacacggtcaagcccaagcatatacagaattagaaaaggcaatgcaacacctgcaactcctaaagacaggcagccaatggaagaagttgggagcctagagaatgtcttcactccagctcaaaagaggtcaaaaatgcatttgcttggcatcctcactgagaacaactcgtctaactcggttcagaattgcaatgttcctcagaaggaaataggattaggtggttgggttgacaagatggctcttggagacaaccactttgagaactctaattccatcctagagttggagcctgacacagcacagcttccaacttctttttatcatcaaagatatagtcctgtgcaacaaagctgtaggaccgaatcagtaccatcattgggcctacatggctttgattctgctactagttgttctaaccaagagattgtagtgtcaaccatgggactaaaagcttctggtgttgccaatagaggcgcctcaactgtaaaaaagtatgaagctacatcaacgaggagtacaaatctagcaagcaagtctccattgttgcagaaaaaactgcaaacaccaaccaggaacaggaaccagctaacttcgagcaccataggtggaagaagaacaccaaatggaaaaattggcattgcaaagtaatcaattaatgtgaaggcagatttgctgtgaccatgcttagaatggaaaaattggcattgcaaagtaatcaattaatgtcaaggtgggatagcacggagcctaaaaggactgcggtttttgaacctgcagaaggatcaagatcaatcatgtaaactgatgcacattccgataggtagcacattttatttattacattgaagttggaaacagacaccaaagaggacagaaagatgataaatatgaaggaaattcgaattgaggcttctgtacattttccacacttataaagtaatgttgtatcatgtgcctattagccatgacacatcatcacctgaaagttgcttgtattagacatgtgctaagtttacagtttctctgtctcatgtatgttaccctttctcataatggatcgccactcacagactaagagggtgattggtttcacccaactaaaatttagtcccttttacattgaattgaatgtttg

SEQ ID NO: 13336 - DNA, 3449 bp, Zea Mays
ctttctctctctgttctcctttcatctccactcgtccgctttgtcggaaccgttgctggtggctccggggttctgcgactgcgcatagggaatggcgatggcggcggcggttttggaggaggcgctgcgatggggtggaggaagcgttggggacgacaacgtggccgcgcgcagggcagaggaggccgcgataagaaggcatgaagcagccagttggttgcgaaaaacggttgggatagtgtgtgcaaaggacctgccggaagagccctctgaggaggaattccagcttggtctgagaaatggcattgtcctctgcaacgcactgaataaggtccagccaggcgccatacccaagattgtcggagtccagtcagatactgcggtccctgcagatggctcagctttgtgtgcttatcagtacttcgaaaatctgcgaaacttcgttgtcgttatacaagattttggcctcccaacatttgaggtgtctgatttggaaaagggtggcaaaagtgttcgaattgtggactgtgttcttgctctgaagtcattcagtgaaagtaagaaaacagggagacaagctgcatgtaaatatggtggcattttgaagcctttggtttccggaaattatttcatacttaagaattgtgatgcttttatgaataaaaatgcgagaattcacacagaagaggctaccctgaatggttttcgaggagagcaaaacttatctcttgattgttctccagaatcctatgaggtaattacttcagacaaccttagcacgattattcgcacaattctcttagataaaaaaccagaagaaatcccactgattgttgaatcactactaaacaaagttattcaggaatacgagcttcgctttgcaaatcagaacttgatggatgaagagaagcaaaataacttgactacgaaggaggaagccagttttgcagtaaatggtagtaatgcagctcaaaagttccatctgaaggctgaaataaattttgatctacagcacaaacagatcaaggggttgagaggtactgtttcttctatcaagtctggaatggaacaactgaaattgcactactctgaggagttcactaaacttgggaagcatttgtacactatatccaatgctgcttctggataccataaagttcttgaggaaaatcgcaagctgtacaaccagatacaggatcttaaaggaaatattagagtttattgtcgagtgaggcctttcctacctgggcaaataagttccttaagcagtgttgctggaatggaagaaagaaccattacaataatgactcctacaaaatatggaaaagatggaaacaaatctttcactttcaacaaagtctttggtccagcagccactcaagatgaggtcttttcagatatgcaaccattgatacgatcagttcttgatggttttaatgtctgtatatttgcatatggccaaacaggatctgggaagacttatacaatgagcggacctaaagttttaacagaggaaagcctaggtgtcaactataaagcattaaatgacttatttaatcttcaagcacagagaaaggggacaatagattatgatatttctgtacagatgattgagatatacaatgaacaagtgagagatctccttcaggatagtggaaacagaagataattagaaattaaaaatacatcacagaaaggacttgcggttccagatgcaagcatagttcctgtcacatctacgtctgatgttgttgaactgatgaatcaaggccaaaagaatcgtgcagtgggttcaacagccataaatgaccgcagtagccgctcccacagttgcttgactgttcatgtgcaaggaagagatttgacatctgggacagttttaagaggttgcatgcatctggtcgatctagcaggcagtgaaagggttgataagtccgaggttgttggagatagactaaaggaggctcagtacataaacaagtcactttcagcactgggagatgtgattgcatccctttcccaaaagaacacacatgtaccttaccgaaacagcaagctcacccagctcttgcaagattcacttgggggacaagcaaaaacacttatgtttgttcacataagcccagaacttgacgctgctggtgagaccataagcaccttgaaattcgctgaacgtgttgcctccgttgaacttggtgcagccaagcaaaataaagaaggcagcgagattagagagctcaaagaacagattgcttccctcaaggctgcattggctaagaaggaaggagaaccagagaacattctaagcacacggtcaagcccaagcatatacagaattagaaaaggcaatgcaacacctgcaactcctaaagacaggcagccaatggaagaagttgggagcctagaggtccagaatgtcttcactccagctcaaaagaggtcaaaaatgcatttgcttggcatcctcactgagaacaactcgtctaactcggttcagaattgcaatgttcctcagaaggaaataggattaggtggttgggttgacaagatggctcttggagacaaccactttgagaactctaattccatcctagagttggagcctgacacagcacagcttccaacttctttttatcatcaaagatatagtcctgtgcaacaaagctgtaggaccgaatcagtaccatcattgggcctacatggctttgattctgctactagttgttctaaccaagagattgtagtgtcaaccatgggactaaaagcttctggtgttgccaatagaggcgcctcaactgtaaaaaagtatgaagctacatcaacgaggagtacaaatctagcaagcaagtctccattgttgcagaaaaaactgcaaacaccaaccaggaacaggaaccagctaacttcgagcaccataggtggaagaagaacaccaaatggaaaaattggcattgcaaagtaatcaattaatgtgaaggcagatttgctgtgaccatgcttagaatggaaaaattggcattgcaaagtaatcaattaatgtcaaggtgggatagcacggagcctaaaaggactgcggtttttgaacctgcagaaggatcaagatcaatcatgtaaactgatgcacattccgataggtagcacattttatttattacattgaagttggaaacagacaccaaagaggacagaaagatgataaatatgaaggaaattcgaattgaggcttctgtacattttccacacttataaagtaatgttgtatcatgtgcctattagccatgacacatcatcacctgaaagttgcttgtattagacatgtgctaagtttacagtttctctgtctcatgtatgttaccctttctcataatggatcgccactcacagactaagagggtgattggtttcacccaactaaaatttagtcccttttacattgaattgaatgtttg

SEQ ID NO: 13337 - DNA, 3283 bp, Zea Mays
ttcaccttatccctccacgccgctctctctccctatgatttttctcaccgctcaacgccgttgttatctccagcgcatgcccagctcctctccacgttgcgcggctacagattgtggagtgctgcatatgtctcaaggaatttgcagaatcatccagggtcctggagagtttgcagaccgtggagcagtccacgtcaggtgaagccaaagaggccgtctcccgcgacatgctccaggccagcggtgcgggtctggccgtggtggtcagcgcggtggctgtccgatcatgtgaagacgagcggtggtgagcagggcgtccttccattgattttctccctcgtctccttggctgtgcgcgcgagctcgccggcgtgcgctcgcccagctcggaattccctctgcccagtcgctcagctccgacctccctcgccatggcgctcgctggccgtgctcctctgctcgctggttctcctcgccgcgcttggctgtccagcttcctgatacgcgcgcggtcctctgctcctgcgtgcccctgcttttctctctctcctccatggccgcgtcttgccgaggtccctgctgcagcttgcccatctccctgtgctcgagctcgccggcgtcctctgctcgttcttcaggcagtcgccggtcgagcttctccctcgcgctcggatctggccattaacgcccagacatgtgttctttcccccagctcgtaggtgtcgtcgttccgtgtacttggccatagagttcgcccggcccgaccctaagcgccagcacgcgtctatggtcgcgtccgtcgagttcgccaaagctctgttacgagtgccgaactatacctataaagcctcgccggtaaagtccgccgtcgtcctctggtctcagctcgcctaaaacactcgtgcttgccctcggctcgcgttggtgctcacgcgtctgctcgttatctctgcggtacactcgctctcatccatcgggtttcgcgcgtgctcgtgtttgccgtcgagccattgaaaccgtcttctcctccttgacttcgtcttcgcccttttggtggtcgtcgtcagtatggtgcttgactacgctccactatctcgtcgcactggctgtcgaccttgttggtcctctccgtgtcaaaccagcaagttccaccatcgtcactcagttgcacgcctccacctcgccaagtcccactagctcttccgatatgcacctcatcgtgcttcgcctcctcgtgatcagcccccatctaggtcatggggggcggaagatctcaacacctgtcagatgttcgacgacaagcccgagccagaatttatcaacattctcacgagtattgagtcacgtttgatgctggtaagctgaatttatttgcttagtaattttagtgctttgccggtaggcgctatcggcatttcatgcgaggaattttagttgtgcagtgaagtcagtgctatgctttcatagtcataatattctttgttaatgaccgattaaataccctagataaatatttattatcacctgaaatgagtggaactgaatagtatcgataagtttgttctagcaaaaaaatatgaaatgctatgttattcgttagttcttagaatagtatgctgctttgttaaatggatatgctactcatggataggttaaagtttagtcgctctggttcatgatcgttgtgttagaacgtcaaaaatatcgacatttagtatttttatactagatttgcgatgtctttctataggtatttaattcgctgtcgtgtagcattatttaggtttgtgatattcctgtttatatgcattcatgtgcattatgcaaatcatttaggtacgtttattgactacgtgatacggaggaccaaagctgagtcgaccacaagaggatggaaagcgtgagcttctccaaaagatgatgctgaataagtgccaacacaaaaggcttgtcatcaagtgatcgacgtctaacaacactaacctagtgttatccaggcaagccccggtgcatttgctacctccttgctgttttaaaatctttatcaccttgtttgatgcattaggtgataggagttgtgtgctaaacaattgatgcattttcttccttggaaattgattacccttccttgacacctttttataaaaaggattttttgatgcttagccttgctttagcaaacaaaaatgttttgttttaaaactaaagtgatgcttcagtgggtgggaatgctttcaaaaagaaaaacttgtgatggtggatccatcagggcccttgatgagttcaacattggaaaagatgtacctctgccaggtaccaaactttgggtttaaataataaagctgagaccggacggttgacttgcacgagaagggagtctcggtgtagtgtctccatctgagtcgattaaggaccgtctcgatgtaggcttgatgattgaggaccttttaactggtcacatgcctcatcatgggtaagctttgcctcgggtagactaataacagaataggataacacacaatgggagtggagagatggcgagagtagcgtgtaccctccgtggcaagaggctggacggtagtgtatctgtgctctcggttggtgtgaacccgatctggttttaagaaccccggtggcgagttaacatatgcaaggattaagtgctacatatgtcgtgtgattggagatcctcagctgagtattaatctattcggatcgccgttacttctcagacatgaagacttggtcactgccctacacgtagcattccagtaaacaagaagggttgataagaaaatggctagtataggccaagtacttgaactagagtagaaagaactctagattcaggtaatgacttaacttgctaataaaattggatttttaaggatccactattagtaagcatttttgcaaacagagtcttgattattgattaagccttaccttgactcccttaagccagcatatccttgagagtcttttattttgacgggtaagacttgcgaaagtactcttcgtactctgggttttcgaacccatgttgttgtaggtgaggaagcagcaaatttttgttgcttttgttccaaggtggtgtccaaggaagaaaatcaggattgaagcctcgggaggaagtgtcctcctttaaaaactttttactgttaagcgggaggggtttttgcctcccaggtttgtaataatattactcctgcactcttatatattactggtctgtaataataatactctttctatactttaatataaaataagttgttgtaac

SEQ ID NO: 13338 - DNA, 466 bp, Zea Mays
gtgaccttgccgcttctcgtgcagccctggatgtggccgatgatgaagtaggcctacttcaggaccagttcaccaagtctgatggtcgagttgctgttttggaaattgagttggagaagcttcgtcgttgggcggactaggttgtggaatatgtcggagcccgcggctcttccttggtggaaaatttgaaaaatatcttgtgtcacaactgggatatcgtcgacttcagtgtacagcgaggggtgatcaaagccttggtcatcagggagctcttgtctggttgcgatctctaggatgtcattggccttccttaggatataccgaatgatggactggaggatgtcctggagggctacgacgaggcagttagtcatgttgtggaaaggttgtccgcaaatgatatcatccgcaaagcctgatgagctcatgatgtatctcgttttgacattgtgtctttatgaaggaa

SEQ ID NO: 13339 - DNA, 1150 bp, Zea Mays
atgttttacactggtggtctgccttttaatcttgcacgtaacccatattttagaaaggctttcatgtttgctaccaattacttggacagccagcatcatcttcctgtgccgaaagaaattggagtacatatgggctgatccatagttcattgagaaacaggttcgattctatttcattttatttgtcttattcattatgatcagttggtcacacatgtatgaatttggattcctaatacaaatctacaatttaaattgtaggctaaatcctgggcgtgctgaggatttagttttcacacaccaaaacttgcgtcttctttctagaaaatctgatgaataccgctgtggtccatcagcaatgtgggatgttggagctgacacttttgaagctgattttgagggtggtgctgattttcttgagcaagctgatctatcactggatgagccagaacttgaagaaagattgtttgaagatcttgaggcattgggtttgaccgaagatgcagaatgaaatctagttgttgtctcatgtctggtctgtggtctatggtctgttagaattaaaacttagaacttgtgtagcgtagcgtatcgttacacatgtttttgggcttttggcatgctggattcattgatttgagtccagataaattctggaggaggaagtagatgtttactttagtcaaagttgttgaacattaacttctaacgcccttaaattgaactgatcagctgctgtccattcaggcatttcagcatttaattttatttataatatatattgcgtatcgccgtatccgtatttttttagaaatggcgtatcgcggtatcggcgtatcgcgtatccgtatccgtatccccgtatcagggcaacatagcttttgagtcattccaactaggaccatgtgcatcagtgcatcaaacccttaaacataagggaatcagttcagtcgttggaaagttgacaccttagcctatataaaagttgcaaatcacaagcgatgaattcttgaaaagcaatactttaacaaaccaggagttaaagggcgtatgagcacaaatacagatttcacaaaccctaataatacactatagaaagtaaaacgaagccaagaacataggtcatgcatcgtactgttcttgatactct

SEQ ID NO: 13340 - DNA, 2261 bp, Zea Mays
caccgcgtccgccggctgcaggaggcgccgcgtttgcgttcgccacctccacacgcttctctctcctttatctttgtgtctgcgcctccctcgcacagactctctctcacgagcacaacagggcggccagacagggttcccacaggccatcaccacaacacacaaatacagctcagagcaactcacacacaggctcctctcccccgttgcgcaacgcgctttcccccacttcacccgcctcggcgccatggctaagctcgcgctggcgctcctcctcctgctggccgtggcggcgtccgcgtcggccagcagcgggagccacctggatctcgacctgggcttcctctcctctggggaacgccggagggagtgccgcggcacggtggccgagtgcctcgccgaggagtcggatgaggagggccttgacctggctggatcccaccgccgcgcgctctacggcggcgggtacatcagctacggcgcgctgcggcgggacaacgtgccctgctcccgccgcggcgccagctactacaactgccgcccgggcggccaggccaacccctaccaccgcggctgctcccgcatcacccgctgccgcggctgaggcggcgccggatccgccagactgccgaggaaaggtctggtccaggtcccggccctttcgccgacaataatttctttcgccttgttcgttcaggcgctaccgccaccgccaccgctgtttactatagcaccagacctacggattgaattgttgtatggatttgtttggccaaatctttgttctgttgtaaagtaaggggagggattcctgcccctgcgcctgcttaaaatacttatatgaacatatcagtctttcttgttttttttctctctctcccattgcttgattggttggttctcgtatgtcctgcttgatttgaattgattgttacaaaacggcggattctgagttcgatttgctggttgccggctggccatggccatggaatgctgtggtttcgctcagcctgggattcatccttcagatctaggatatgcagaaccgaaccatggcctggactggactggagtgccaactcttgatctgcagaaaatccagatccgtttgtgttcgtcgctccctgttcttggttcgattccttctcgcctgtgcatggagtgccccagcacaccaccgccacgaacatggggagtagtggaagaacatgcgtccttgttttgaatctataatctagtttacttactcctacagcgtctttcttctttgtttaatactacgtactagttcttgcaggttggatcagacgatagtgatggtcacgttgcctcatgtggtctcttgattggaaccccccattgcatttgttgaccacacgttgaagcattgttgacagtatcgtctggtagtacatgtgaccatgtccatgacttgcatacgttctcagattacttgtgaaatcacaagcatcaactagtattttaaggggagggggaaaaaatctttaatcttctgccatgctagtaggcgtcatgtatatttttttttattcgtctagacggtggttctctgttcttcggcgccgtgagctgtgtgacgcagcatcttcatcgttcagtgcgccacgtggatttgctgtttgtttgtcgagggaataaatgacctgtttattgtttgtcagcagagtagctgtaagctcttgatgaatgctgcctcgggacgacacgtcccacaaatataatttaatctgcggtcgcgtgacacatgcatctcaagagtttctgtttgtgttctatttgggtatttgggtacgtacagcggtggtgtttaatgtggagtttattaaggtagtggtgtttaatgtgaagtctttaaggtgttttaaggggatatttgcaaaaagtcttaaagccgtctctatgtgaagatacgtctctggctcataaccaaagtagcaacatatggctcacttcccactgtatgaatttgttgtctgttctatcgatctgatgttgtgcaaatgcatttaattatgtatttattaacagactgcatttatagacactctattgtataatagagtctcttagttgtctaatgtgcctggagaaccgttttgatgtctctccactatacatgtatgcatctcaaagataaatgaaatttatagtttgctaggcaccaagagggaggcgagcagcattagtgctttgattgtgtgctcttcgttaaaatatttgcgtcatagcttaggtaaaac

SEQ ID NO: 13341 - DNA, 1291 bp, Zea Mays
acgatcccggtgcacccacgcggcacccccaccaaccgacccgtcgcccgcggacctaccctggccggggctctctccagtaatggaagcccagggcttccattacctcaaccatatatatatatatatatatatatatcaaagaggcatctgtacattaagacaaaagtaaaaacagtttctaactgctcctctacagttatagaagagtttattttggcacatcaccatatttttagagacaggaagctgccagtggctgttccagcaccatgcttgcaggacagtcaggggaatgtccagatgcaattgttttttaacgcttgctaccaatcctaattttctgtgtttggaaaaataaagaacatgtgggtcatggctgcatgatacttgtatgagacaatacatgcagtatggtgcaatgtgcctctagaagcatgttaaggtttctatgttattgttgtggatcttctgaataatttgatattggtccatagaactttgggcttaacttggtagtttgctgctgacactactactactacagtaagttgttgtaagcgcacacataccccaagtgccaacctcaaatgtgatctccctccttgacctgtcactgcagttgcttccttgtgatttgggattgtatcagcctctccttgatctcaccgatgaactcatccctatcccgcaactgtctgtctactgctgcaagttttgaagaacctgcgccatatgataataaggtgggtggttctcggccatacaaaactctgaacggggagcacttcggtgcagtttgataggaagcattatagcaaaattctacccacggcagccgctgcagccagctcttcggttcatcgcctactgaacatcggaggtacacaacaattaccctctttaccacttcggactggcctcctgattgaggatgaaaggctgaactgaggtttagtttgactcctgctagccaaaacaatgcaacccaaaatacactcgtgaagactgtgtcacgatggctgacaatggaacaggaaaacccatgaagacagacaatgtcctcaaagaatgctgccttaacaacggaggcagccgtgtacggatgaccaagaggaatgaaatgtgcgaacttagaaaaacaatccaccacagttagcaccactgtcttgccacccacttttggaaatccttgaatgaaatccatggctatatcactccaaatttcagagggaactggaagtggttgcagcagtccagccaggtgaagattttctgacttatagcgctg

SEQ ID NO: 13342 - DNA, 3393 bp, Zea Mays
aatccctctctggcgtgttcataataacaataatctcttgggaatgtgattgacccttccaaaaaaaaaaacagaaacccgttacccgactcgactcgtctcttcccctccagtctccaccgagccaagccagcctgctccagcggcagacccgctaccgatctcctctgccgcggcccgcggcggcggcgatttcccctccgcgaatgccccttcaccgctgcagttgatacgccacccaagtggttcgttccacccttccttccctcgccggtctctccatcgccgcagcccgcagggcgccaccttgtcggaaggcgcgatccatggaccgctcgatcaacttccgcggcatcgccgggagcgccggaaacatcatgcagggaatggggaaattcgttttcggcaacgaggggatcgagtcaaaggaagatagctacgtcgagagatatctttatcggataagcaatggcacgatacctgatgaccggaggtctgcaatgactgagctgcagtctctagtggcagaaagccgctcggcacagatgtcgtttggagcgatgggttttcctatcctcctcaatattttgaaagaagaccgtgaggatgtagagcttgtgagaggtgccctggagacctttgtgagtgcattgactcctattgagacgtcacaagggccaaatactgaggttcaaccagcgtcagtgaactctgatctgctatctcaagaaaccgagaatatttctcttcttttgagcttattgtcagaggaagacttttatgtgagatactacacaatccaacttctaacagctctacttacaaactcgctgaaaaggttacaagaagcaattctattgattcctcgtggtataacagttctcatggacatgcttatggaccgtgaggtcataaggaatgaagcactgttacttcttacttatttgactcgggatgcagaggaaattcaaaaaattgttgtatttgagggtgtgtttgagaagatatttagcattattagagaggagggctattccgatggaggtgtagttgttcaggattgccttgaactgttaaataatttaattcgacacaatgcgtcaaatcagatgcttttgaaagagacaatgggctttgacccattgatatcaatactaaagattaggagaggcagtgcatttaattttacccaacagaagacagtaaatcttcttggtgctttaaatactgtggaattgcttttgatggggggcccatctggtgaagcaggtaaagacgctaacaagaatgcaaatcaaactgcattggctcagaaaaacattctggaccatcttcttttgttgggcgttgagagtcaatgggcccctgtcgttctccgctgtatggcactgcgatgtattggcaatttggtattaagaaatcctcagaatcttgattctcttgcaagaaaacaagttggagaagagcctcatgttcaacctgcactgaatgccatcttctctataatcttgcggacctctgtagcgcaggaatttgttgctgctgattatgtattcaagtgtttctgcgagagaaatcctaatggccaggcattattagcatcaactattgttccacatccgaaccaaggaaatatgcatgaacctgctatcgacatgccttttggaagtgtacttctgcaagcactggtttcaagtgatgtcaatggagatatggaggcatgttgcagagcatctagcgttctttctcacattgtcaaggacaacatgcaaagcaaggatcgtgtattgcaaattcagcttgagacacttacaccgtccttggggcgcactgagccagtattgcatcgtattgtcacatgtttgtccatcgcagcctcaacagagggagaaaacaaccaaaacaaccaaccagaagaaccgtacattcaacctgttattcttcggctactcatcatatggcttgttgattgttcaaatgctgttaactgcctgttggaatcagcagtgcatctgaactacataatagagcttgcttcaagcaaacgttacactgcttgtgttcgtggactggctgctgttgttctaggtgcttgcatcctgtacaatgctagccatgagaagggccgtgatgcttttgctgttgcagatgctataagtcaaaagattggcctcacaacgtacttcttgaggtttgacgaattgaggagaagcttggcacatcctttgccagagcagcatcatcgcaaggagctttcccgatcaagtgcgaatagcatgtcagatttccaagaaattgaagaggatgaaacaaataaagatgatcaacaccctgtcctctcagaaatatttgattcacagtttgttaattttcttagtaagctcgaggctgatattagagaaaacataatggatatatttagtcggacaaaaactgcaactgcactccttcctactgaattggagcagaagaacggggaggttgatggagagtatatcaaacgactaaagtcgtttgtagagaaacagtgcaatgagatgcaggacttgctggctcgaaacgcaatgttagcagaagagttagtgagaactggtggtggtaccaccacagatacttcacagagaccgaacaacgggcgagaaagggtccagatcgaagccctgagacaagaactggagggagcgagacgacagatagaggcactcgaaactgacaagtcccagatcgaagccgaagctaacaaccaacgaaaccttgcagtaaaactggagtccgatctcaagagcttgtcagaagcttacaacagcatagagcaggccaactaccgcctggatgccgaggtaaaaaccttgcggcagggaggcagtgtgccgtatcctgacgtggaggcaataaaggcgcaagccaaggaagaggctgagaaggacagtgaggcggagctgaacgatctgcttgtctgcctcggtcaggaacaaactaaggttgagaagctgagcacaaggctggcagagctcggcgaagatgtggatgcccttctgcaaggtattggtgacgacactgccattccggacgatgatgacgacgacgatgaagatagtgaagagtgatatgtttatgtaaccctgtaggtctgttggtgcacacaacctcacgttgggtcatgatattgtaatggcaattggcattgtacagtggataatgtgtagacaaaggcaccgttccaatttaagttatttgtggagaaactagttgaaaactaagtggcggaccgtccggtcccggacggtccacacctcgcgatcagattaactcgaacgattatccttatctcgtgtgtggttatctatctaattatgtgagatttgttagctatcgtctaggaacgagtccaga

SEQ ID NO: 13343 - DNA, 3293 bp, Zea Mays
aataatctcttgggaatgtgattgacccttccaaaaaaaaaaacagaaacccgttacccgactcgactcgtctcttcccctccagtctccaccgagccaagccagcctgctccagcggcagacccgctaccgatctcctctgccgcggcccgcggcggcggcgatttcccctccgcgaatgccccttcaccgctgcagttgatacgccacccaagtggttcgttccacccttccttccctcgccggtctctccatcgccgcagcccgcagggcgccaccttgtcggaaggcgcgatccatggaccgctcgatcaacttccgcggcatcgccgggagcgccggaaacatcatgcagggaatggggaaattcgttttcggcaacgaggggatcgagtcaaaggaagatagctacgtcgagagatatctttatcggataagcaatggcacgatacctgatgaccggaggtctgcaatgactgagctgcagtctctagtggcagaaagccgctcggcacagatgtcgtttggagcgatgggttttcctatcctcctcaatattttgaaagaagaccgtgaggatgtagagcttgtgagaggtgccctggagacctttgtgagtgcattgactcctattgagacgtcacaagggccaaatactgaggttcaaccagcgtcagtgaactctgatctgctatctcaagaaaccgagaatatttctcttcttttgagcttattgtcagaggaagacttttatgtgagatactacacaatccaacttctaacagctctacttacaaactcgctgaaaaggttacaagaagcaattctattgattcctcgtggtataacagttctcatggacatgcttatggaccgtgaggtcataaggaatgaagcactgttacttcttacttatttgactcgggatgcagaggaaattcaaaaaattgttgtatttgagggtgtgtttgagaagatatttagcattattagagaggagggctattccgatggaggtgtagttgttcaggattgccttgaactgttaaataatttaattcgacacaatgcgtcaaatcagatgcttttgaaagagacaatgggctttgacccattgatatcaatactaaagattaggagaggcagtgcatttaattttacccaacagaagacagtaaatcttcttggtgctttaaatactgtggaattgcttttgatggggggcccatctggtgaagcaggtaaagacgctaacaagaatgcaaatcaaactgcattggctcaggcactgcgatgtattggcaatttggtattaagaaatcctcagaatcttgattctcttgcaagaaaacaagttggagaagagcctcatgttcaacctgcactgaatgccatcttctctataatcttgcggacctctgtagcgcaggaatttgttgctgctgattatgtattcaagtgtttctgcgagagaaatcctaatggccaggcattattagcatcaactattgttccacatccgaaccaaggaaatatgcatgaacctgctatcgacatgccttttggaagtgtacttctgcaagcactggtttcaagtgatgtcaatggagatatggaggcatgttgcagagcatctagcgttctttctcacattgtcaaggacaacatgcaaagcaaggatcgtgtattgcaaattcagcttgagacacttacaccgtccttggggcgcactgagccagtattgcatcgtattgtcacatgtttgtccatcgcagcctcaacagagggagaaaacaaccaaaacaaccaaccagaagaaccgtacattcaacctgttattcttcggctactcatcatatggcttgttgattgttcaaatgctgttaactgcctgttggaatcagcagtgcatctgaactacataatagagcttgcttcaagcaaacgttacactgcttgtgttcgtggactggctgctgttgttctaggtgcttgcatcctgtacaatgctagccatgagaagggccgtgatgcttttgctgttgcagatgctataagtcaaaagattggcctcacaacgtacttcttgaggtttgacgaattgaggagaagcttggcacatcctttgccagagcagcatcatcgcaaggagctttcccgatcaagtgcgaatagcatgtcagatttccaagaaattgaagaggatgaaacaaataaagatgatcaacaccctgtcctctcagaaatatttgattcacagtttgttaattttcttagtaagctcgaggctgatattagagaaaacataatggatatatttagtcggacaaaaactgcaactgcactccttcctactgaattggagcagaagaacggggaggttgatggagagtatatcaaacgactaaagtcgtttgtagagaaacagtgcaatgagatgcaggacttgctggctcgaaacgcaatgttagcagaagagttagtgagaactggtggtggtaccaccacagatacttcacagagaccgaacaacgggcgagaaagggtccagatcgaagccctgagacaagaactggagggagcgagacgacagatagaggcactcgaaactgacaagtcccagatcgaagccgaagctaacaaccaacgaaaccttgcagtaaaactggagtccgatctcaagagcttgtcagaagcttacaacagcatagagcaggccaactaccgcctggatgccgaggtaaaaaccttgcggcagggaggcagtgtgccgtatcctgacgtggaggcaataaaggcgcaagccaaggaagaggctgagaaggacagtgaggcggagctgaacgatctgcttgtctgcctcggtcaggaacaaactaaggttgagaagctgagcacaaggctggcagagctcggcgaagatgtggatgcccttctgcaaggtattggtgacgacactgccattccggacgatgatgacgacgacgatgaagatagtgaagagtgatatgtttatgtaaccctgtaggtctgttggtgcacacaacctcacgttgggtcatgatattgtaatggcaattggcattgtacagtggataatgtgtagacaaaggcaccgttccaatttaagttatttgtggagaaactagttgaaaactaagtggcggaccgtccggtcccggacggtccacacctcgcgatcagattaactcgaacgattatccttatctcgtgtgtggttatctatctaattatgtgagatttgttagctatcgtctaggaacgagtccaga

SEQ ID NO: 13344 - DNA, 3272 bp, Zea Mays
gacccttccaaaaaaaaaaacagaaacccgttacccgactcgactcgtctcttcccctccagtctccaccgagccaagccagcctgctccagcggcagacccgctaccgatctcctctgccgcggcccgcggcggcggcgatttcccctccgcgaatgccccttcaccgctgcagttgatacgccacccaagtggttcgttccacccttccttccctcgccggtctctccatcgccgcagcccgcagggcgccaccttgtcggaaggcgcgatccatggaccgctcgatcaacttccgcggcatcgccgggagcgccggaaacatcatgcagggaatggggaaattcgttttcggcaacgaggggatcgagtcaaaggaagatagctacgtcgagagatatctttatcggataagcaatggcacgatacctgatgaccggaggtctgcaatgactgagctgcagtctctagtggcagaaagccgctcggcacagatgtcgtttggagcgatgggttttcctatcctcctcaatattttgaaagaagaccgtgaggatgtagagcttgtgagaggtgccctggagacctttgtgagtgcattgactcctattgagacgtcacaagggccaaatactgaggttcaaccagcgtcagtgaactctgatctgctatctcaagaaaccgagaatatttctcttcttttgagcttattgtcagaggaagacttttatgtgagatactacacaatccaacttctaacagctctacttacaaactcgctgaaaaggttacaagaagcaattctattgattcctcgtggtataacagttctcatggacatgcttatggaccgtgaggtcataaggaatgaagcactgttacttcttacttatttgactcgggatgcagaggaaattcaaaaaattgttgtatttgagggtgtgtttgagaagatatttagcattattagagaggagggctattccgatggaggtgtagttgttcaggattgccttgaactgttaaataatttaattcgacacaatgcgtcaaatcagatgcttttgaaagagacaatgggctttgacccattgatatcaatactaaagattaggagaggcagtgcatttaattttacccaacagaaggtaaagacgctaacaagaatgcaaatcaaactgcattggctcagaaaaacattctggaccatcttcttttgttgggcgttgagagtcaatgggcccctgtcgttctccgctgtatggcactgcgatgtattggcaatttggtattaagaaatcctcagaatcttgattctcttgcaagaaaacaagttggagaagagcctcatgttcaacctgcactgaatgccatcttctctataatcttgcggacctctgtagcgcaggaatttgttgctgctgattatgtattcaagtgtttctgcgagagaaatcctaatggccaggcattattagcatcaactattgttccacatccgaaccaaggaaatatgcatgaacctgctatcgacatgccttttggaagtgtacttctgcaagcactggtttcaagtgatgtcaatggagatatggaggcatgttgcagagcatctagcgttctttctcacattgtcaaggacaacatgcaaagcaaggatcgtgtattgcaaattcagcttgagacacttacaccgtccttggggcgcactgagccagtattgcatcgtattgtcacatgtttgtccatcgcagcctcaacagagggagaaaacaaccaaaacaaccaaccagaagaaccgtacattcaacctgttattcttcggctactcatcatatggcttgttgattgttcaaatgctgttaactgcctgttggaatcagcagtgcatctgaactacataatagagcttgcttcaagcaaacgttacactgcttgtgttcgtggactggctgctgttgttctaggtgcttgcatcctgtacaatgctagccatgagaagggccgtgatgcttttgctgttgcagatgctataagtcaaaagattggcctcacaacgtacttcttgaggtttgacgaattgaggagaagcttggcacatcctttgccagagcagcatcatcgcaaggagctttcccgatcaagtgcgaatagcatgtcagatttccaagaaattgaagaggatgaaacaaataaagatgatcaacaccctgtcctctcagaaatatttgattcacagtttgttaattttcttagtaagctcgaggctgatattagagaaaacataatggatatatttagtcggacaaaaactgcaactgcactccttcctactgaattggagcagaagaacggggaggttgatggagagtatatcaaacgactaaagtcgtttgtagagaaacagtgcaatgagatgcaggacttgctggctcgaaacgcaatgttagcagaagagttagtgagaactggtggtggtaccaccacagatacttcacagagaccgaacaacgggcgagaaagggtccagatcgaagccctgagacaagaactggagggagcgagacgacagatagaggcactcgaaactgacaagtcccagatcgaagccgaagctaacaaccaacgaaaccttgcagtaaaactggagtccgatctcaagagcttgtcagaagcttacaacagcatagagcaggccaactaccgcctggatgccgaggtaaaaaccttgcggcagggaggcagtgtgccgtatcctgacgtggaggcaataaaggcgcaagccaaggaagaggctgagaaggacagtgaggcggagctgaacgatctgcttgtctgcctcggtcaggaacaaactaaggttgagaagctgagcacaaggctggcagagctcggcgaagatgtggatgcccttctgcaaggtattggtgacgacactgccattccggacgatgatgacgacgacgatgaagatagtgaagagtgatatgtttatgtaaccctgtaggtctgttggtgcacacaacctcacgttgggtcatgatattgtaatggcaattggcattgtacagtggataatgtgtagacaaaggcaccgttccaatttaagttatttgtggagaaactagttgaaaactaagtggcggaccgtccggtcccggacggtccacacctcgcgatcagattaactcgaacgattatccttatctcgtgtgtggttatctatctaattatgtgagatttgttagctatcgtctaggaacgagtccaga

SEQ ID NO: 13345 - DNA, 3349 bp, Zea Mays
gacccttccaaaaaaaaaaacagaaacccgttacccgactcgactcgtctcttcccctccagtctccaccgagccaagccagcctgctccagcggcagacccgctaccgatctcctctgccgcggcccgcggcggcggcgatttcccctccgcgaatgccccttcaccgctgcagttgatacgccacccaagtggttcgttccacccttccttccctcgccggtctctccatcgccgcagcccgcagggcgccaccttgtcggaaggcgcgatccatggaccgctcgatcaacttccgcggcatcgccgggagcgccggaaacatcatgcagggaatggggaaattcgttttcggcaacgaggggatcgagtcaaaggaagatagctacgtcgagagatatctttatcggataagcaatggcacgatacctgatgaccggaggtctgcaatgactgagctgcagtctctagtggcagaaagccgctcggcacagatgtcgtttggagcgatgggttttcctatcctcctcaatattttgaaagaagaccgtgaggatgtagagcttgtgagaggtgccctggagacctttgtgagtgcattgactcctattgagacgtcacaagggccaaatactgaggttcaaccagcgtcagtgaactctgatctgctatctcaagaaaccgagaatatttctcttcttttgagcttattgtcagaggaagacttttatgtgagatactacacaatccaacttctaacagctctacttacaaactcgctgaaaaggtgcccagttacaagaagcaattctattgattcctcgtggtataacagttctcatggacatgcttatggaccgtgaggtcataaggaatgaagcactgttacttcttacttatttgactcgggatgcagaggaaattcaaaaaattgttgtatttgagggtgtgtttgagaagatatttagcattattagagaggagggctattccgatggaggtgtagttgttcaggattgccttgaactgttaaataatttaattcgacacaatgcgtcaaatcagatgcttttgaaagagacaatgggctttgacccattgatatcaatactaaagattaggagaggcagtgcatttaattttacccaacagaagacagtaaatcttcttggtgctttaaatactgtggaattgcttttgatggggggcccatctggtgaagcaggtaaagacgctaacaagaatgcaaatcaaactgcattggctcagaaaaacattctggaccatcttcttttgttgggcgttgagagtcaatgggcccctgtcgttctccgctgtatggcactgcgatgtattggcaatttggtattaagaaatcctcagaatcttgattctcttgcaagaaaacaagttggagaagagcctcatgttcaacctgcactgaatgccatcttctctataatcttgcggacctctgtagcgcaggaatttgttgctgctgattatgtattcaagtgtttctgcgagagaaatcctaatggccaggcattattagcatcaactattgttccacatccgaaccaaggaaatatgcatgaacctgctatcgacatgccttttggaagtgtacttctgcaagcactggtttcaagtgatgtcaatggagatatggaggcatgttgcagagcatctagcgttctttctcacattgtcaaggacaacatgcaaagcaaggatcgtgtattgcaaattcagcttgagacacttacaccgtccttggggcgcactgagccagtattgcatcgtattgtcacatgtttgtccatcgcagcctcaacagagggagaaaacaaccaaaacaaccaaccagaagaaccgtacattcaacctgttattcttcggctactcatcatatggcttgttgattgttcaaatgctgttaactgcctgttggaatcagcagtgcatctgaactacataatagagcttgcttcaagcaaacgttacactgcttgtgttcgtggactggctgctgttgttctaggtgcttgcatcctgtacaatgctagccatgagaagggccgtgatgcttttgctgttgcagatgctataagtcaaaagattggcctcacaacgtacttcttgaggtttgacgaattgaggagaagcttggcacatcctttgccagagcagcatcatcgcaaggagctttcccgatcaagtgcgaatagcatgtcagatttccaagaaattgaagaggatgaaacaaataaagatgatcaacaccctgtcctctcagaaatatttgattcacagtttgttaattttcttagtaagctcgaggctgatattagagaaaacataatggatatatttagtcggacaaaaactgcaactgcactccttcctactgaattggagcagaagaacggggaggttgatggagagtatatcaaacgactaaagtcgtttgtagagaaacagtgcaatgagatgcaggacttgctggctcgaaacgcaatgttagcagaagagttagtgagaactggtggtggtaccaccacagatacttcacagagaccgaacaacgggcgagaaagggtccagatcgaagccctgagacaagaactggagggagcgagacgacagatagaggcactcgaaactgacaagtcccagatcgaagccgaagctaacaaccaacgaaaccttgcagtaaaactggagtccgatctcaagagcttgtcagaagcttacaacagcatagagcaggccaactaccgcctggatgccgaggtaaaaaccttgcggcagggaggcagtgtgccgtatcctgacgtggaggcaataaaggcgcaagccaaggaagaggctgagaaggacagtgaggcggagctgaacgatctgcttgtctgcctcggtcaggaacaaactaaggttgagaagctgagcacaaggctggcagagctcggcgaagatgtggatgcccttctgcaaggtattggtgacgacactgccattccggacgatgatgacgacgacgatgaagatagtgaagagtgatatgtttatgtaaccctgtaggtctgttggtgcacacaacctcacgttgggtcatgatattgtaatggcaattggcattgtacagtggataatgtgtagacaaaggcaccgttccaatttaagttatttgtggagaaactagttgaaaactaagtggcggaccgtccggtcccggacggtccacacctcgcgatcagattaactcgaacgattatccttatctcgtgtgtggttatctatctaattatgtgagatttgttagctatcgtctaggaacgagtccaga

SEQ ID NO: 13346 - DNA, 3069 bp, Zea Mays
aaaaaaaacagaaacccgttacccgactcgactcgtctcttcccctccagtctccaccgagccaagccagcctgctccagcggcagacccgctaccgatctcctctgccgcggcccgcggcggcggcgatttcccctccgcgaatgccccttcaccgctgcagttgatacgccacccaagtggttcgttccacccttccttccctcgccggtctctccatcgccgcagcccgcagggcgccaccttgtcggaaggcgcgatccatggaccgctcgatcaacttccgcggcatcgccgggagcgccggaaacatcatgcagggaatggggaaattcgttttcggcaacgaggggatcgagtcaaaggaagatagctacgtcgagagatatctttatcggataagcaatggcacgatacctgatgaccggaggtctgcaatgactgagctgcagtctctagtggcagaaagccgctcggcacagatgtcgtttggagcgatgggttttcctatcctcctcaatattttgaaagaagaccgtgaggatgtagagcttgtgagaggtgccctggagacctttgtgagtgcattgactcctattgagacgtcacaagggccaaatactgaggttcaaccagcgttacaagaagcaattctattgattcctcgtggtataacagttctcatggacatgcttatggaccgtgaggtcataaggaatgaagcactgttacttcttacttatttgactcgggatgcagaggaaattcaaaaaattgttgtatttgagggtgtgtttgagaagatatttagcattattagagaggagggctattccgatggaggtgtagttgttcagatgcttttgaaagagacaatgggctttgacccattgatatcaatactaaagattaggagaggcagtgcatttaattttacccaacagaagacagtaaatcttcttggtgctttaaatactgtggaattgcttttgatggggggcccatctggtgaagcaggtaaagacgctaacaagaatgcaaatcaaactgcattggctcaggcactgcgatgtattggcaatttggtattaagaaatcctcagaatcttgattctcttgcaagaaaacaagttggagaagagcctcatgttcaacctgcactgaatgccatcttctctataatcttgcggacctctgtagcgcaggaatttgttgctgctgattatgtattcaagtgtttctgcgagagaaatcctaatggccaggcattattagcatcaactattgttccacatccgaaccaaggaaatatgcatgaacctgctatcgacatgccttttggaagtgtacttctgcaagcactggtttcaagtgatgtcaatggagatatggaggcatgttgcagagcatctagcgttctttctcacattgtcaaggacaacatgcaaagcaaggatcgtgtattgcaaattcagcttgagacacttacaccgtccttggggcgcactgagccagtattgcatcgtattgtcacatgtttgtccatcgcagcctcaacagagggagaaaacaaccaaaacaaccaaccagaagaaccgtacattcaacctgttattcttcggctactcatcatatggcttgttgattgttcaaatgctgttaactgcctgttggaatcagcagtgcatctgaactacataatagagcttgcttcaagcaaacgttacactgcttgtgttcgtggactggctgctgttgttctaggtgcttgcatcctgtacaatgctagccatgagaagggccgtgatgcttttgctgttgcagatgctataagtcaaaagattggcctcacaacgtacttcttgaggtttgacgaattgaggagaagcttggcacatcctttgccagagcagcatcatcgcaaggagctttcccgatcaagtgcgaatagcatgtcagatttccaagaaattgaagaggatgaaacaaataaagatgatcaacaccctgtcctctcagaaatatttgattcacagtttgttaattttcttagtaagctcgaggctgatattagagaaaacataatggatatatttagtcggacaaaaactgcaactgcactccttcctactgaattggagcagaagaacggggaggttgatggagagtatatcaaacgactaaagtcgtttgtagagaaacagtgcaatgagatgcaggacttgctggctcgaaacgcaatgttagcagaagagttagtgagaactggtggtggtaccaccacagatacttcacagagaccgaacaacgggcgagaaagggtccagatcgaagccctgagacaagaactggagggagcgagacgacagatagaggcactcgaaactgacaagtcccagatcgaagccgaagctaacaaccaacgaaaccttgcagtaaaactggagtccgatctcaagagcttgtcagaagcttacaacagcatagagcaggccaactaccgcctggatgccgaggtaaaaaccttgcggcagggaggcagtgtgccgtatcctgacgtggaggcaataaaggcgcaagccaaggaagaggctgagaaggacagtgaggcggagctgaacgatctgcttgtctgcctcggtcaggaacaaactaaggttgagaagctgagcacaaggctggcagagctcggcgaagatgtggatgcccttctgcaaggtattggtgacgacactgccattccggacgatgatgacgacgacgatgaagatagtgaagagtgatatgtttatgtaaccctgtaggtctgttggtgcacacaacctcacgttgggtcatgatattgtaatggcaattggcattgtacagtggataatgtgtagacaaaggcaccgttccaatttaagttatttgtggagaaactagttgaaaactaagtggcggaccgtccggtcccggacggtccacacctcgcgatcagattaactcgaacgattatccttatctcgtgtgtggttatctatctaattatgtgagatttgttagctatcgtctaggaacgagtccaga

SEQ ID NO: 13347 - DNA, 3325 bp, Zea Mays
aaaaaaacagaaacccgttacccgactcgactcgtctcttcccctccagtctccaccgagccaagccagcctgctccagcggcagacccgctaccgatctcctctgccgcggcccgcggcggcggcgatttcccctccgcgaatgccccttcaccgctgcagttgatacgccacccaagtggttcgttccacccttccttccctcgccggtctctccatcgccgcagcccgcagggcgccaccttgtcggaaggcgcgatccatggaccgctcgatcaacttccgcggcatcgccgggagcgccggaaacatcatgcagggaatggggaaattcgttttcggcaacgaggggatcgagtcaaaggaagatagctacgtcgagagatatctttatcggataagcaatggcacgatacctgatgaccggaggtctgcaatgactgagctgcagtctctagtggcagaaagccgctcggcacagatgtcgtttggagcgatgggttttcctatcctcctcaatattttgaaagaagaccgtgaggatgtagagcttgtgagaggtgccctggagacctttgtgagtgcattgactcctattgagacgtcacaagggccaaatactgaggttcaaccagcgtcagtgaactctgatctgctatctcaagaaaccgagaatatttctcttcttttgagcttattgtcagaggaagacttttatgtgagatactacacaatccaacttctaacagctctacttacaaactcgctgaaaaggttacaagaagcaattctattgattcctcgtggtataacagttctcatggacatgcttatggaccgtgaggtcataaggaatgaagcactgttacttcttacttatttgactcgggatgcagaggaaattcaaaaaattgttgtatttgagggtgtgtttgagaagatatttagcattattagagaggagggctattccgatggaggtgtagttgttcaggattgccttgaactgttaaataatttaattcgacacaatgcgtcaaatcagatgcttttgaaagagacaatgggctttgacccattgatatcaatactaaagattaggagaggcagtgcatttaattttacccaacagaagtaaatcttcttggtgctttaaatactgtggaattgcttttgatggggggcccatctggtgaagcaggtaaagacgctaacaagaatgcaaatcaaactgcattggctcagaaaaacattctggaccatcttcttttgttgggcgttgagagtcaatgggcccctgtcgttctccgctgtatggcactgcgatgtattggcaatttggtattaagaaatcctcagaatcttgattctcttgcaagaaaacaagttggagaagagcctcatgttcaacctgcactgaatgccatcttctctataatcttgcggacctctgtagcgcaggaatttgttgctgctgattatgtattcaagtgtttctgcgagagaaatcctaatggccaggcattattagcatcaactattgttccacatccgaaccaaggaaatatgcatgaacctgctatcgacatgccttttggaagtgtacttctgcaagcactggtttcaagtgatgtcaatggagatatggaggcatgttgcagagcatctagcgttctttctcacattgtcaaggacaacatgcaaagcaaggatcgtgtattgcaaattcagcttgagacacttacaccgtccttggggcgcactgagccagtattgcatcgtattgtcacatgtttgtccatcgcagcctcaacagagggagaaaacaaccaaaacaaccaaccagaagaaccgtacattcaacctgttattcttcggctactcatcatatggcttgttgattgttcaaatgctgttaactgcctgttggaatcagcagtgcatctgaactacataatagagcttgcttcaagcaaacgttacactgcttgtgttcgtggactggctgctgttgttctaggtgcttgcatcctgtacaatgctagccatgagaagggccgtgatgcttttgctgttgcagatgctataagtcaaaagattggcctcacaacgtacttcttgaggtttgacgaattgaggagaagcttggcacatcctttgccagagcagcatcatcgcaaggagctttcccgatcaagtgcgaatagcatgtcagatttccaagaaattgaagaggatgaaacaaataaagatgatcaacaccctgtcctctcagaaatatttgattcacagtttgttaattttcttagtaagctcgaggctgatattagagaaaacataatggatatatttagtcggacaaaaactgcaactgcactccttcctactgaattggagcagaagaacggggaggttgatggagagtatatcaaacgactaaagtcgtttgtagagaaacagtgcaatgagatgcaggacttgctggctcgaaacgcaatgttagcagaagagttagtgagaactggtggtggtaccaccacagatacttcacagagaccgaacaacgggcgagaaagggtccagatcgaagccctgagacaagaactggagggagcgagacgacagatagaggcactcgaaactgacaagtcccagatcgaagccgaagctaacaaccaacgaaaccttgcagtaaaactggagtccgatctcaagagcttgtcagaagcttacaacagcatagagcaggccaactaccgcctggatgccgaggtaaaaaccttgcggcagggaggcagtgtgccgtatcctgacgtggaggcaataaaggcgcaagccaaggaagaggctgagaaggacagtgaggcggagctgaacgatctgcttgtctgcctcggtcaggaacaaactaaggttgagaagctgagcacaaggctggcagagctcggcgaagatgtggatgcccttctgcaaggtattggtgacgacactgccattccggacgatgatgacgacgacgatgaagatagtgaagagtgatatgtttatgtaaccctgtaggtctgttggtgcacacaacctcacgttgggtcatgatattgtaatggcaattggcattgtacagtggataatgtgtagacaaaggcaccgttccaatttaagttatttgtggagaaactagttgaaaactaagtggcggaccgtccggtcccggacggtccacacctcgcgatcagattaactcgaacgattatccttatctcgtgtgtggttatctatctaattatgtgagatttgttagctatcgtctaggaacgagtccaga

SEQ ID NO: 13348 - DNA, 3191 bp, Zea Mays
aaaaaaacagaaacccgttacccgactcgactcgtctcttcccctccagtctccaccgagccaagccagcctgctccagcggcagacccgctaccgatctcctctgccgcggcccgcggcggcggcgatttcccctccgcgaatgccccttcaccgctgcagttgatacgccacccaagtggttcgttccacccttccttccctcgccggtctctccatcgccgcagcccgcagggcgccaccttgtcggaaggcgcgatccatggaccgctcgatcaacttccgcggcatcgccgggagcgccggaaacatcatgcagggaatggggaaattcgttttcggcaacgaggggatcgagtcaaaggaagatagctacgtcgagagatatctttatcggataagcaatggcacgatacctgatgaccggaggtctgcaatgactgagctgcagtctctagtggcagaaagccgctcggcacagatgtcgtttggagcgatgggttttcctatcctcctcaatattttgaaagaagaccgtgaggatgtagagcttgtgagaggtgccctggagacctttgtgagtgcattgactcctattgagacgtcacaagggccaaatactgaggttcaaccagcgttacaagaagcaattctattgattcctcgtggtataacagttctcatggacatgcttatggaccgtgaggtcataaggaatgaagcactgttacttcttacttatttgactcgggatgcagaggaaattcaaaaaattgttgtatttgagggtgtgtttgagaagatatttagcattattagagaggagggctattccgatggaggtgtagttgttcaggattgccttgaactgttaaataatttaattcgacacaatgcgtcaaatcagatgcttttgaaagagacaatgggctttgacccattgatatcaatactaaagattaggagaggcagtgcatttaattttacccaacagaagacagtaaatcttcttggtgctttaaatactgtggaattgcttttgatggggggcccatctggtgaagcaggtaaagacgctaacaagaatgcaaatcaaactgcattggctcagaaaaacattctggaccatcttcttttgttgggcgttgagagtcaatgggcccctgtcgttctccgctgtatggcactgcgatgtattggcaatttggtattaagaaatcctcagaatcttgattctcttgcaagaaaacaagttggagaagagcctcatgttcaacctgcactgaatgccatcttctctataatcttgcggacctctgtagcgcaggaatttgttgctgctgattatgtattcaagtgtttctgcgagagaaatcctaatggccaggcattattagcatcaactattgttccacatccgaaccaaggaaatatgcatgaacctgctatcgacatgccttttggaagtgtacttctgcaagcactggtttcaagtgatgtcaatggagatatggaggcatgttgcagagcatctagcgttctttctcacattgtcaaggacaacatgcaaagcaaggatcgtgtattgcaaattcagcttgagacacttacaccgtccttggggcgcactgagccagtattgcatcgtattgtcacatgtttgtccatcgcagcctcaacagagggagaaaacaaccaaaacaaccaaccagaagaaccgtacattcaacctgttattcttcggctactcatcatatggcttgttgattgttcaaatgctgttaactgcctgttggaatcagcagtgcatctgaactacataatagagcttgcttcaagcaaacgttacactgcttgtgttcgtggactggctgctgttgttctaggtgcttgcatcctgtacaatgctagccatgagaagggccgtgatgcttttgctgttgcagatgctataagtcaaaagattggcctcacaacgtacttcttgaggtttgacgaattgaggagaagcttggcacatcctttgccagagcagcatcatcgcaaggagctttcccgatcaagtgcgaatagcatgtcagatttccaagaaattgaagaggatgaaacaaataaagatgatcaacaccctgtcctctcagaaatatttgattcacagtttgttaattttcttagtaagctcgaggctgatattagagaaaacataatggatatatttagtcggacaaaaactgcaactgcactccttcctactgaattggagcagaagaacggggaggttgatggagagtatatcaaacgactaaagtcgtttgtagagaaacagtgcaatgagatgcaggacttgctggctcgaaacgcaatgttagcagaagagttagtgagaactggtggtggtaccaccacagatacttcacagagaccgaacaacgggcgagaaagggtccagatcgaagccctgagacaagaactggagggagcgagacgacagatagaggcactcgaaactgacaagtcccagatcgaagccgaagctaacaaccaacgaaaccttgcagtaaaactggagtccgatctcaagagcttgtcagaagcttacaacagcatagagcaggccaactaccgcctggatgccgaggtaaaaaccttgcggcagggaggcagtgtgccgtatcctgacgtggaggcaataaaggcgcaagccaaggaagaggctgagaaggacagtgaggcggagctgaacgatctgcttgtctgcctcggtcaggaacaaactaaggttgagaagctgagcacaaggctggcagagctcggcgaagatgtggatgcccttctgcaaggtattggtgacgacactgccattccggacgatgatgacgacgacgatgaagatagtgaagagtgatatgtttatgtaaccctgtaggtctgttggtgcacacaacctcacgttgggtcatgatattgtaatggcaattggcattgtacagtggataatgtgtagacaaaggcaccgttccaatttaagttatttgtggagaaactagttgaaaactaagtggcggaccgtccggtcccggacggtccacacctcgcgatcagattaactcgaacgattatccttatctcgtgtgtggttatctatctaattatgtgagatttgttagctatcgtctaggaacgagtccaga

SEQ ID NO: 13349 - DNA, 3324 bp, Zea Mays
aaaaaacagaaacccgttacccgactcgactcgtctcttcccctccagtctccaccgagccaagccagcctgctccagcggcagacccgctaccgatctcctctgccgcggcccgcggcggcggcgatttcccctccgcgaatgccccttcaccgctgcagttgatacgccacccaagtggttcgttccacccttccttccctcgccggtctctccatcgccgcagcccgcagggcgccaccttgtcggaaggcgcgatccatggaccgctcgatcaacttccgcggcatcgccgggagcgccggaaacatcatgcagggaatggggaaattcgttttcggcaacgaggggatcgagtcaaaggaagatagctacgtcgagagatatctttatcggataagcaatggcacgatacctgatgaccggaggtctgcaatgactgagctgcagtctctagtggcagaaagccgctcggcacagatgtcgtttggagcgatgggttttcctatcctcctcaatattttgaaagaagaccgtgaggatgtagagcttgtgagaggtgccctggagacctttgtgagtgcattgactcctattgagacgtcacaagggccaaatactgaggttcaaccagcgtcagtgaactctgatctgctatctcaagaaaccgagaatatttctcttcttttgagcttattgaggaagacttttatgtgagatactacacaatccaacttctaacagctctacttacaaactcgctgaaaaggttacaagaagcaattctattgattcctcgtggtataacagttctcatggacatgcttatggaccgtgaggtcataaggaatgaagcactgttacttcttacttatttgactcgggatgcagaggaaattcaaaaaattgttgtatttgagggtgtgtttgagaagatatttagcattattagagaggagggctattccgatggaggtgtagttgttcaggattgccttgaactgttaaataatttaattcgacacaatgcgtcaaatcagatgcttttgaaagagacaatgggctttgacccattgatatcaatactaaagattaggagaggcagtgcatttaattttacccaacagaagacagtaaatcttcttggtgctttaaatactgtggaattgcttttgatggggggcccatctggtgaagcaggtaaagacgctaacaagaatgcaaatcaaactgcattggctcagaaaaacattctggaccatcttcttttgttgggcgttgagagtcaatgggcccctgtcgttctccgctgtatggcactgcgatgtattggcaatttggtattaagaaatcctcagaatcttgattctcttgcaagaaaacaagttggagaagagcctcatgttcaacctgcactgaatgccatcttctctataatcttgcggacctctgtagcgcaggaatttgttgctgctgattatgtattcaagtgtttctgcgagagaaatcctaatggccaggcattattagcatcaactattgttccacatccgaaccaaggaaatatgcatgaacctgctatcgacatgccttttggaagtgtacttctgcaagcactggtttcaagtgatgtcaatggagatatggaggcatgttgcagagcatctagcgttctttctcacattgtcaaggacaacatgcaaagcaaggatcgtgtattgcaaattcagcttgagacacttacaccgtccttggggcgcactgagccagtattgcatcgtattgtcacatgtttgtccatcgcagcctcaacagagggagaaaacaaccaaaacaaccaaccagaagaaccgtacattcaacctgttattcttcggctactcatcatatggcttgttgattgttcaaatgctgttaactgcctgttggaatcagcagtgcatctgaactacataatagagcttgcttcaagcaaacgttacactgcttgtgttcgtggactggctgctgttgttctaggtgcttgcatcctgtacaatgctagccatgagaagggccgtgatgcttttgctgttgcagatgctataagtcaaaagattggcctcacaacgtacttcttgaggtttgacgaattgaggagaagcttggcacatcctttgccagagcagcatcatcgcaaggagctttcccgatcaagtgcgaatagcatgtcagatttccaagaaattgaagaggatgaaacaaataaagatgatcaacaccctgtcctctcagaaatatttgattcacagtttgttaattttcttagtaagctcgaggctgatattagagaaaacataatggatatatttagtcggacaaaaactgcaactgcactccttcctactgaattggagcagaagaacggggaggttgatggagagtatatcaaacgactaaagtcgtttgtagagaaacagtgcaatgagatgcaggacttgctggctcgaaacgcaatgttagcagaagagttagtgagaactggtggtggtaccaccacagatacttcacagagaccgaacaacgggcgagaaagggtccagatcgaagccctgagacaagaactggagggagcgagacgacagatagaggcactcgaaactgacaagtcccagatcgaagccgaagctaacaaccaacgaaaccttgcagtaaaactggagtccgatctcaagagcttgtcagaagcttacaacagcatagagcaggccaactaccgcctggatgccgaggtaaaaaccttgcggcagggaggcagtgtgccgtatcctgacgtggaggcaataaaggcgcaagccaaggaagaggctgagaaggacagtgaggcggagctgaacgatctgcttgtctgcctcggtcaggaacaaactaaggttgagaagctgagcacaaggctggcagagctcggcgaagatgtggatgcccttctgcaaggtattggtgacgacactgccattccggacgatgatgacgacgacgatgaagatagtgaagagtgatatgtttatgtaaccctgtaggtctgttggtgcacacaacctcacgttgggtcatgatattgtaatggcaattggcattgtacagtggataatgtgtagacaaaggcaccgttccaatttaagttatttgtggagaaactagttgaaaactaagtggcggaccgtccggtcccggacggtccacacctcgcgatcagattaactcgaacgattatccttatctcgtgtgtggttatctatctaattatgtgagatttgttagctatcgtctaggaacgagtccaga

SEQ ID NO: 13350 - DNA, 3263 bp, Zea Mays
aaaaaacagaaacccgttacccgactcgactcgtctcttcccctccagtctccaccgagccaagccagcctgctccagcggcagacccgctaccgatctcctctgccgcggcccgcggcggcggcgatttcccctccgcgaatgccccttcaccgctgcagttgatacgccacccaagtggttcgttccacccttccttccctcgccggtctctccatcgccgcagcccgcagggcgccaccttgtcggaaggcgcgatccatggaccgctcgatcaacttccgcggcatcgccgggagcgccggaaacatcatgcagggaatggggaaattcgttttcggcaacgaggggatcgagtcaaaggaagatagctacgtcgagagatatctttatcggataagcaatggcacgatacctgatgaccggaggtctgcaatgactgagctgcagtctctagtggcagaaagccgctcggcacagatgtcgtttggagcgatgggttttcctatcctcctcaatattttgaaagaagaccgtgaggatgtagagcttgtgagaggtgccctggagacctttgtgagtgcattgactcctattgagacgtcacaagggccaaatactgaggttcaaccagcgtcagtgaactctgatctgctatctcaagaaaccgagaatatttctcttcttttgagcttattgtcagaggaagacttttatgtgagatactacacaatccaacttctaacagctctacttacaaactcgctgaaaaggtgcccagttacaagaagcaattctattgattcctcgtggtataacagttctcatggacatgcttatggaccgtgaggtcataaggaatgaagcactgttacttcttacttatttgactcgggatgcagaggaaattcaaaaaattgttgtatttgagggtgtgtttgagaagatatttagcattattagagaggagggctattccgatggaggtgtagttgttcaggattgccttgaactgttaaataatttaattcgacacaatgcgtcaaatcagatgcttttgaaagagacaatgggctttgacccattgatatcaatactaaagattaggagaggcagtgcatttaattttacccaacagaagacagtaaatcttcttggtgctttaaatactgtggaattgcttttgatggggggcccatctggtgaagcaggtaaagacgctaacaagaatgcaaatcaaactgcattggctcaggcactgcgatgtattggcaatttggtattaagaaatcctcagaatcttgattctcttgcaagaaaacaagttggagaagagcctcatgttcaacctgcactgaatgccatcttctctataatcttgcggacctctgtagcgcaggaatttgttgctgctgattatgtattcaagtgtttctgcgagagaaatcctaatggccaggcattattagcatcaactattgttccacatccgaaccaaggaaatatgcatgaacctgctatcgacatgccttttggaagtgtacttctgcaagcactggtttcaagtgatgtcaatggagatatggaggcatgttgcagagcatctagcgttctttctcacattgtcaaggacaacatgcaaagcaaggatcgtgtattgcaaattcagcttgagacacttacaccgtccttggggcgcactgagccagtattgcatcgtattgtcacatgtttgtccatcgcagcctcaacagagggagaaaacaaccaaaacaaccaaccagaagaaccgtacattcaacctgttattcttcggctactcatcatatggcttgttgattgttcaaatgctgttaactgcctgttggaatcagcagtgcatctgaactacataatagagcttgcttcaagcaaacgttacactgcttgtgttcgtggactggctgctgttgttctaggtgcttgcatcctgtacaatgctagccatgagaagggccgtgatgcttttgctgttgcagatgctataagtcaaaagattggcctcacaacgtacttcttgaggtttgacgaattgaggagaagcttggcacatcctttgccagagcagcatcatcgcaaggagctttcccgatcaagtgcgaatagcatgtcagatttccaagaaattgaagaggatgaaacaaataaagatgatcaacaccctgtcctctcagaaatatttgattcacagtttgttaattttcttagtaagctcgaggctgatattagagaaaacataatggatatatttagtcggacaaaaactgcaactgcactccttcctactgaattggagcagaagaacggggaggttgatggagagtatatcaaacgactaaagtcgtttgtagagaaacagtgcaatgagatgcaggacttgctggctcgaaacgcaatgttagcagaagagttagtgagaactggtggtggtaccaccacagatacttcacagagaccgaacaacgggcgagaaagggtccagatcgaagccctgagacaagaactggagggagcgagacgacagatagaggcactcgaaactgacaagtcccagatcgaagccgaagctaacaaccaacgaaaccttgcagtaaaactggagtccgatctcaagagcttgtcagaagcttacaacagcatagagcaggccaactaccgcctggatgccgaggtaaaaaccttgcggcagggaggcagtgtgccgtatcctgacgtggaggcaataaaggcgcaagccaaggaagaggctgagaaggacagtgaggcggagctgaacgatctgcttgtctgcctcggtcaggaacaaactaaggttgagaagctgagcacaaggctggcagagctcggcgaagatgtggatgcccttctgcaaggtattggtgacgacactgccattccggacgatgatgacgacgacgatgaagatagtgaagagtgatatgtttatgtaaccctgtaggtctgttggtgcacacaacctcacgttgggtcatgatattgtaatggcaattggcattgtacagtggataatgtgtagacaaaggcaccgttccaatttaagttatttgtggagaaactagttgaaaactaagtggcggaccgtccggtcccggacggtccacacctcgcgatcagattaactcgaacgattatccttatctcgtgtgtggttatctatctaattatgtgagatttgttagctatcgtctaggaacgagtccaga

SEQ ID NO: 13351 - DNA, 3378 bp, Zea Mays
aaaaaacagaaacccgttacccgactcgactcgtctcttcccctccagtctccaccgagccaagccagcctgctccagcggcagacccgctaccgatctcctctgccgcggcccgcggcggcggcgatttcccctccgcgaatgccccttcaccgctgcagttgatacgccacccaagtggttcgttccacccttccttccctcgccggtctctccatcgccgcagcccgcagggcgccaccttgtcggaaggcgcgatccatggaccgctcgatcaacttccgcggcatcgccgggagcgccggaaacatcatgcagggaatggggaaattcgttttcggcaacgaggggatcgagtcaaaggaagatagctacgtcgagagatatctttatcggataagcaatggcacgatacctgatgaccggaggtctgcaatgactgagctgcagtctctagtggcagaaagccgctcggcacagatgtcgtttggagcgatgggttttcctatcctcctcaatattttgaaagaagaccgtgaggatgtagagcttgtgagaggtgccctggagacctttgtgagtgcattgactcctattgagacgtcacaagggccaaatactgaggttcaaccagcgtcagtgaactctgatctgctatctcaagaaaccgagaatatttctcttcttttgagcttattggtgattactcatcttttgccttaacaacatgtaacctgcatcgcctgcttcatgtgtactgagtcctggcttattgctcctgtctggtttgaagtcagaggaagacttttatgtgagatactacacaatccaacttctaacagctctacttacaaactcgctgaaaaggtgcccagttacaagaagcaattctattgattcctcgtggtataacagttctcatggacatgcttatggaccgtgaggtcataaggaatgaagcactgttacttcttacttatttgactcgggatgcagaggaaattcaaaaaattgttgtatttgagggtgtgtttgagaagatatttagcattattagagaggagggctattccgatggaggtgtagttgttcagatgcttttgaaagagacaatgggctttgacccattgatatcaatactaaagattaggagaggcagtgcatttaattttacccaacagaagacagtaaatcttcttggtgctttaaatactgtggaattgcttttgatggggggcccatctggtgaagcaggtaaagacgctaacaagaatgcaaatcaaactgcattggctcagaaaaacattctggaccatcttcttttgttgggcgttgagagtcaatgggcccctgtcgttctccgctgtatggcactgcgatgtattggcaatttggtattaagaaatcctcagaatcttgattctcttgcaagaaaacaagttggagaagagcctcatgttcaacctgcactgaatgccatcttctctataatcttgcggacctctgtagcgcaggaatttgttgctgctgattatgtattcaagtgtttctgcgagagaaatcctaatggccaggcattattagcatcaactattgttccacatccgaaccaaggaaatatgcatgaacctgctatcgacatgccttttggaagtgtacttctgcaagcactggtttcaagtgatgtcaatggagatatggaggcatgttgcagagcatctagcgttctttctcacattgtcaaggacaacatgcaaagcaaggatcgtgtattgcaaattcagcttgagacacttacaccgtccttggggcgcactgagccagtattgcatcgtattgtcacatgtttgtccatcgcagcctcaacagagggagaaaacaaccaaaacaaccaaccagaagaaccgtacattcaacctgttattcttcggctactcatcatatggcttgttgattgttcaaatgctgttaactgcctgttggaatcagcagtgcatctgaactacataatagagcttgcttcaagcaaacgttacactgcttgtgttcgtggactggctgctgttgttctaggtgcttgcatcctgtacaatgctagccatgagaagggccgtgatgcttttgctgttgcagatgctataagtcaaaagattggcctcacaacgtacttcttgaggtttgacgaattgaggagaagcttggcacatcctttgccagagcagcatcatcgcaaggagctttcccgatcaagtgcgaatagcatgtcagatttccaagaaattgaagaggatgaaacaaataaagatgatcaacaccctgtcctctcagaaatatttgattcacagtttgttaattttcttagtaagctcgaggctgatattagagaaaacataatggatatatttagtcggacaaaaactgcaactgcactccttcctactgaattggagcagaagaacggggaggttgatggagagtatatcaaacgactaaagtcgtttgtagagaaacagtgcaatgagatgcaggacttgctggctcgaaacgcaatgttagcagaagagttagtgagaactggtggtggtaccaccacagatacttcacagagaccgaacaacgggcgagaaagggtccagatcgaagccctgagacaagaactggagggagcgagacgacagatagaggcactcgaaactgacaagtcccagatcgaagccgaagctaacaaccaacgaaaccttgcagtaaaactggagtccgatctcaagagcttgtcagaagcttacaacagcatagagcaggccaactaccgcctggatgccgaggtaaaaaccttgcggcagggaggcagtgtgccgtatcctgacgtggaggcaataaaggcgcaagccaaggaagaggctgagaaggacagtgaggcggagctgaacgatctgcttgtctgcctcggtcaggaacaaactaaggttgagaagctgagcacaaggctggcagagctcggcgaagatgtggatgcccttctgcaaggtattggtgacgacactgccattccggacgatgatgacgacgacgatgaagatagtgaagagtgatatgtttatgtaaccctgtaggtctgttggtgcacacaacctcacgttgggtcatgatattgtaatggcaattggcattgtacagtggataatgtgtagacaaaggcaccgttccaatttaagttatttgtggagaaactagttgaaaactaagtggcggaccgtccggtcccggacggtccacacctcgcgatcagattaactcgaacgattatccttatctcgtgtgtggttatctatctaattatgtgagatttgttagctatcgtctaggaacgagtccaga

SEQ ID NO: 13352 - DNA, 3275 bp, Zea Mays
aaaacagaaacccgttacccgactcgactcgtctcttcccctccagtctccaccgagccaagccagcctgctccagcggcagacccgctaccgatctcctctgccgcggcccgcggcggcggcgatttcccctccgcgaatgccccttcaccgctgcagttgatacgccacccaagtggttcgttccacccttccttccctcgccggtctctccatcgccgcagcccgcagggcgccaccttgtcggaaggcgcgatccatggaccgctcgatcaacttccgcggcatcgccgggagcgccggaaacatcatgcagggaatggggaaattcgttttcggcaacgaggggatcgagtcaaaggaagatagctacgtcgagagatatctttatcggataagcaatggcacgatacctgatgaccggaggtctgcaatgactgagctgcagtctctagtggcagaaagccgctcggcacagatgtcgtttggagcgatgggttttcctatcctcctcaatattttgaaagaagaccgtgaggatgtagagcttgtgagaggtgccctggagacctttgtgagtgcattgactcctattgagacgtcacaagggccaaatactgaggttcaaccagcgtcagtgaactctgatctgctatctcaagaaaccgagaatatttctcttcttttgagcttattgtcagaggaagacttttatgtgagatactacacaatccaacttctaacagctctacttacaaactcgctgaaaaggttacaagaagcaattctattgattcctcgtggtataacagttctcatggacatgcttatggaccgtgaggtcataaggaatgaagcactgttacttcttacttatttgactcgggatgcagaggaaattcaaaaaattgttgtatttgagggtgtgtttgagaagatatttagcattattagagaggagggctattccgatggaggtgtagttgttcagatgcttttgaaagagacaatgggctttgacccattgatatcaatactaaagattaggagaggcagtgcatttaattttacccaacagaagacagtaaatcttcttggtgctttaaatactgtggaattgcttttgatggggggcccatctggtgaagcaggtaaagacgctaacaagaatgcaaatcaaactgcattggctcagaaaaacattctggaccatcttcttttgttgggcgttgagagtcaatgggcccctgtcgttctccgctgtatggcactgcgatgtattggcaatttggtattaagaaatcctcagaatcttgattctcttgcaagaaaacaagttggagaagagcctcatgttcaacctgcactgaatgccatcttctctataatcttgcggacctctgtagcgcaggaatttgttgctgctgattatgtattcaagtgtttctgcgagagaaatcctaatggccaggcattattagcatcaactattgttccacatccgaaccaaggaaatatgcatgaacctgctatcgacatgccttttggaagtgtacttctgcaagcactggtttcaagtgatgtcaatggagatatggaggcatgttgcagagcatctagcgttctttctcacattgtcaaggacaacatgcaaagcaaggatcgtgtattgcaaattcagcttgagacacttacaccgtccttggggcgcactgagccagtattgcatcgtattgtcacatgtttgtccatcgcagcctcaacagagggagaaaacaaccaaaacaaccaaccagaagaaccgtacattcaacctgttattcttcggctactcatcatatggcttgttgattgttcaaatgctgttaactgcctgttggaatcagcagtgcatctgaactacataatagagcttgcttcaagcaaacgttacactgcttgtgttcgtggactggctgctgttgttctaggtgcttgcatcctgtacaatgctagccatgagaagggccgtgatgcttttgctgttgcagatgctataagtcaaaagattggcctcacaacgtacttcttgaggtttgacgaattgaggagaagcttggcacatcctttgccagagcagcatcatcgcaaggagctttcccgatcaagtgcgaatagcatgtcagatttccaagaaattgaagaggatgaaacaaataaagatgatcaacaccctgtcctctcagaaatatttgattcacagtttgttaattttcttagtaagctcgaggctgatattagagaaaacataatggatatatttagtcggacaaaaactgcaactgcactccttcctactgaattggagcagaagaacggggaggttgatggagagtatatcaaacgactaaagtcgtttgtagagaaacagtgcaatgagatgcaggacttgctggctcgaaacgcaatgttagcagaagagttagtgagaactggtggtggtaccaccacagatacttcacagagaccgaacaacgggcgagaaagggtccagatcgaagccctgagacaagaactggagggagcgagacgacagatagaggcactcgaaactgacaagtcccagatcgaagccgaagctaacaaccaacgaaaccttgcagtaaaactggagtccgatctcaagagcttgtcagaagcttacaacagcatagagcaggccaactaccgcctggatgccgaggtaaaaaccttgcggcagggaggcagtgtgccgtatcctgacgtggaggcaataaaggcgcaagccaaggaagaggctgagaaggacagtgaggcggagctgaacgatctgcttgtctgcctcggtcaggaacaaactaaggttgagaagctgagcacaaggctggcagagctcggcgaagatgtggatgcccttctgcaaggtattggtgacgacactgccattccggacgatgatgacgacgacgatgaagatagtgaagagtgatatgtttatgtaaccctgtaggtctgttggtgcacacaacctcacgttgggtcatgatattgtaatggcaattggcattgtacagtggataatgtgtagacaaaggcaccgttccaatttaagttatttgtggagaaactagttgaaaactaagtggcggaccgtccggtcccggacggtccacacctcgcgatcagattaactcgaacgattatccttatctcgtgtgtggttatctatctaattatgtgagatttgttagctatcgtctaggaacgagtccaga

SEQ ID NO: 13353 - DNA, 3257 bp, Zea Mays
cagaaacccgttacccgactcgactcgtctcttcccctccagtctccaccgagccaagccagcctgctccagcggcagacccgctaccgatctcctctgccgcggcccgcggcggcggcgatttcccctccgcgaatgccccttcaccgctgcagttgatacgccacccaagtggttcgttccacccttccttccctcgccggtctctccatcgccgcagcccgcagggcgccaccttgtcggaaggcgcgatccatggaccgctcgatcaacttccgcggcatcgccgggagcgccggaaacatcatgcagggaatggggaaattcgttttcggcaacgaggggatcgagtcaaaggaagatagctacgtcgagagatatctttatcggataagcaatggcacgatacctgatgaccggaggtctgcaatgactgagctgcagtctctagtggcagaaagccgctcggcacagatgtcgtttggagcgatgggttttcctatcctcctcaatattttgaaagaagaccgtgaggatgtagagcttgtgagaggtgccctggagacctttgtgagtgcattgactcctattgagacgtcacaagggccaaatactgaggttcaaccagcgtcagtgaactctgatctgctatctcaagaaaccgagaatatttctcttcttttgagcttattgtcagaggaagacttttatgtgagatactacacaatccaacttctaacagctctacttacaaactcgctgaaaaggttacaagaagcaattctattgattcctcgtggtataacagttctcatggacatgcttatggaccgtgaggtcataaggaatgaagcactgttacttcttacttatttgactcgggatgcagaggaaattcaaaaaattgttgtatttgagggtgtgtttgagaagatatttagcattattagagaggagggctattccgatggaggtgtagttgttcagagcaggattgccttgaactgttaaataatttaattcgacacaatgcgtcaaatcagatgcttttgaaagagacaatgggctttgacccattgatatcaatactaaagattaggagaggcagtgcatttaattttacccaacagaaggtaaagacgctaacaagaatgcaaatcaaactgcattggctcagaaaaacattctggaccatcttcttttgttgggcgttgagagtcaatgggcccctgtcgttctccgctgtatggcactgcgatgtattggcaatttggtattaagaaatcctcagaatcttgattctcttgcaagaaaacaagttggagaagagcctcatgttcaacctgcactgaatgccatcttctctataatcttgcggacctctgtagcgcaggaatttgttgctgctgattatgtattcaagtgtttctgcgagagaaatcctaatggccaggcattattagcatcaactattgttccacatccgaaccaaggaaatatgcatgaacctgctatcgacatgccttttggaagtgtacttctgcaagcactggtttcaagtgatgtcaatggagatatggaggcatgttgcagagcatctagcgttctttctcacattgtcaaggacaacatgcaaagcaaggatcgtgtattgcaaattcagcttgagacacttacaccgtccttggggcgcactgagccagtattgcatcgtattgtcacatgtttgtccatcgcagcctcaacagagggagaaaacaaccaaaacaaccaaccagaagaaccgtacattcaacctgttattcttcggctactcatcatatggcttgttgattgttcaaatgctgttaactgcctgttggaatcagcagtgcatctgaactacataatagagcttgcttcaagcaaacgttacactgcttgtgttcgtggactggctgctgttgttctaggtgcttgcatcctgtacaatgctagccatgagaagggccgtgatgcttttgctgttgcagatgctataagtcaaaagattggcctcacaacgtacttcttgaggtttgacgaattgaggagaagcttggcacatcctttgccagagcagcatcatcgcaaggagctttcccgatcaagtgcgaatagcatgtcagatttccaagaaattgaagaggatgaaacaaataaagatgatcaacaccctgtcctctcagaaatatttgattcacagtttgttaattttcttagtaagctcgaggctgatattagagaaaacataatggatatatttagtcggacaaaaactgcaactgcactccttcctactgaattggagcagaagaacggggaggttgatggagagtatatcaaacgactaaagtcgtttgtagagaaacagtgcaatgagatgcaggacttgctggctcgaaacgcaatgttagcagaagagttagtgagaactggtggtggtaccaccacagatacttcacagagaccgaacaacgggcgagaaagggtccagatcgaagccctgagacaagaactggagggagcgagacgacagatagaggcactcgaaactgacaagtcccagatcgaagccgaagctaacaaccaacgaaaccttgcagtaaaactggagtccgatctcaagagcttgtcagaagcttacaacagcatagagcaggccaactaccgcctggatgccgaggtaaaaaccttgcggcagggaggcagtgtgccgtatcctgacgtggaggcaataaaggcgcaagccaaggaagaggctgagaaggacagtgaggcggagctgaacgatctgcttgtctgcctcggtcaggaacaaactaaggttgagaagctgagcacaaggctggcagagctcggcgaagatgtggatgcccttctgcaaggtattggtgacgacactgccattccggacgatgatgacgacgacgatgaagatagtgaagagtgatatgtttatgtaaccctgtaggtctgttggtgcacacaacctcacgttgggtcatgatattgtaatggcaattggcattgtacagtggataatgtgtagacaaaggcaccgttccaatttaagttatttgtggagaaactagttgaaaactaagtggcggaccgtccggtcccggacggtccacacctcgcgatcagattaactcgaacgattatccttatctcgtgtgtggttatctatctaattatgtgagatttgttagctatcgtctaggaacgagtccaga

SEQ ID NO: 13354 - DNA, 2544 bp, Zea Mays
aaacccgttacccgactcgactcgtctcttcccctccagtctccaccgagccaagccagcctgctccagcggcagacccgctaccgatctcctctgccgcggcccgcggcggcggcgatttcccctccgcgaatgccccttcaccgctgcagttgatacgccacccaagtggttcgttccacccttccttccctcgccggtctctccatcgccgcagcccgcagggcgccaccttgtcggaaggcgcgatccatggaccgctcgatcaacttccgcggcatcgccgggagcgccggaaacatcatgcagggaatggggaaattcgttttcggcaacgaggggatcgagtcaaaggaagatagctacgtcgagagatatctttatcggataagcaatggcacgatacctgatgaccggaggtctgcaatgactgagctgcagtctctagtggcagaaagccgctcggcacagatgtcgtttggagcgatgggttttcctatcctcctcaatattttgaaagaagaccgtgaggatgtagagcttgtgagaggtgccctggagacctttgtgagtgcattgactcctattgagacgtcacaagggccaaatactgaggttcaaccagcgtcagtgaactctgatctgctatctcaagaaaccgagaatatttctcttcttttgagcttattgtcagaggaagacttttatgtgagatactacacaatccaacttctaacagctctacttacaaactcgctgaaaaggttacaagaagcaattctattgattcctcgtggtataacagttctcatggacatgcttatggaccgtgaggtcataaggaatgaagcactgttacttcttacttatttgactcgggatgcagaggaaattcaaaaaattgttgtatttgagggtgtgtttgagaagatatttagcattattagagaggagggctattccgatggaggtgtagttgttcaggattgccttgaactgttaaataatttaattcgacacaatgcgtcaaatcagatgcttttgaaagagacaatgggctttgacccattgatatcaatactaaagattaggagaggcagtgcatttaattttacccaacagaaggtaaagacgctaacaagaatgcaaatcaaactgcattggctcagaaaaacattctggaccatcttcttttgttgggcgttgagagtcaatgggcccctgtcgttctccgctgtatggcactgcgatgtattggcaatttggtattaagaaatcctcagaatcttgattctcttgcaagaaaacaagttggagaagagcctcatgttcaacctgcactgaatgccatcttctctataatcttgcggacctctgtagcgcaggaatttgttgctgctgattatgtattcaagtgtttctgcgagagaaatcctaatggccaggcattattagcatcaactattgttccacatccgaaccaaggaaatatgcatgaacctgctatcgacatgccttttggaagtgtacttctgcaagcactggtttcaagtgatgtcaatggagatatggaggtgaagtgtttgaaaacctaaagctccagtttacaggacattcaactggtctctgtgtagctgtgtttaatcaattgttctgacatttcaaccaaaattacacaggcatgttgcagagcatctagcgttctttctcacattgtcaaggacaacatgcaaagcaaggatcgtgtattgcaaattcagcttgagacacttacaccgtccttggggcgcactgagccagtattgcatcgtattgtcacatgtttgtccatcgcagcctcaacagagggagaaaacaaccaaaacaaccaaccagaagaaccgtacattcaacctgttattcttcggctactcatcatatggcttgttgattgttcaaatgctgttaactgcctgttggaatcagcagtgcatctgaactacataatagagcttgcttcaagcaaacgttacactgcttgtgttcgtggactggctgctgttgttctaggtgcttgcatcctgtacaatgctagccatgagaagggccgtgatgcttttgctgttgcagatgctataagtcaaaagattggcctcacaacgtacttcttgaggtttgacgaattgaggagaagcttggcacatcctttgccagagcagcatcatcgcaaggagctttcccgatcaagtgcgaatagcatgtcagatttccaagaaattgaagaggatgaaacaaataaagatgatcaacaccctgtcctctcagaaatatttgattcacagtttgttaattttcttagtaagctcgaggctgatattagagaaaacataatggatatatttagtcggacaaaaactgcaactgcactccttcctactgaattggagcagaagaacggggaggttgatggagagtatatcaaacgactaaagtcgtttgtagagaaacagtgcaatgagatgcagttggagcttgctccttaagacaccaccaccttgaatgaag

SEQ ID NO: 13355 - DNA, 3099 bp, Zea Mays
cgactcgactcgtctcttcccctccagtctccaccgagccaagccagcctgctccagcggcagacccgctaccgatctcctctgccgcggcccgcggcggcggcgatttcccctccgcgaatgccccttcaccgctgcagttgatacgccacccaagtggttcgttccacccttccttccctcgccggtctctccatcgccgcagcccgcagggcgccaccttgtcggaaggcgcgatccatggaccgctcgatcaacttccgcggcatcgccgggagcgccggaaacatcatgcagggaatggggaaattcgttttcggcaacgaggggatcgagtcaaaggaagatagctacgtcgagagatatctttatcggataagcaatggcacgatacctgatgaccggaggtctgcaatgactgagctgcagtctctagtggcagaaagccgctcggcacagatgtcgtttggagcgatgggttttcctatcctcctcaatattttgaaagaagaccgtgaggatgtagagcttgtgagaggtgccctggagacctttgtgagtgcattgactcctattgagacgtcacaagggccaaatactgaggttcaaccagcgttacaagaagcaattctattgattcctcgtggtataacagttctcatggacatgcttatggaccgtgaggtcataaggaatgaagcactgttacttcttacttatttgactcgggatgcagaggaaattcaaaaaattgttgtatttgagggtgtgtttgagaagatatttagcattattagagaggagggctattccgatggaggtgtagttgttcaggattgccttgaactgttaaataatttaattcgacacaatgcgtcaaatcagatgcttttgaaagagacaatgggctttgacccattgatatcaatactaaagattaggagaggcagtgcatttaattttacccaacagaaggtaaagacgctaacaagaatgcaaatcaaactgcattggctcagaaaaacattctggaccatcttcttttgttgggcgttgagagtcaatgggcccctgtcgttctccgctgtatggcactgcgatgtattggcaatttggtattaagaaatcctcagaatcttgattctcttgcaagaaaacaagttggagaagagcctcatgttcaacctgcactgaatgccatcttctctataatcttgcggacctctgtagcgcaggaatttgttgctgctgattatgtattcaagtgtttctgcgagagaaatcctaatggccaggcattattagcatcaactattgttccacatccgaaccaaggaaatatgcatgaacctgctatcgacatgccttttggaagtgtacttctgcaagcactggtttcaagtgatgtcaatggagatatggaggcatgttgcagagcatctagcgttctttctcacattgtcaaggacaacatgcaaagcaaggatcgtgtattgcaaattcagcttgagacacttacaccgtccttggggcgcactgagccagtattgcatcgtattgtcacatgtttgtccatcgcagcctcaacagagggagaaaacaaccaaaacaaccaaccagaagaaccgtacattcaacctgttattcttcggctactcatcatatggcttgttgattgttcaaatgctgttaactgcctgttggaatcagcagtgcatctgaactacataatagagcttgcttcaagcaaacgttacactgcttgtgttcgtggactggctgctgttgttctaggtgcttgcatcctgtacaatgctagccatgagaagggccgtgatgcttttgctgttgcagatgctataagtcaaaagattggcctcacaacgtacttcttgaggtttgacgaattgaggagaagcttggcacatcctttgccagagcagcatcatcgcaaggagctttcccgatcaagtgcgaatagcatgtcagatttccaagaaattgaagaggatgaaacaaataaagatgatcaacaccctgtcctctcagaaatatttgattcacagtttgttaattttcttagtaagctcgaggctgatattagagaaaacataatggatatatttagtcggacaaaaactgcaactgcactccttcctactgaattggagcagaagaacggggaggttgatggagagtatatcaaacgactaaagtcgtttgtagagaaacagtgcaatgagatgcaggacttgctggctcgaaacgcaatgttagcagaagagttagtgagaactggtggtggtaccaccacagatacttcacagagaccgaacaacgggcgagaaagggtccagatcgaagccctgagacaagaactggagggagcgagacgacagatagaggcactcgaaactgacaagtcccagatcgaagccgaagctaacaaccaacgaaaccttgcagtaaaactggagtccgatctcaagagcttgtcagaagcttacaacagcatagagcaggccaactaccgcctggatgccgaggtaaaaaccttgcggcagggaggcagtgtgccgtatcctgacgtggaggcaataaaggcgcaagccaaggaagaggctgagaaggacagtgaggcggagctgaacgatctgcttgtctgcctcggtcaggaacaaactaaggttgagaagctgagcacaaggctggcagagctcggcgaagatgtggatgcccttctgcaaggtattggtgacgacactgccattccggacgatgatgacgacgacgatgaagatagtgaagagtgatatgtttatgtaaccctgtaggtctgttggtgcacacaacctcacgttgggtcatgatattgtaatggcaattggcattgtacagtggataatgtgtagacaaaggcaccgttccaatttaagttatttgtggagaaactagttgaaaactaagtggcggaccgtccggtcccggacggtccacacctcgcgatcagattaactcgaacgattatccttatctcgtgtgtggttatctatctaattatgtgagatttgttagctatcgtctaggaacgagtccaga

SEQ ID NO: 13356 - DNA, 3237 bp, Zea Mays
ctcgactcgtctcttcccctccagtctccaccgagccaagccagcctgctccagcggcagacccgctaccgatctcctctgccgcggcccgcggcggcggcgatttcccctccgcgaatgccccttcaccgctgcagttgatacgccacccaagtggttcgttccacccttccttccctcgccggtctctccatcgccgcagcccgcagggcgccaccttgtcggaaggcgcgatccatggaccgctcgatcaacttccgcggcatcgccgggagcgccggaaacatcatgcagggaatggggaaattcgttttcggcaacgaggggatcgagtcaaaggaagatagctacgtcgagagatatctttatcggataagcaatggcacgatacctgatgaccggaggtctgcaatgactgagctgcagtctctagtggcagaaagccgctcggcacagatgtcgtttggagcgatgggttttcctatcctcctcaatattttgaaagaagaccgtgaggatgtagagcttgtgagaggtgccctggagacctttgtgagtgcattgactcctattgagacgtcacaagggccaaatactgaggttcaaccagcgtcagtgaactctgatctgctatctcaagaaaccgagaatatttctcttcttttgagcttattgtcagaggaagacttttatgtgagatactacacaatccaacttctaacagctctacttacaaactcgctgaaaaggttacaagaagcaattctattgattcctcgtggtataacagttctcatggacatgcttatggaccgtgaggtcataaggaatgaagcactgttacttcttacttatttgactcgggatgcagaggaaattcaaaaaattgttgtatttgagggtgtgtttgagaagatatttagcattattagagaggagggctattccgatggaggtgtagttgttcagagcaggattgccttgaactgttaaataatttaattcgacacaatgcgtcaaatcagatgcttttgaaagagacaatgggctttgacccattgatatcaatactaaagattaggagaggcagtgcatttaattttacccaacagaagacagtaaatcttcttggtgctttaaatactgtggaattgcttttgatggggggcccatctggtgaagcaggtaaagacgctaacaagaatgcaaatcaaactgcattggctcaggcactgcgatgtattggcaatttggtattaagaaatcctcagaatcttgattctcttgcaagaaaacaagttggagaagagcctcatgttcaacctgcactgaatgccatcttctctataatcttgcggacctctgtagcgcaggaatttgttgctgctgattatgtattcaagtgtttctgcgagagaaatcctaatggccaggcattattagcatcaactattgttccacatccgaaccaaggaaatatgcatgaacctgctatcgacatgccttttggaagtgtacttctgcaagcactggtttcaagtgatgtcaatggagatatggaggcatgttgcagagcatctagcgttctttctcacattgtcaaggacaacatgcaaagcaaggatcgtgtattgcaaattcagcttgagacacttacaccgtccttggggcgcactgagccagtattgcatcgtattgtcacatgtttgtccatcgcagcctcaacagagggagaaaacaaccaaaacaaccaaccagaagaaccgtacattcaacctgttattcttcggctactcatcatatggcttgttgattgttcaaatgctgttaactgcctgttggaatcagcagtgcatctgaactacataatagagcttgcttcaagcaaacgttacactgcttgtgttcgtggactggctgctgttgttctaggtgcttgcatcctgtacaatgctagccatgagaagggccgtgatgcttttgctgttgcagatgctataagtcaaaagattggcctcacaacgtacttcttgaggtttgacgaattgaggagaagcttggcacatcctttgccagagcagcatcatcgcaaggagctttcccgatcaagtgcgaatagcatgtcagatttccaagaaattgaagaggatgaaacaaataaagatgatcaacaccctgtcctctcagaaatatttgattcacagtttgttaattttcttagtaagctcgaggctgatattagagaaaacataatggatatatttagtcggacaaaaactgcaactgcactccttcctactgaattggagcagaagaacggggaggttgatggagagtatatcaaacgactaaagtcgtttgtagagaaacagtgcaatgagatgcaggacttgctggctcgaaacgcaatgttagcagaagagttagtgagaactggtggtggtaccaccacagatacttcacagagaccgaacaacgggcgagaaagggtccagatcgaagccctgagacaagaactggagggagcgagacgacagatagaggcactcgaaactgacaagtcccagatcgaagccgaagctaacaaccaacgaaaccttgcagtaaaactggagtccgatctcaagagcttgtcagaagcttacaacagcatagagcaggccaactaccgcctggatgccgaggtaaaaaccttgcggcagggaggcagtgtgccgtatcctgacgtggaggcaataaaggcgcaagccaaggaagaggctgagaaggacagtgaggcggagctgaacgatctgcttgtctgcctcggtcaggaacaaactaaggttgagaagctgagcacaaggctggcagagctcggcgaagatgtggatgcccttctgcaaggtattggtgacgacactgccattccggacgatgatgacgacgacgatgaagatagtgaagagtgatatgtttatgtaaccctgtaggtctgttggtgcacacaacctcacgttgggtcatgatattgtaatggcaattggcattgtacagtggataatgtgtagacaaaggcaccgttccaatttaagttatttgtggagaaactagttgaaaactaagtggcggaccgtccggtcccggacggtccacacctcgcgatcagattaactcgaacgattatccttatctcgtgtgtggttatctatctaattatgtgagatttgttagctatcgtctaggaacgagtccaga

SEQ ID NO: 13357 - DNA, 3311 bp, Zea Mays
ctcgtctcttcccctccagtctccaccgagccaagccagcctgctccagcggcagacccgctaccgatctcctctgccgcggcccgcggcggcggcgatttcccctccgcgaatgccccttcaccgctgcagttgatacgccacccaagtggttcgttccacccttccttccctcgccggtctctccatcgccgcagcccgcagggcgccaccttgtcggaaggcgcgatccatggaccgctcgatcaacttccgcggcatcgccgggagcgccggaaacatcatgcagggaatggggaaattcgttttcggcaacgaggggatcgagtcaaaggaagatagctacgtcgagagatatctttatcggataagcaatggcacgatacctgatgaccggaggtctgcaatgactgagctgcagtctctagtggcagaaagccgctcggcacagatgtcgtttggagcgatgggttttcctatcctcctcaatattttgaaagaagaccgtgaggatgtagagcttgtgagaggtgccctggagacctttgtgagtgcattgactcctattgagacgtcacaagggccaaatactgaggttcaaccagcgtcagtgaactctgatctgctatctcaagaaaccgagaatatttctcttcttttgagcttattgtcagaggaagacttttatgtgagatactacacaatccaacttctaacagctctacttacaaactcgctgaaaaggtgcccagttacaagaagcaattctattgattcctcgtggtataacagttctcatggacatgcttatggaccgtgaggtcataaggaatgaagcactgttacttcttacttatttgactcgggatgcagaggaaattcaaaaaattgttgtatttgagggtgtgtttgagaagatatttagcattattagagaggagggctattccgatggaggtgtagttgttcagagcaggattgccttgaactgttaaataatttaattcgacacaatgcgtcaaatcagatgcttttgaaagagacaatgggctttgacccattgatatcaatactaaagattaggagaggcagtgcatttaattttacccaacagaagacagtaaatcttcttggtgctttaaatactgtggaattgcttttgatggggggcccatctggtgaagcaggtaaagacgctaacaagaatgcaaatcaaactgcattggctcagaaaaacattctggaccatcttcttttgttgggcgttgagagtcaatgggcccctgtcgttctccgctgtatggcactgcgatgtattggcaatttggtattaagaaatcctcagaatcttgattctcttgcaagaaaacaagttggagaagagcctcatgttcaacctgcactgaatgccatcttctctataatcttgcggacctctgtagcgcaggaatttgttgctgctgattatgtattcaagtgtttctgcgagagaaatcctaatggccaggcattattagcatcaactattgttccacatccgaaccaaggaaatatgcatgaacctgctatcgacatgccttttggaagtgtacttctgcaagcactggtttcaagtgatgtcaatggagatatggaggcatgttgcagagcatctagcgttctttctcacattgtcaaggacaacatgcaaagcaaggatcgtgtattgcaaattcagcttgagacacttacaccgtccttggggcgcactgagccagtattgcatcgtattgtcacatgtttgtccatcgcagcctcaacagagggagaaaacaaccaaaacaaccaaccagaagaaccgtacattcaacctgttattcttcggctactcatcatatggcttgttgattgttcaaatgctgttaactgcctgttggaatcagcagtgcatctgaactacataatagagcttgcttcaagcaaacgttacactgcttgtgttcgtggactggctgctgttgttctaggtgcttgcatcctgtacaatgctagccatgagaagggccgtgatgcttttgctgttgcagatgctataagtcaaaagattggcctcacaacgtacttcttgaggtttgacgaattgaggagaagcttggcacatcctttgccagagcagcatcatcgcaaggagctttcccgatcaagtgcgaatagcatgtcagatttccaagaaattgaagaggatgaaacaaataaagatgatcaacaccctgtcctctcagaaatatttgattcacagtttgttaattttcttagtaagctcgaggctgatattagagaaaacataatggatatatttagtcggacaaaaactgcaactgcactccttcctactgaattggagcagaagaacggggaggttgatggagagtatatcaaacgactaaagtcgtttgtagagaaacagtgcaatgagatgcaggacttgctggctcgaaacgcaatgttagcagaagagttagtgagaactggtggtggtaccaccacagatacttcacagagaccgaacaacgggcgagaaagggtccagatcgaagccctgagacaagaactggagggagcgagacgacagatagaggcactcgaaactgacaagtcccagatcgaagccgaagctaacaaccaacgaaaccttgcagtaaaactggagtccgatctcaagagcttgtcagaagcttacaacagcatagagcaggccaactaccgcctggatgccgaggtaaaaaccttgcggcagggaggcagtgtgccgtatcctgacgtggaggcaataaaggcgcaagccaaggaagaggctgagaaggacagtgaggcggagctgaacgatctgcttgtctgcctcggtcaggaacaaactaaggttgagaagctgagcacaaggctggcagagctcggcgaagatgtggatgcccttctgcaaggtattggtgacgacactgccattccggacgatgatgacgacgacgatgaagatagtgaagagtgatatgtttatgtaaccctgtaggtctgttggtgcacacaacctcacgttgggtcatgatattgtaatggcaattggcattgtacagtggataatgtgtagacaaaggcaccgttccaatttaagttatttgtggagaaactagttgaaaactaagtggcggaccgtccggtcccggacggtccacacctcgcgatcagattaactcgaacgattatccttatctcgtgtgtggttatctatctaattatgtgagatttgttagctatcgtctaggaacgagtccaga

SEQ ID NO: 13358 - DNA, 2983 bp, Zea Mays
cagcctgctccagcggcagacccgctaccgatctcctctgccgcggcccgcggcggcggcgatttcccctccgcgaatgccccttcaccgctgcagttgatacgccacccaagtggttcgttccacccttccttccctcgccggtctctccatcgccgcagcccgcagggcgccaccttgtcggaaggcgcgatccatggaccgctcgatcaacttccgcggcatcgccgggagcgccggaaacatcatgcagggaatggggaaattcgttttcggcaacgaggggatcgagtcaaaggaagatagctacgtcgagagatatctttatcggataagcaatggcacgatacctgatgaccggaggtctgcaatgactgagctgcagtctctagtggcagaaagccgctcggcacagatgtcgtttggagcgatgggttttcctatcctcctcaatattttgaaagaagaccgtgaggatgtagagcttgtgagaggtgccctggagacctttgtgagtgcattgactcctattgagacgtcacaagggccaaatactgaggttcaaccagcgttacaagaagcaattctattgattcctcgtggtataacagttctcatggacatgcttatggaccgtgaggtcataaggaatgaagcactgttacttcttacttatttgactcgggatgcagaggaaattcaaaaaattgttgtatttgagggtgtgtttgagaagatatttagcattattagagaggagggctattccgatggaggtgtagttgttcaggattgccttgaactgttaaataatttaattcgacacaatgcgtcaaatcagatgcttttgaaagagacaatgggctttgacccattgatatcaatactaaagattaggagaggcagtgcatttaattttacccaacagaaggtaaagacgctaacaagaatgcaaatcaaactgcattggctcaggcactgcgatgtattggcaatttggtattaagaaatcctcagaatcttgattctcttgcaagaaaacaagttggagaagagcctcatgttcaacctgcactgaatgccatcttctctataatcttgcggacctctgtagcgcaggaatttgttgctgctgattatgtattcaagtgtttctgcgagagaaatcctaatggccaggcattattagcatcaactattgttccacatccgaaccaaggaaatatgcatgaacctgctatcgacatgccttttggaagtgtacttctgcaagcactggtttcaagtgatgtcaatggagatatggaggcatgttgcagagcatctagcgttctttctcacattgtcaaggacaacatgcaaagcaaggatcgtgtattgcaaattcagcttgagacacttacaccgtccttggggcgcactgagccagtattgcatcgtattgtcacatgtttgtccatcgcagcctcaacagagggagaaaacaaccaaaacaaccaaccagaagaaccgtacattcaacctgttattcttcggctactcatcatatggcttgttgattgttcaaatgctgttaactgcctgttggaatcagcagtgcatctgaactacataatagagcttgcttcaagcaaacgttacactgcttgtgttcgtggactggctgctgttgttctaggtgcttgcatcctgtacaatgctagccatgagaagggccgtgatgcttttgctgttgcagatgctataagtcaaaagattggcctcacaacgtacttcttgaggtttgacgaattgaggagaagcttggcacatcctttgccagagcagcatcatcgcaaggagctttcccgatcaagtgcgaatagcatgtcagatttccaagaaattgaagaggatgaaacaaataaagatgatcaacaccctgtcctctcagaaatatttgattcacagtttgttaattttcttagtaagctcgaggctgatattagagaaaacataatggatatatttagtcggacaaaaactgcaactgcactccttcctactgaattggagcagaagaacggggaggttgatggagagtatatcaaacgactaaagtcgtttgtagagaaacagtgcaatgagatgcaggacttgctggctcgaaacgcaatgttagcagaagagttagtgagaactggtggtggtaccaccacagatacttcacagagaccgaacaacgggcgagaaagggtccagatcgaagccctgagacaagaactggagggagcgagacgacagatagaggcactcgaaactgacaagtcccagatcgaagccgaagctaacaaccaacgaaaccttgcagtaaaactggagtccgatctcaagagcttgtcagaagcttacaacagcatagagcaggccaactaccgcctggatgccgaggtaaaaaccttgcggcagggaggcagtgtgccgtatcctgacgtggaggcaataaaggcgcaagccaaggaagaggctgagaaggacagtgaggcggagctgaacgatctgcttgtctgcctcggtcaggaacaaactaaggttgagaagctgagcacaaggctggcagagctcggcgaagatgtggatgcccttctgcaaggtattggtgacgacactgccattccggacgatgatgacgacgacgatgaagatagtgaagagtgatatgtttatgtaaccctgtaggtctgttggtgcacacaacctcacgttgggtcatgatattgtaatggcaattggcattgtacagtggataatgtgtagacaaaggcaccgttccaatttaagttatttgtggagaaactagttgaaaactaagtggcggaccgtccggtcccggacggtccacacctcgcgatcagattaactcgaacgattatccttatctcgtgtgtggttatctatctaattatgtgagatttgttagctatcgtctaggaacgagtccaga

SEQ ID NO: 13359 - DNA, 3185 bp, Zea Mays
ccagcggcagacccgctaccgatctcctctgccgcggcccgcggcggcggcgatttcccctccgcgaatgccccttcaccgctgcagttgatacgccacccaagtggttcgttccacccttccttccctcgccggtctctccatcgccgcagcccgcagggcgccaccttgtcggaaggcgcgatccatggaccgctcgatcaacttccgcggcatcgccgggagcgccggaaacatcatgcagggaatggggaaattcgttttcggcaacgaggggatcgagtcaaaggaagatagctacgtcgagagatatctttatcggataagcaatggcacgatacctgatgaccggaggtctgcaatgactgagctgcagtctctagtggcagaaagccgctcggcacagatgtcgtttggagcgatgggttttcctatcctcctcaatattttgaaagaagaccgtgaggatgtagagcttgtgagaggtgccctggagacctttgtgagtgcattgactcctattgagacgtcacaagggccaaatactgaggttcaaccagcgtcagtgaactctgatctgctatctcaagaaaccgagaatatttctcttcttttgagcttattgtcagaggaagacttttatgtgagatactacacaatccaacttctaacagctctacttacaaactcgctgaaaaggtgcccagttacaagaagcaattctattgattcctcgtggtataacagttctcatggacatgcttatggaccgtgaggtcataaggaatgaagcactgttacttcttacttatttgactcgggatgcagaggaaattcaaaaaattgttgtatttgagggtgtgtttgagaagatatttagcattattagagaggagggctattccgatggaggtgtagttgttcaggattgccttgaactgttaaataatttaattcgacacaatgcgtcaaatcagatgcttttgaaagagacaatgggctttgacccattgatatcaatactaaagattaggagaggcagtgcatttaattttacccaacagaagtaaatcttcttggtgctttaaatactgtggaattgcttttgatggggggcccatctggtgaagcaggtaaagacgctaacaagaatgcaaatcaaactgcattggctcaggcactgcgatgtattggcaatttggtattaagaaatcctcagaatcttgattctcttgcaagaaaacaagttggagaagagcctcatgttcaacctgcactgaatgccatcttctctataatcttgcggacctctgtagcgcaggaatttgttgctgctgattatgtattcaagtgtttctgcgagagaaatcctaatggccaggcattattagcatcaactattgttccacatccgaaccaaggaaatatgcatgaacctgctatcgacatgccttttggaagtgtacttctgcaagcactggtttcaagtgatgtcaatggagatatggaggcatgttgcagagcatctagcgttctttctcacattgtcaaggacaacatgcaaagcaaggatcgtgtattgcaaattcagcttgagacacttacaccgtccttggggcgcactgagccagtattgcatcgtattgtcacatgtttgtccatcgcagcctcaacagagggagaaaacaaccaaaacaaccaaccagaagaaccgtacattcaacctgttattcttcggctactcatcatatggcttgttgattgttcaaatgctgttaactgcctgttggaatcagcagtgcatctgaactacataatagagcttgcttcaagcaaacgttacactgcttgtgttcgtggactggctgctgttgttctaggtgcttgcatcctgtacaatgctagccatgagaagggccgtgatgcttttgctgttgcagatgctataagtcaaaagattggcctcacaacgtacttcttgaggtttgacgaattgaggagaagcttggcacatcctttgccagagcagcatcatcgcaaggagctttcccgatcaagtgcgaatagcatgtcagatttccaagaaattgaagaggatgaaacaaataaagatgatcaacaccctgtcctctcagaaatatttgattcacagtttgttaattttcttagtaagctcgaggctgatattagagaaaacataatggatatatttagtcggacaaaaactgcaactgcactccttcctactgaattggagcagaagaacggggaggttgatggagagtatatcaaacgactaaagtcgtttgtagagaaacagtgcaatgagatgcaggacttgctggctcgaaacgcaatgttagcagaagagttagtgagaactggtggtggtaccaccacagatacttcacagagaccgaacaacgggcgagaaagggtccagatcgaagccctgagacaagaactggagggagcgagacgacagatagaggcactcgaaactgacaagtcccagatcgaagccgaagctaacaaccaacgaaaccttgcagtaaaactggagtccgatctcaagagcttgtcagaagcttacaacagcatagagcaggccaactaccgcctggatgccgaggtaaaaaccttgcggcagggaggcagtgtgccgtatcctgacgtggaggcaataaaggcgcaagccaaggaagaggctgagaaggacagtgaggcggagctgaacgatctgcttgtctgcctcggtcaggaacaaactaaggttgagaagctgagcacaaggctggcagagctcggcgaagatgtggatgcccttctgcaaggtattggtgacgacactgccattccggacgatgatgacgacgacgatgaagatagtgaagagtgatatgtttatgtaaccctgtaggtctgttggtgcacacaacctcacgttgggtcatgatattgtaatggcaattggcattgtacagtggataatgtgtagacaaaggcaccgttccaatttaagttatttgtggagaaactagttgaaaactaagtggcggaccgtccggtcccggacggtccacacctcgcgatcagattaactcgaacgattatccttatctcgtgtgtggttatctatctaattatgtgagatttgttagctatcgtctaggaacgagtccaga

SEQ ID NO: 13360 - DNA, 2950 bp, Zea Mays
atacgccacccaagtggttcgttccacccttccttccctcgccggtctctccatcgccgcagcccgcagggcgccaccttgtcggaaggcgcgatccatggaccgctcgatcaacttccgcggcatcgccgggagcgccggaaacatcatgcagggaatggggaaattcgttttcggcaacgaggggatcgagtcaaaggaagatagctacgtcgagagatatctttatcggataagcaatggcacgatacctgatgaccggaggtctgcaatgactgagctgcagtctctagtggcagaaagccgctcggcacagatgtcgtttggagcgatgggttttcctatcctcctcaatattttgaaagaagaccgtgaggatgtagagcttgtgagaggtgccctggagacctttgtgagtgcattgactcctattgagacgtcacaagggccaaatactgaggttcaaccagcgttacaagaagcaattctattgattcctcgtggtataacagttctcatggacatgcttatggaccgtgaggtcataaggaatgaagcactgttacttcttacttatttgactcgggatgcagaggaaattcaaaaaattgttgtatttgagggtgtgtttgagaagatatttagcattattagagaggagggctattccgatggaggtgtagttgttcaggattgccttgaactgttaaataatttaattcgacacaatgcgtcaaatcagatgcttttgaaagagacaatgggctttgacccattgatatcaatactaaagattaggagaggcagtgcatttaattttacccaacagaagtaaatcttcttggtgctttaaatactgtggaattgcttttgatggggggcccatctggtgaagcaggtaaagacgctaacaagaatgcaaatcaaactgcattggctcaggcactgcgatgtattggcaatttggtattaagaaatcctcagaatcttgattctcttgcaagaaaacaagttggagaagagcctcatgttcaacctgcactgaatgccatcttctctataatcttgcggacctctgtagcgcaggaatttgttgctgctgattatgtattcaagtgtttctgcgagagaaatcctaatggccaggcattattagcatcaactattgttccacatccgaaccaaggaaatatgcatgaacctgctatcgacatgccttttggaagtgtacttctgcaagcactggtttcaagtgatgtcaatggagatatggaggcatgttgcagagcatctagcgttctttctcacattgtcaaggacaacatgcaaagcaaggatcgtgtattgcaaattcagcttgagacacttacaccgtccttggggcgcactgagccagtattgcatcgtattgtcacatgtttgtccatcgcagcctcaacagagggagaaaacaaccaaaacaaccaaccagaagaaccgtacattcaacctgttattcttcggctactcatcatatggcttgttgattgttcaaatgctgttaactgcctgttggaatcagcagtgcatctgaactacataatagagcttgcttcaagcaaacgttacactgcttgtgttcgtggactggctgctgttgttctaggtgcttgcatcctgtacaatgctagccatgagaagggccgtgatgcttttgctgttgcagatgctataagtcaaaagattggcctcacaacgtacttcttgaggtttgacgaattgaggagaagcttggcacatcctttgccagagcagcatcatcgcaaggagctttcccgatcaagtgcgaatagcatgtcagatttccaagaaattgaagaggatgaaacaaataaagatgatcaacaccctgtcctctcagaaatatttgattcacagtttgttaattttcttagtaagctcgaggctgatattagagaaaacataatggatatatttagtcggacaaaaactgcaactgcactccttcctactgaattggagcagaagaacggggaggttgatggagagtatatcaaacgactaaagtcgtttgtagagaaacagtgcaatgagatgcaggacttgctggctcgaaacgcaatgttagcagaagagttagtgagaactggtggtggtaccaccacagatacttcacagagaccgaacaacgggcgagaaagggtccagatcgaagccctgagacaagaactggagggagcgagacgacagatagaggcactcgaaactgacaagtcccagatcgaagccgaagctaacaaccaacgaaaccttgcagtaaaactggagtccgatctcaagagcttgtcagaagcttacaacagcatagagcaggccaactaccgcctggatgccgaggtaaaaaccttgcggcagggaggcagtgtgccgtatcctgacgtggaggcaataaaggcgcaagccaaggaagaggctgagaaggacagtgaggcggagctgaacgatctgcttgtctgcctcggtcaggaacaaactaaggttgagaagctgagcacaaggctggcagagctcggcgaagatgtggatgcccttctgcaaggtattggtgacgacactgccattccggacgatgatgacgacgacgatgaagatagtgaagagtgatatgtttatgtaaccctgtaggtctgttggtgcacacaacctcacgttgggtcatgatattgtaatggcaattggcattgtacagtggataatgtgtagacaaaggcaccgttccaatttaagttatttgtggagaaactagttgaaaactaagtggcggaccgtccggtcccggacggtccacacctcgcgatcagattaactcgaacgattatccttatctcgtgtgtggttatctatctaattatgtgagatttgttagctatcgtctaggaacgagtccaga

SEQ ID NO: 13361 - DNA, 3069 bp, Zea Mays
gttccacccttccttccctcgccggtctctccatcgccgcagcccgcagggcgccaccttgtcggaaggcgcgatccatggaccgctcgatcaacttccgcggcatcgccgggagcgccggaaacatcatgcagggaatggggaaattcgttttcggcaacgaggggatcgagtcaaaggaagatagctacgtcgagagatatctttatcggataagcaatggcacgatacctgatgaccggaggtctgcaatgactgagctgcagtctctagtggcagaaagccgctcggcacagatgtcgtttggagcgatgggttttcctatcctcctcaatattttgaaagaagaccgtgaggatgtagagcttgtgagaggtgccctggagacctttgtgagtgcattgactcctattgagacgtcacaagggccaaatactgaggttcaaccagcgtcagtgaactctgatctgctatctcaagaaaccgagaatatttctcttcttttgagcttattgtcagaggaagacttttatgtgagatactacacaatccaacttctaacagctctacttacaaactcgctgaaaaggttacaagaagcaattctattgattcctcgtggtataacagttctcatggacatgcttatggaccgtgaggtcataaggaatgaagcactgttacttcttacttatttgactcgggatgcagaggaaattcaaaaaattgttgtatttgagggtgtgtttgagaagatatttagcattattagagaggagggctattccgatggaggtgtagttgttcaggattgccttgaactgttaaataatttaattcgacacaatgcgtcaaatcagatgcttttgaaagagacaatgggctttgacccattgatatcaatactaaagattaggagaggcagtgcatttaattttacccaacagaaggtaaagacgctaacaagaatgcaaatcaaactgcattggctcagaaaaacattctggaccatcttcttttgttgggcgttgagagtcaatgggcccctgtcgttctccgctgcactgcgatgtattggcaatttggtattaagaaatcctcagaatcttgattctcttgcaagaaaacaagttggagaagagcctcatgttcaacctgcactgaatgccatcttctctataatcttgcggacctctgtagcgcaggaatttgttgctgctgattatgtattcaagtgtttctgcgagagaaatcctaatggccaggcattattagcatcaactattgttccacatccgaaccaaggaaatatgcatgaacctgctatcgacatgccttttggaagtgtacttctgcaagcactggtttcaagtgatgtcaatggagatatggaggcatgttgcagagcatctagcgttctttctcacattgtcaaggacaacatgcaaagcaaggatcgtgtattgcaaattcagcttgagacacttacaccgtccttggggcgcactgagccagtattgcatcgtattgtcacatgtttgtccatcgcagcctcaacagagggagaaaacaaccaaaacaaccaaccagaagaaccgtacattcaacctgttattcttcggctactcatcatatggcttgttgattgttcaaatgctgttaactgcctgttggaatcagcagtgcatctgaactacataatagagcttgcttcaagcaaacgttacactgcttgtgttcgtggactggctgctgttgttctaggtgcttgcatcctgtacaatgctagccatgagaagggccgtgatgcttttgctgttgcagatgctataagtcaaaagattggcctcacaacgtacttcttgaggtttgacgaattgaggagaagcttggcacatcctttgccagagcagcatcatcgcaaggagctttcccgatcaagtgcgaatagcatgtcagatttccaagaaattgaagaggatgaaacaaataaagatgatcaacaccctgtcctctcagaaatatttgattcacagtttgttaattttcttagtaagctcgaggctgatattagagaaaacataatggatatatttagtcggacaaaaactgcaactgcactccttcctactgaattggagcagaagaacggggaggttgatggagagtatatcaaacgactaaagtcgtttgtagagaaacagtgcaatgagatgcaggacttgctggctcgaaacgcaatgttagcagaagagttagtgagaactggtggtggtaccaccacagatacttcacagagaccgaacaacgggcgagaaagggtccagatcgaagccctgagacaagaactggagggagcgagacgacagatagaggcactcgaaactgacaagtcccagatcgaagccgaagctaacaaccaacgaaaccttgcagtaaaactggagtccgatctcaagagcttgtcagaagcttacaacagcatagagcaggccaactaccgcctggatgccgaggtaaaaaccttgcggcagggaggcagtgtgccgtatcctgacgtggaggcaataaaggcgcaagccaaggaagaggctgagaaggacagtgaggcggagctgaacgatctgcttgtctgcctcggtcaggaacaaactaaggttgagaagctgagcacaaggctggcagagctcggcgaagatgtggatgcccttctgcaaggtattggtgacgacactgccattccggacgatgatgacgacgacgatgaagatagtgaagagtgatatgtttatgtaaccctgtaggtctgttggtgcacacaacctcacgttgggtcatgatattgtaatggcaattggcattgtacagtggataatgtgtagacaaaggcaccgttccaatttaagttatttgtggagaaactagttgaaaactaagtggcggaccgtccggtcccggacggtccacacctcgcgatcagattaactcgaacgattatccttatctcgtgtgtggttatctatctaattatgtgagatttgttagctatcgtctaggaacgagtccaga

SEQ ID NO: 13362 - DNA, 2947 bp, Zea Mays
cttccttccctcgccggtctctccatcgccgcagcccgcagggcgccaccttgtcggaaggcgcgatccatggaccgctcgatcaacttccgcggcatcgccgggagcgccggaaacatcatgcagggaatggggaaattcgttttcggcaacgaggggatcgagtcaaaggaagatagctacgtcgagagatatctttatcggataagcaatggcacgatacctgatgaccggaggtctgcaatgactgagctgcagtctctagtggcagaaagccgctcggcacagatgtcgtttggagcgatgggttttcctatcctcctcaatattttgaaagaagaccgtgaggatgtagagcttgtgagaggtgccctggagacctttgtgagtgcattgactcctattgagacgtcacaagggccaaatactgaggttcaaccagcgttacaagaagcaattctattgattcctcgtggtataacagttctcatggacatgcttatggaccgtgaggtcataaggaatgaagcactgttacttcttacttatttgactcgggatgcagaggaaattcaaaaaattgttgtatttgagggtgtgtttgagaagatatttagcattattagagaggagggctattccgatggaggtgtagttgttcagatgcttttgaaagagacaatgggctttgacccattgatatcaatactaaagattaggagaggcagtgcatttaattttacccaacagaagacagtaaatcttcttggtgctttaaatactgtggaattgcttttgatggggggcccatctggtgaagcaggtaaagacgctaacaagaatgcaaatcaaactgcattggctcagaaaaacattctggaccatcttcttttgttgggcgttgagagtcaatgggcccctgtcgttctccgctgtatggcactgcgatgtattggcaatttggtattaagaaatcctcagaatcttgattctcttgcaagaaaacaagttggagaagagcctcatgttcaacctgcactgaatgccatcttctctataatcttgcggacctctgtagcgcaggaatttgttgctgctgattatgtattcaagtgtttctgcgagagaaatcctaatggccaggcattattagcatcaactattgttccacatccgaaccaaggaaatatgcatgaacctgctatcgacatgccttttggaagtgtacttctgcaagcactggtttcaagtgatgtcaatggagatatggaggcatgttgcagagcatctagcgttctttctcacattgtcaaggacaacatgcaaagcaaggatcgtgtattgcaaattcagcttgagacacttacaccgtccttggggcgcactgagccagtattgcatcgtattgtcacatgtttgtccatcgcagcctcaacagagggagaaaacaaccaaaacaaccaaccagaagaaccgtacattcaacctgttattcttcggctactcatcatatggcttgttgattgttcaaatgctgttaactgcctgttggaatcagcagtgcatctgaactacataatagagcttgcttcaagcaaacgttacactgcttgtgttcgtggactggctgctgttgttctaggtgcttgcatcctgtacaatgctagccatgagaagggccgtgatgcttttgctgttgcagatgctataagtcaaaagattggcctcacaacgtacttcttgaggtttgacgaattgaggagaagcttggcacatcctttgccagagcagcatcatcgcaaggagctttcccgatcaagtgcgaatagcatgtcagatttccaagaaattgaagaggatgaaacaaataaagatgatcaacaccctgtcctctcagaaatatttgattcacagtttgttaattttcttagtaagctcgaggctgatattagagaaaacataatggatatatttagtcggacaaaaactgcaactgcactccttcctactgaattggagcagaagaacggggaggttgatggagagtatatcaaacgactaaagtcgtttgtagagaaacagtgcaatgagatgcaggacttgctggctcgaaacgcaatgttagcagaagagttagtgagaactggtggtggtaccaccacagatacttcacagagaccgaacaacgggcgagaaagggtccagatcgaagccctgagacaagaactggagggagcgagacgacagatagaggcactcgaaactgacaagtcccagatcgaagccgaagctaacaaccaacgaaaccttgcagtaaaactggagtccgatctcaagagcttgtcagaagcttacaacagcatagagcaggccaactaccgcctggatgccgaggtaaaaaccttgcggcagggaggcagtgtgccgtatcctgacgtggaggcaataaaggcgcaagccaaggaagaggctgagaaggacagtgaggcggagctgaacgatctgcttgtctgcctcggtcaggaacaaactaaggttgagaagctgagcacaaggctggcagagctcggcgaagatgtggatgcccttctgcaaggtattggtgacgacactgccattccggacgatgatgacgacgacgatgaagatagtgaagagtgatatgtttatgtaaccctgtaggtctgttggtgcacacaacctcacgttgggtcatgatattgtaatggcaattggcattgtacagtggataatgtgtagacaaaggcaccgttccaatttaagttatttgtggagaaactagttgaaaactaagtggcggaccgtccggtcccggacggtccacacctcgcgatcagattaactcgaacgattatccttatctcgtgtgtggttatctatctaattatgtgagatttgttagctatcgtctaggaacgagtccaga

SEQ ID NO: 13363 - DNA, 3055 bp, Zea Mays
catcgccgcagcccgcagggcgccaccttgtcggaaggcgcgatccatggaccgctcgatcaacttccgcggcatcgccgggagcgccggaaacatcatgcagggaatggggaaattcgttttcggcaacgaggggatcgagtcaaaggaagatagctacgtcgagagatatctttatcggataagcaatggcacgatacctgatgaccggaggtctgcaatgactgagctgcagtctctagtggcagaaagccgctcggcacagatgtcgtttggagcgatgggttttcctatcctcctcaatattttgaaagaagaccgtgaggatgtagagcttgtgagaggtgccctggagacctttgtgagtgcattgactcctattgagacgtcacaagggccaaatactgaggttcaaccagcgtcagtgaactctgatctgctatctcaagaaaccgagaatatttctcttcttttgagcttattgtcagaggaagacttttatgtgagatactacacaatccaacttctaacagctctacttacaaactcgctgaaaaggtgcccagttacaagaagcaattctattgattcctcgtggtataacagttctcatggacatgcttatggaccgtgaggtcataaggaatgaagcactgttacttcttacttatttgactcgggatgcagaggaaattcaaaaaattgttgtatttgagggtgtgtttgagaagatatttagcattattagagaggagggctattccgatggaggtgtagttgttcagagcaggattgccttgaactgttaaataatttaattcgacacaatgcgtcaaatcagatgcttttgaaagagacaatgggctttgacccattgatatcaatactaaagattaggagaggcagtgcatttaattttacccaacagaaggtaaagacgctaacaagaatgcaaatcaaactgcattggctcagaaaaacattctggaccatcttcttttgttgggcgttgagagtcaatgggcccctgtcgttctccgctgtatggcactgcgatgtattggcaatttggtattaagaaatcctcagaatcttgattctcttgcaagaaaacaagttggagaagagcctcatgttcaacctgcactgaatgccatcttctctataatcttgcggacctctgtagcgcaggaatttgttgctgctgattatgtattcaagtgtttctgcgagagaaatcctaatggccaggcattattagcatcaactattgttccacatccgaaccaaggaaatatgcatgaacctgctatcgacatgccttttggaagtgtacttctgcaagcactggtttcaagtgatgtcaatggagatatggaggcatgttgcagagcatctagcgttctttctcacattgtcaaggacaacatgcaaagcaaggatcgtgtattgcaaattcagcttgagacacttacaccgtccttggggcgcactgagccagtattgcatcgtattgtcacatgtttgtccatcgcagcctcaacagagggagaaaacaaccaaaacaaccaaccagaagaaccgtacattcaacctgttattcttcggctactcatcatatggcttgttgattgttcaaatgctgttaactgcctgttggaatcagcagtgcatctgaactacataatagagcttgcttcaagcaaacgttacactgcttgtgttcgtggactggctgctgttgttctaggtgcttgcatcctgtacaatgctagccatgagaagggccgtgatgcttttgctgttgcagatgctataagtcaaaagattggcctcacaacgtacttcttgaggtttgacgaattgaggagaagcttggcacatcctttgccagagcagcatcatcgcaaggagctttcccgatcaagtgcgaatagcatgtcagatttccaagaaattgaagaggatgaaacaaataaagatgatcaacaccctgtcctctcagaaatatttgattcacagtttgttaattttcttagtaagctcgaggctgatattagagaaaacataatggatatatttagtcggacaaaaactgcaactgcactccttcctactgaattggagcagaagaacggggaggttgatggagagtatatcaaacgactaaagtcgtttgtagagaaacagtgcaatgagatgcaggacttgctggctcgaaacgcaatgttagcagaagagttagtgagaactggtggtggtaccaccacagatacttcacagagaccgaacaacgggcgagaaagggtccagatcgaagccctgagacaagaactggagggagcgagacgacagatagaggcactcgaaactgacaagtcccagatcgaagccgaagctaacaaccaacgaaaccttgcagtaaaactggagtccgatctcaagagcttgtcagaagcttacaacagcatagagcaggccaactaccgcctggatgccgaggtaaaaaccttgcggcagggaggcagtgtgccgtatcctgacgtggaggcaataaaggcgcaagccaaggaagaggctgagaaggacagtgaggcggagctgaacgatctgcttgtctgcctcggtcaggaacaaactaaggttgagaagctgagcacaaggctggcagagctcggcgaagatgtggatgcccttctgcaaggtattggtgacgacactgccattccggacgatgatgacgacgacgatgaagatagtgaagagtgatatgtttatgtaaccctgtaggtctgttggtgcacacaacctcacgttgggtcatgatattgtaatggcaattggcattgtacagtggataatgtgtagacaaaggcaccgttccaatttaagttatttgtggagaaactagttgaaaactaagtggcggaccgtccggtcccggacggtccacacctcgcgatcagattaactcgaacgattatccttatctcgtgtgtggttatctatctaattatgtgagatttgttagctatcgtctaggaacgagtccaga

SEQ ID NO: 13364 - DNA, 2483 bp, Zea Mays
ccagttacaagaagcaattctattgattcctcgtggtataacagttctcatggacatgcttatggaccgtgaggtcataaggaatgaagcactgttacttcttacttatttgactcgggatgcagaggaaattcaaaaaattgttgtatttgagggtgtgtttgagaagatatttagcattattagagaggagggctattccgatggaggtgtagttgttcaggattgccttgaactgttaaataatttaattcgacacaatgcgtcaaatcagatgcttttgaaagagacaatgggctttgacccattgatatcaatactaaagattaggagaggcagtgcatttaattttacccaacagaaggtaaagacgctaacaagaatgcaaatcaaactgcattggctcagaaaaacattctggaccatcttcttttgttgggcgttgagagtcaatgggcccctgtcgttctccgctgcactgcgatgtattggcaatttggtattaagaaatcctcagaatcttgattctcttgcaagaaaacaagttggagaagagcctcatgttcaacctgcactgaatgccatcttctctataatcttgcggacctctgtagcgcaggaatttgttgctgctgattatgtattcaagtgtttctgcgagagaaatcctaatggccaggcattattagcatcaactattgttccacatccgaaccaaggaaatatgcatgaacctgctatcgacatgccttttggaagtgtacttctgcaagcactggtttcaagtgatgtcaatggagatatggaggcatgttgcagagcatctagcgttctttctcacattgtcaaggacaacatgcaaagcaaggatcgtgtattgcaaattcagcttgagacacttacaccgtccttggggcgcactgagccagtattgcatcgtattgtcacatgtttgtccatcgcagcctcaacagagggagaaaacaaccaaaacaaccaaccagaagaaccgtacattcaacctgttattcttcggctactcatcatatggcttgttgattgttcaaatgctgttaactgcctgttggaatcagcagtgcatctgaactacataatagagcttgcttcaagcaaacgttacactgcttgtgttcgtggactggctgctgttgttctaggtgcttgcatcctgtacaatgctagccatgagaagggccgtgatgcttttgctgttgcagatgctataagtcaaaagattggcctcacaacgtacttcttgaggtttgacgaattgaggagaagcttggcacatcctttgccagagcagcatcatcgcaaggagctttcccgatcaagtgcgaatagcatgtcagatttccaagaaattgaagaggatgaaacaaataaagatgatcaacaccctgtcctctcagaaatatttgattcacagtttgttaattttcttagtaagctcgaggctgatattagagaaaacataatggatatatttagtcggacaaaaactgcaactgcactccttcctactgaattggagcagaagaacggggaggttgatggagagtatatcaaacgactaaagtcgtttgtagagaaacagtgcaatgagatgcaggacttgctggctcgaaacgcaatgttagcagaagagttagtgagaactggtggtggtaccaccacagatacttcacagagaccgaacaacgggcgagaaagggtccagatcgaagccctgagacaagaactggagggagcgagacgacagatagaggcactcgaaactgacaagtcccagatcgaagccgaagctaacaaccaacgaaaccttgcagtaaaactggagtccgatctcaagagcttgtcagaagcttacaacagcatagagcaggccaactaccgcctggatgccgaggtaaaaaccttgcggcagggaggcagtgtgccgtatcctgacgtggaggcaataaaggcgcaagccaaggaagaggctgagaaggacagtgaggcggagctgaacgatctgcttgtctgcctcggtcaggaacaaactaaggttgagaagctgagcacaaggctggcagagctcggcgaagatgtggatgcccttctgcaaggtattggtgacgacactgccattccggacgatgatgacgacgacgatgaagatagtgaagagtgatatgtttatgtaaccctgtaggtctgttggtgcacacaacctcacgttgggtcatgatattgtaatggcaattggcattgtacagtggataatgtgtagacaaaggcaccgttccaatttaagttatttgtggagaaactagttgaaaactaagtggcggaccgtccggtcccggacggtccacacctcgcgatcagattaactcgaacgattatccttatctcgtgtgtggttatctatctaattatgtgagatttgttagctatcgtctaggaacgagtccaga

SEQ ID NO: 13365 - DNA, 2441 bp, Zea Mays
gttcagcattctttgcctattctctctcttttaggaagaacacatgtcactcatgacattctaatcattttatgctggtcataaggaatgaagcactgttacttcttacttatttgactcgggatgcagaggaaattcaaaaaattgttgtatttgagggtgtgtttgagaagatatttagcattattagagaggagggctattccgatggaggtgtagttgttcagatgcttttgaaagagacaatgggctttgacccattgatatcaatactaaagattaggagaggcagtgcatttaattttacccaacagaaggtaaagacgctaacaagaatgcaaatcaaactgcattggctcagaaaaacattctggaccatcttcttttgttgggcgttgagagtcaatgggcccctgtcgttctccgctgtatggcactgcgatgtattggcaatttggtattaagaaatcctcagaatcttgattctcttgcaagaaaacaagttggagaagagcctcatgttcaacctgcactgaatgccatcttctctataatcttgcggacctctgtagcgcaggaatttgttgctgctgattatgtattcaagtgtttctgcgagagaaatcctaatggccaggcattattagcatcaactattgttccacatccgaaccaaggaaatatgcatgaacctgctatcgacatgccttttggaagtgtacttctgcaagcactggtttcaagtgatgtcaatggagatatggaggcatgttgcagagcatctagcgttctttctcacattgtcaaggacaacatgcaaagcaaggatcgtgtattgcaaattcagcttgagacacttacaccgtccttggggcgcactgagccagtattgcatcgtattgtcacatgtttgtccatcgcagcctcaacagagggagaaaacaaccaaaacaaccaaccagaagaaccgtacattcaacctgttattcttcggctactcatcatatggcttgttgattgttcaaatgctgttaactgcctgttggaatcagcagtgcatctgaactacataatagagcttgcttcaagcaaacgttacactgcttgtgttcgtggactggctgctgttgttctaggtgcttgcatcctgtacaatgctagccatgagaagggccgtgatgcttttgctgttgcagatgctataagtcaaaagattggcctcacaacgtacttcttgaggtttgacgaattgaggagaagcttggcacatcctttgccagagcagcatcatcgcaaggagctttcccgatcaagtgcgaatagcatgtcagatttccaagaaattgaagaggatgaaacaaataaagatgatcaacaccctgtcctctcagaaatatttgattcacagtttgttaattttcttagtaagctcgaggctgatattagagaaaacataatggatatatttagtcggacaaaaactgcaactgcactccttcctactgaattggagcagaagaacggggaggttgatggagagtatatcaaacgactaaagtcgtttgtagagaaacagtgcaatgagatgcaggacttgctggctcgaaacgcaatgttagcagaagagttagtgagaactggtggtggtaccaccacagatacttcacagagaccgaacaacgggcgagaaagggtccagatcgaagccctgagacaagaactggagggagcgagacgacagatagaggcactcgaaactgacaagtcccagatcgaagccgaagctaacaaccaacgaaaccttgcagtaaaactggagtccgatctcaagagcttgtcagaagcttacaacagcatagagcaggccaactaccgcctggatgccgaggtaaaaaccttgcggcagggaggcagtgtgccgtatcctgacgtggaggcaataaaggcgcaagccaaggaagaggctgagaaggacagtgaggcggagctgaacgatctgcttgtctgcctcggtcaggaacaaactaaggttgagaagctgagcacaaggctggcagagctcggcgaagatgtggatgcccttctgcaaggtattggtgacgacactgccattccggacgatgatgacgacgacgatgaagatagtgaagagtgatatgtttatgtaaccctgtaggtctgttggtgcacacaacctcacgttgggtcatgatattgtaatggcaattggcattgtacagtggataatgtgtagacaaaggcaccgttccaatttaagttatttgtggagaaactagttgaaaactaagtggcggaccgtccggtcccggacggtccacacctcgcgatcagattaactcgaacgattatccttatctcgtgtgtggttatctatctaattatgtgagatttgttagctatcgtctaggaacgagtccaga

SEQ ID NO: 13366 - DNA, 2456 bp, Zea Mays
agaacacatgtcactcatgacattctaatcattttatgctggtcataaggaatgaagcactgttacttcttacttatttgactcgggatgcagaggaaattcaaaaaattgttgtatttgagggtgtgtttgagaagatatttagcattattagagaggagggctattccgatggaggtgtagttgttcaggattgccttgaactgttaaataatttaattcgacacaatgcgtcaaatcagatgcttttgaaagagacaatgggctttgacccattgatatcaatactaaagattaggagaggcagtgcatttaattttacccaacagaaggtaaagacgctaacaagaatgcaaatcaaactgcattggctcagaaaaacattctggaccatcttcttttgttgggcgttgagagtcaatgggcccctgtcgttctccgctgtatggcactgcgatgtattggcaatttggtattaagaaatcctcagaatcttgattctcttgcaagaaaacaagttggagaagagcctcatgttcaacctgcactgaatgccatcttctctataatcttgcggacctctgtagcgcaggaatttgttgctgctgattatgtattcaagtgtttctgcgagagaaatcctaatggccaggcattattagcatcaactattgttccacatccgaaccaaggaaatatgcatgaacctgctatcgacatgccttttggaagtgtacttctgcaagcactggtttcaagtgatgtcaatggagatatggaggcatgttgcagagcatctagcgttctttctcacattgtcaaggacaacatgcaaagcaaggatcgtgtattgcaaattcagcttgagacacttacaccgtccttggggcgcactgagccagtattgcatcgtattgtcacatgtttgtccatcgcagcctcaacagagggagaaaacaaccaaaacaaccaaccagaagaaccgtacattcaacctgttattcttcggctactcatcatatggcttgttgattgttcaaatgctgttaactgcctgttggaatcagcagtgcatctgaactacataatagagcttgcttcaagcaaacgttacactgcttgtgttcgtggactggctgctgttgttctaggtgcttgcatcctgtacaatgctagccatgagaagggccgtgatgcttttgctgttgcagatgctataagtcaaaagattggcctcacaacgtacttcttgaggtttgacgaattgaggagaagcttggcacatcctttgccagagcagcatcatcgcaaggagctttcccgatcaagtgcgaatagcatgtcagatttccaagaaattgaagaggatgaaacaaataaagatgatcaacaccctgtcctctcagaaatatttgattcacagtttgttaattttcttagtaagctcgaggctgatattagagaaaacataatggatatatttagtcggacaaaaactgcaactgcactccttcctactgaattggagcagaagaacggggaggttgatggagagtatatcaaacgactaaagtcgtttgtagagaaacagtgcaatgagatgcaggacttgctggctcgaaacgcaatgttagcagaagagttagtgagaactggtggtggtaccaccacagatacttcacagagaccgaacaacgggcgagaaagggtccagatcgaagccctgagacaagaactggagggagcgagacgacagatagaggcactcgaaactgacaagtcccagatcgaagccgaagctaacaaccaacgaaaccttgcagtaaaactggagtccgatctcaagagcttgtcagaagcttacaacagcatagagcaggccaactaccgcctggatgccgaggtaaaaaccttgcggcagggaggcagtgtgccgtatcctgacgtggaggcaataaaggcgcaagccaaggaagaggctgagaaggacagtgaggcggagctgaacgatctgcttgtctgcctcggtcaggaacaaactaaggttgagaagctgagcacaaggctggcagagctcggcgaagatgtggatgcccttctgcaaggtattggtgacgacactgccattccggacgatgatgacgacgacgatgaagatagtgaagagtgatatgtttatgtaaccctgtaggtctgttggtgcacacaacctcacgttgggtcatgatattgtaatggcaattggcattgtacagtggataatgtgtagacaaaggcaccgttccaatttaagttatttgtggagaaactagttgaaaactaagtggcggaccgtccggtcccggacggtccacacctcgcgatcagattaactcgaacgattatccttatctcgtgtgtggttatctatctaattatgtgagatttgttagctatcgtctaggaacgagtccaga

SEQ ID NO: 13367 - DNA, 2546 bp, Zea Mays
tgaacacctaattctaccagactattatagttttttcaaagatgcagccctcttgtaaatggtcataaggaatgaagcactgttacttcttacttatttgactcgggatgcagaggaaattcaaaaaattgttgtatttgagggtgtgtttgagaagatatttagcattattagagaggagggctattccgatggaggtgtagttgttcaggattgccttgaactgttaaataatttaattcgacacaatgcgtcaaatcagatgcttttgaaagagacaatgggctttgacccattgatatcaatactaaagattaggagaggcagtgcatttaattttacccaacagaagacagtaaatcttcttggtgctttaaatactgtggaattgcttttgatggggggcccatctggtgaagcaggtaaagacgctaacaagaatgcaaatcaaactgcattggctcagaaaaacattctggaccatcttcttttgttgggcgttgagagtcaatgggcccctgtcgttctccgctgtatggcactgcgatgtattggcaatttggtattaagaaatcctcagaatcttgattctcttgcaagaaaacaagttggagaagagcctcatgttcaacctgcactgaatgccatcttctctataatcttgcggacctctgtagcgcaggaatttgttgctgctgattatgtattcaagtgtttctgcgagagaaatcctaatggccaggcattattagcatcaactattgttccacatccgaaccaaggaaatatgcatgaacctgctatcgacatgccttttggaagtgtacttctgcaagcactggtttcaagtgatgtcaatggagatatggaggcatgttgcagagcatctagcgttctttctcacattgtcaaggacaacatgcaaagcaaggatcgtgtattgcaaattcagcttgagacacttacaccgtccttggggcgcactgagccagtattgcatcgtattgtcacatgtttgtccatcgcagcctcaacagagggagaaaacaaccaaaacaaccaaccagaagaaccgtacattcaacctgttattcttcggctactcatcatatggcttgttgattgttcaaatgctgttaactgcctgttggaatcagcagtgcatctgaactacataatagagcttgcttcaagcaaacgttacactgcttgtgttcgtggactggctgctgttgttctaggtgcttgcatcctgtacaatgctagccatgagaagggccgtgatgcttttgctgttgcagatgctataagtcaaaagattggcctcacaacgtacttcttgaggtttgacgaattgaggagaagcttggcacatcctttgccagagcagcatcatcgcaaggagctttcccgatcaagtgcgaatagcatgtcagatttccaagaaattgaagaggatgaaacaaataaagatgatcaacaccctgtcctctcagaaatatttgattcacagtttgttaattttcttagtaagctcgaggctgatattagagaaaacataatggatatatttagtcggacaaaaactgcaactgcactccttcctactgaattggagcagaagaacggggaggttgatggagagtatatcaaacgactaaagtcgtttgtagagaaacagtgcaatgagatgcaggacttgctggctcgaaacgcaatgttagcagaagagttagtgagaactggtggtggtaccaccacagatacttcacagagaccgaacaacgggcgagaaagggtccagatcgaagccctgagacaagaactggagggagcgagacgacagatagaggcactcgaaactgacaagtcccagatcgaagccgaagctaacaaccaacgaaaccttgcagtaaaactggagtccgatctcaagagcttgtcagaagcttacaacagcatagagcaggccaactaccgcctggatgccgaggtaaaaaccttgcggcagggaggcagtgtgccgtatcctgacgtggaggcaataaaggcgcaagccaaggaagaggctgagaaggacagtgaggcggagctgaacgatctgcttgtctgcctcggtcaggaacaaactaaggttgagaagctgagcacaaggctggcagagctcggcgaagatgtggatgcccttctgcaaggtattggtgacgacactgccattccggacgatgatgacgacgacgatgaagatagtgaagagtgatatgtttatgtaaccctgtaggtctgttggtgcacacaacctcacgttgggtcatgatattgtaatggcaattggcattgtacagtggataatgtgtagacaaaggcaccgttccaatttaagttatttgtggagaaactagttgaaaactaagtggcggaccgtccggtcccggacggtccacacctcgcgatcagattaactcgaacgattatccttatctcgtgtgtggttatctatctaattatgtgagatttgttagctatcgtctaggaacgagtccaga

SEQ ID NO: 13368 - DNA, 2570 bp, Zea Mays
cctaattctaccagactattatagttttttcaaagatgcagccctcttgtaaatggtcataaggaatgaagcactgttacttcttacttatttgactcgggatgcagaggttaaacctgtctaatattagatgttgatttgttatgttactggaattttttcaacaccccattttataattaaattagctttaattctcttcatttcaggaaattcaaaaaattgttgtatttgagggtgtgtttgagaagatatttagcattattagagaggagggctattccgatggaggtgtagttgttcaggattgccttgaactgttaaataatttaattcgacacaatgcgtcaaatcagatgcttttgaaagagacaatgggctttgacccattgatatcaatactaaagattaggagaggcagtgcatttaattttacccaacagaaggtaaagacgctaacaagaatgcaaatcaaactgcattggctcagaaaaacattctggaccatcttcttttgttgggcgttgagagtcaatgggcccctgtcgttctccgctgtatggcactgcgatgtattggcaatttggtattaagaaatcctcagaatcttgattctcttgcaagaaaacaagttggagaagagcctcatgttcaacctgcactgaatgccatcttctctataatcttgcggacctctgtagcgcaggaatttgttgctgctgattatgtattcaagtgtttctgcgagagaaatcctaatggccaggcattattagcatcaactattgttccacatccgaaccaaggaaatatgcatgaacctgctatcgacatgccttttggaagtgtacttctgcaagcactggtttcaagtgatgtcaatggagatatggaggcatgttgcagagcatctagcgttctttctcacattgtcaaggacaacatgcaaagcaaggatcgtgtattgcaaattcagcttgagacacttacaccgtccttggggcgcactgagccagtattgcatcgtattgtcacatgtttgtccatcgcagcctcaacagagggagaaaacaaccaaaacaaccaaccagaagaaccgtacattcaacctgttattcttcggctactcatcatatggcttgttgattgttcaaatgctgttaactgcctgttggaatcagcagtgcatctgaactacataatagagcttgcttcaagcaaacgttacactgcttgtgttcgtggactggctgctgttgttctaggtgcttgcatcctgtacaatgctagccatgagaagggccgtgatgcttttgctgttgcagatgctataagtcaaaagattggcctcacaacgtacttcttgaggtttgacgaattgaggagaagcttggcacatcctttgccagagcagcatcatcgcaaggagctttcccgatcaagtgcgaatagcatgtcagatttccaagaaattgaagaggatgaaacaaataaagatgatcaacaccctgtcctctcagaaatatttgattcacagtttgttaattttcttagtaagctcgaggctgatattagagaaaacataatggatatatttagtcggacaaaaactgcaactgcactccttcctactgaattggagcagaagaacggggaggttgatggagagtatatcaaacgactaaagtcgtttgtagagaaacagtgcaatgagatgcaggacttgctggctcgaaacgcaatgttagcagaagagttagtgagaactggtggtggtaccaccacagatacttcacagagaccgaacaacgggcgagaaagggtccagatcgaagccctgagacaagaactggagggagcgagacgacagatagaggcactcgaaactgacaagtcccagatcgaagccgaagctaacaaccaacgaaaccttgcagtaaaactggagtccgatctcaagagcttgtcagaagcttacaacagcatagagcaggccaactaccgcctggatgccgaggtaaaaaccttgcggcagggaggcagtgtgccgtatcctgacgtggaggcaataaaggcgcaagccaaggaagaggctgagaaggacagtgaggcggagctgaacgatctgcttgtctgcctcggtcaggaacaaactaaggttgagaagctgagcacaaggctggcagagctcggcgaagatgtggatgcccttctgcaaggtattggtgacgacactgccattccggacgatgatgacgacgacgatgaagatagtgaagagtgatatgtttatgtaaccctgtaggtctgttggtgcacacaacctcacgttgggtcatgatattgtaatggcaattggcattgtacagtggataatgtgtagacaaaggcaccgttccaatttaagttatttgtggagaaactagttgaaaactaagtggcggaccgtccggtcccggacggtccacacctcgcgatcagattaactcgaacgattatccttatctcgtgtgtggttatctatctaattatgtgagatttgttagctatcgtctaggaacgagtccaga

SEQ ID NO: 13369 - DNA, 729 bp, Zea Mays
atggtgtttaaagagaagcaaaaggagttctacaagaatgctaaattaattagcaagtacaaaaagacaaagaagcaacaaagtcagtcaaacaaccatccagaaattccagtccatgaggatggtggtgacactgtccgatatgtggcaaaaccgcatcacaaagggaagaagcaccctgtgcatagtttgaaggaagagtatgagaaaaaacgtgctgaggaggagaaggctaaggaagagcgtgatgcaatggttcaggcaaagagggagcatcgggagaagtctgaggcgaagcggaaagaactgagggagaagatgttcaagaagacaagatctggccaacctgtgatgagataccggatcgagcatctcttggagactgcactgagcaagaaagtacaattccagctaccatcttcataatgttagttgtggtcggaggctccctgtccgtgacccgacgaaggttccaatggtggcttgccgcgcatcgatggaggaggcactagcaacatggccacgcccagcagatggtggcttccgtggccaaatcggatcgaataacttggtattagggggagggagggagaggatcgatttgtacactgaattcgatgggatgggattgtactctcaaataacatccatttccatcgatccaactttacccctatcaataaaccttcaattagcacagtgccctctaggctacatgttcaatatgac

SEQ ID NO: 13370 - DNA, 743 bp, Zea Mays
atggtgtttaaagagaagcaaaaggagttctacaagaatgctaaattaattagcaagtacaaaaagacaaagaagcaacaaagtcagtcaaacaaccatccagaaattccagtccatgaggatggtggtgacactgtccgatatgtggcaaaaccgcatcacaaagggaagaagcaccctgtgcatagtttgaaggaagagtatgagaaaaaacgtgctgaggaggagaaggctaaggaagagcgtgatgcaatggttcaggcaaagagggagcatcgggagaagtctgaggcgaagcggaaagaactgagggagaagatgttcaagaagacaagatctggccaacctgtgatgagataccggatcgagcatctcttggagactgcactgagcaagaaagtacaattccagctaccatcttcataatgttagttgtgtggacggaggacaggtcggaggctccctgtccgtgacccgacgaaggttccaatggtggcttgccgcgcatcgatggaggaggcactagcaacatggccacgcccagcagatggtggcttccgtggccaaatcggatcgaataacttggtattagggggagggagggagaggatcgatttgtacactgaattcgatgggatgggattgtactctcaaataacatccatttccatcgatccaactttacccctatcaataaaccttcaattagcacagtgccctctaggctacatgttcaatatgac

SEQ ID NO: 13371 - DNA, 3796 bp, Zea Mays
ggtagtacacccgagggtcgtacccgaggagcgataggtgcgccgtatcgctgccgcaggcgagccccggctccacggggtccatgagcccggtcaccccgaccgccgccaccgcgtccagccgcggcgtgcacgccgcctccagtggcgtacgcccgcccagcgacggaacgctcacgtccccgatcccgtccaccagcacgaacgccacgcggctccgcctcggacctctcccctccgcgcctgccatcgccgtctccgcagccgccgcaaaggcccctcgcctctctcaatttcagctctctgctgctgcttacgagatgcctctgccgcgtgctggttcagccgcgggtcgggcccgggcacagggttcacgggccggtttggtcactacaagaaccgggcgagcccgaggcccggcccccaaatctgcaacgcttggcgctcgctcggctccgccctccgcccccctgctccgtccgatcgccgcgccccctcgccgccggtgatcgctggggagccgacgaggccggacgccggaggttctcgctccctcctctgtgtctcccttcctcccgcgcgtcccgcctgctcgtcgcgtggcctcctgctcggggcttcctctcgccgcggaatttggcatgtgacgtggggcgaggccaacgaggcgcagccggcggcggcgtggggttgattggttaactggatttcgagattgttttgtctggatttttttccgagggaagcgcgcgctccaggtgactgcattgtaggttcatttccaaaatggtttgcatggtggggaattttaaaatgtcttctgtgttgaagcttgtaatgatggaaaatcacgcaacaccaggtaaagtatagttaagattttaacctcttttgactttccatttagcctgtgactttcatggataatactttaatagaggctttgagacctgtgtccagagtaaataaagagaaaattatattgcacagttgtcagttaggatggaaatttgatatccatcaataaaattgataaattatagaatggtgcaccttatcttttattttactagaacacagtgcaacttctatatattcttatttgtaacttggatatgttgcaaaaataataaatattactagatccttgcaaagagaaggagaaataataaaatctagaaaagaataatacaatacaagggagctttgaaatgaaatattatttatatacaaaccttctatggattgaaaagaccgtttaatctgttactggatttcattatatttgattcagctcctcagtgcaggtatgtactgttttcagtatcatgtttattttatgttctgaagtagaaatgcctttgtagggccataaatactttgtcttttactgctttcaggtttctggatttgtttttaccaaggttcaagaaaacctaggcgctagtcacacgttatcctactgactagcgtctaggaagattaaacgtagattaagcgtgattaatcgtttgttttttaatttttgtgctgcagaaagcaagatcagcagtgagtaactaagtactaagtaataataacacaactactaagtagtgatactagtgaacctaccttttactgttccgcacatttattttttacataagttgctttcctccttggcttcttgcaagttgcttccaacagcagctgatcatcaaagagagacaagttaataatctgaaaactatacaatcagataatttggaaagagtagaaactcatctgaggggcagctcaatattgtacatgcacagccaagcttgcaaacaacagggcaacatcacaagtcaaaggatcacaagaaatacagaaaacactcacagttcatcacatgccttaatggtccacaaattaaatagcagtacagcacacaataattgttttatggtccacacacattaggataagtaaataactagatattaactacacggcgcctagcgcgtgcacaccgtgtctaggcgcgcccagcgcctaatactgcgcctagtccataaacgagacactagaccttcgttagcgtttaatcgagattaatctccgtttaattgtgttttttcgaaccttggtttttacaaaatgttgataatgtggcctgtatagtgcaatatcaatgttcttattaatccactttaaaaacatatataattattgtgttcatattatcttggtttactggtactttgataaccttcagattctcatcatatgcatgcaaagcaaaaaatgattgtgatgtttttcggtcacatgtgcatggatagcttatggttgatcattgatcatttgatcgttatccatattttattccttgagtttctttttgtctctcttgagtgaacaaaatattgggtctggtactgagatgattcttcttgttgggcgtttgagcatgaaaagaatttgctctgtcacttttggcagatgacgtgatccatgagatgactgctgcacaggtcctacagaagcaactgtttgatgcacacgaaccaaatttactggatgaaaatgatatgcatatatttggatcaaaaccgatggccgacccattggacttggtctgctgtagtacttgcaagaagccagtcaaagccagccaatatgcaattcatacagggcaatgtagttcagggaaggtaaacacaaatggttcagtgggtgtggatcatgccaatcctacaaagcccctgaagaaaggcagaaaaataaagttgataagtaatggaaatcaaaaagtgcacataaaagtgaaagcaaaatctcaaactgaaagcaataacattgccaatagtttcgagttggacaatggacatgtcactaaagtacaacctatagattccacagggctgggcctgtctgctgatagttcagctactatcaatgtgcctaaaaatcatcccagagatgcgccagttcctcttgcaacaaaaatgtatcattcacagggcaactaccgtcttcgatttgagcttggccagctttatcgcgaatcatgtgtgcagcatttgagtggccacacaactccaaacgtgtcacatgagaatggattgatggcatcatcacggttttcttcttgtggcaactcagcattgcctactcagaagagccttgttcctcaaacaaagcctctcgcagaccctcagcaattagcagcaagcaggcctaaccagtcacaaggaacaaaaactgatagagcaagtgcacaagcatctgcaattaaaaatgaaggttcacgatccagatgcaataaagctaccattccccattcgagaaacaaaggcagcaagaagacgcaacagcaacctaatggacgtgttcatgcgatcaagttcccagtagagtagcccattcgtaggtaatttattggttaagtggaagtgtctcttctggtgaacagtctcttcttttctcctttccaaatgaaattggttattgtcaggattgttctaatttggactgtcccgatccgaggttttggttcgccggccattggtactagaagctaacagcactagttgtagcactgacgatgaacttacctgtaaatatggccacagaggccttggcttcttcctgccgaaggtcgtggacctgatgaacattttgaatgtagccttcatcttttgggcattgagttctagttgattgatgttttgtgtttgattcttgccctaagtttagctttctagccggcgattgaaccgttttacgggctaccgctgccagctgccggtggatgagcccttccgta

SEQ ID NO: 13372 - DNA, 3781 bp, Zea Mays
ggtagtacacccgagggtcgtacccgaggagcgataggtgcgccgtatcgctgccgcaggcgagccccggctccacggggtccatgagcccggtcaccccgaccgccgccaccgcgtccagccgcggcgtgcacgccgcctccagtggcgtacgcccgcccagcgacggaacgctcacgtccccgatcccgtccaccagcacgaacgccacgcggctccgcctcggacctctcccctccgcgcctgccatcgccgtctccgcagccgccgcaaaggcccctcgcctctctcaatttcagctctctgctgctgcttacgagatgcctctgccgcgtgctggttcagccgcgggtcgggcccgggcacagggttcacgggccggtttggtcactacaagaaccgggcgagcccgaggcccggcccccaaatctgcaacgcttggcgctcgctcggctccgccctccgcccccctgctccgtccgatcgccgcgccccctcgccgccggtgatcgctggggagccgacgaggccggacgccggaggttctcgctccctcctctgtgtctcccttcctcccgcgcgtcccgcctgctcgtcgcgtggcctcctgctcggggcttcctctcgccgcggaatttggcatgtgacgtggggcgaggccaacgaggcgcagccggcggcggcgtggggttgattggttaactggatttcgagattgttttgtctggatttttttccgagggaagcgcgcgctccaggttcatttccaaaatggtttgcatggtggggaattttaaaatgtcttctgtgttgaagcttgtaatgatggaaaatcacgcaacaccaggtaaagtatagttaagattttaacctcttttgactttccatttagcctgtgactttcatggataatactttaatagaggctttgagacctgtgtccagagtaaataaagagaaaattatattgcacagttgtcagttaggatggaaatttgatatccatcaataaaattgataaattatagaatggtgcaccttatcttttattttactagaacacagtgcaacttctatatattcttatttgtaacttggatatgttgcaaaaataataaatattactagatccttgcaaagagaaggagaaataataaaatctagaaaagaataatacaatacaagggagctttgaaatgaaatattatttatatacaaaccttctatggattgaaaagaccgtttaatctgttactggatttcattatatttgattcagctcctcagtgcaggtatgtactgttttcagtatcatgtttattttatgttctgaagtagaaatgcctttgtagggccataaatactttgtcttttactgctttcaggtttctggatttgtttttaccaaggttcaagaaaacctaggcgctagtcacacgttatcctactgactagcgtctaggaagattaaacgtagattaagcgtgattaatcgtttgttttttaatttttgtgctgcagaaagcaagatcagcagtgagtaactaagtactaagtaataataacacaactactaagtagtgatactagtgaacctaccttttactgttccgcacatttattttttacataagttgctttcctccttggcttcttgcaagttgcttccaacagcagctgatcatcaaagagagacaagttaataatctgaaaactatacaatcagataatttggaaagagtagaaactcatctgaggggcagctcaatattgtacatgcacagccaagcttgcaaacaacagggcaacatcacaagtcaaaggatcacaagaaatacagaaaacactcacagttcatcacatgccttaatggtccacaaattaaatagcagtacagcacacaataattgttttatggtccacacacattaggataagtaaataactagatattaactacacggcgcctagcgcgtgcacaccgtgtctaggcgcgcccagcgcctaatactgcgcctagtccataaacgagacactagaccttcgttagcgtttaatcgagattaatctccgtttaattgtgttttttcgaaccttggtttttacaaaatgttgataatgtggcctgtatagtgcaatatcaatgttcttattaatccactttaaaaacatatataattattgtgttcatattatcttggtttactggtactttgataaccttcagattctcatcatatgcatgcaaagcaaaaaatgattgtgatgtttttcggtcacatgtgcatggatagcttatggttgatcattgatcatttgatcgttatccatattttattccttgagtttctttttgtctctcttgagtgaacaaaatattgggtctggtactgagatgattcttcttgttgggcgtttgagcatgaaaagaatttgctctgtcacttttggcagatgacgtgatccatgagatgactgctgcacaggtcctacagaagcaactgtttgatgcacacgaaccaaatttactggatgaaaatgatatgcatatatttggatcaaaaccgatggccgacccattggacttggtctgctgtagtacttgcaagaagccagtcaaagccagccaatatgcaattcatacagggcaatgtagttcagggaaggtaaacacaaatggttcagtgggtgtggatcatgccaatcctacaaagcccctgaagaaaggcagaaaaataaagttgataagtaatggaaatcaaaaagtgcacataaaagtgaaagcaaaatctcaaactgaaagcaataacattgccaatagtttcgagttggacaatggacatgtcactaaagtacaacctatagattccacagggctgggcctgtctgctgatagttcagctactatcaatgtgcctaaaaatcatcccagagatgcgccagttcctcttgcaacaaaaatgtatcattcacagggcaactaccgtcttcgatttgagcttggccagctttatcgcgaatcatgtgtgcagcatttgagtggccacacaactccaaacgtgtcacatgagaatggattgatggcatcatcacggttttcttcttgtggcaactcagcattgcctactcagaagagccttgttcctcaaacaaagcctctcgcagaccctcagcaattagcagcaagcaggcctaaccagtcacaaggaacaaaaactgatagagcaagtgcacaagcatctgcaattaaaaatgaaggttcacgatccagatgcaataaagctaccattccccattcgagaaacaaaggcagcaagaagacgcaacagcaacctaatggacgtgttcatgcgatcaagttcccagtagagtagcccattcgtaggtaatttattggttaagtggaagtgtctcttctggtgaacagtctcttcttttctcctttccaaatgaaattggttattgtcaggattgttctaatttggactgtcccgatccgaggttttggttcgccggccattggtactagaagctaacagcactagttgtagcactgacgatgaacttacctgtaaatatggccacagaggccttggcttcttcctgccgaaggtcgtggacctgatgaacattttgaatgtagccttcatcttttgggcattgagttctagttgattgatgttttgtgtttgattcttgccctaagtttagctttctagccggcgattgaaccgttttacgggctaccgctgccagctgccggtggatgagcccttccgta

SEQ ID NO: 13373 - DNA, 1474 bp, Zea Mays
atcaatcattaaaaccttaatgggcagagatagttatattcatgcaggctgttatttggttcatttccaaaatggtttgcatggtggggaattttaaaatgtcttctgtgttgaagcttgtaatgatggaaaatcacgcaacaccagatgacgtgatccatgagatgactgctgcacaggtcctacagaagcaactgtttgatgcacacgaaccaaatttactggatgaaaatgatatgcatatatttggatcaaaaccgatggccgacccattggacttggtctgctgtagtacttgcaagaagccagtcaaagccagccaatatgcaattcatacagggcaatgtagttcagggaaggtaaacacaaatggttcagtgggtgtggatcatgccaatcctacaaagcccctgaagaaaggcagaaaaataaagttgataagtaatggaaatcaaaaagtgcacataaaagtgaaagcaaaatctcaaactgaaagcaataacattgccaatagtttcgagttggacaatggacatgtcactaaagtacaacctatagattccacagggctgggcctgtctgctgatagttcagctactatcaatgtgcctaaaaatcatcccagagatgcgccagttcctcttgcaacaaaaatgtatcattcacagggcaactaccgtcttcgatttgagcttggccagctttatcgcgaatcatgtgtgcagcatttgagtggccacacaactccaaacgtgtcacatgagaatggattgatggcatcatcacggttttcttcttgtggcaactcagcattgcctactcagaagagccttgttcctcaaacaaagcctctcgcagaccctcagcaattagcagcaagcaggcctaaccagtcacaaggaacaaaaactgatagagcaagtgcacaagcatctgcaattaaaaatgaaggttcacgatccagatgcaataaagctaccattccccattcgagaaacaaaggcagcaagaagacgcaacagcaacctaatggacgtgttcatgcgatcaagttcccagtagagtagcccattcgtaggtaatttattggttaagtggaagtgtctcttctggtgaacagtctcttcttttctcctttccaaatgaaattggttattgtcaggattgttctaatttggactgtcccgatccgaggttttggttcgccggccattggtactagaagctaacagcactagttgtagcactgacgatgaacttacctgtaaatatggccacagaggccttggcttcttcctgccgaaggtcgtggacctgatgaacattttgaatgtagccttcatcttttgggcattgagttctagttgattgatgttttgtgtttgattcttgccctaagtttagctttctagccggcgattgaaccgttttacgggctaccgctgccagctgccggtggatgagcccttccgta

SEQ ID NO: 13374 - DNA, 603 bp, Zea Mays
aaaggagtcaatgcactataatgcgaagaattcttcatgacatccaatgagataatgattttcttgaatgggctagctcaagttgtgcggtttaacactgcagactgaaacaagcctttgcttgcaccgaaattcttccaagatccttgctaaccggcagttagctcagaggtcgcaggtgaggaagttgcagtacatctccgagcccaagcgcaactgtcacaacactgcagggttccgcaaatgttggaaaatatgcatttatcagtgcaatgctaagaacaatggcgtacaaggacccggtggcagcggcagctcaaaaatacaagccaatacagtctgctgttcctagaacaacccttggccctattcaaattgaagcatttttaggcggaggggtatgaagggtctcttatcatgatcctttgatgcaatacaatcatctttatgcatgcacagtgctcgatatgaactgatccaaaatatttgttctctctaattacatccctatgttttgtatcttctacttagagttcaatttgaagtctactaacatatccttgcacacagaaatggtatgatacacgtggagtccaccttcac

SEQ ID NO: 13375 - DNA, 1386 bp, Zea Mays
ccagcaatccggccgcggccaggcagccaccagcagcgacaagaaatcgagaatcctcgtttcccattttgtggctggcgcgagcgtgcagcgtcacaggtttccggacggacgctttctatcgcaatcctatctatatatttatcccaaggcttcgtggtttttgttgctgctgctgctgtcacggccgccttccactcccacaagcttcagctagccttcttactcccgccgtcacccccgatccgagagcgagcatggcgcactctctcgccgcctccttctcgccggccgccgcccggcgccaggtcacaaatgtgattccaagctggacctcggtttccttccagagccacaggatgacttctgtatccatccgctcaagacaaaggtctcttgggtttaagatttgctgttcggtatgcatcatttcatcctttgttgctagcaacagttgtttggtggatgaagcaacagcctatttgtagtagcttttcgtattgacagttatctttatttgctaacatcatacgggatactataattaacttgaattctttgtatagttagcaaaaaaaagatggaattatttagctatttgtatagaaagtacaaaccactagatggtgtgaagagtgtgacctggttcttgacagccatattgcctgtttctgagattgtcaacatgcgcttactcctgatgtgaagcagtcacatctttttgaagacctgaaatatcatcattctcatgtttattgattaggctaagaaagagacagtggacaaggtttgcagtatagtgaaggagcagctggctcttcccgatgggaccgccatcactgccgaatcaaaattcgctgaacttggcgctgattcgctggatacggtcgagattgtgatgggcctcgaggaggcgttcaacataacagtcgacgaaacaagcgcacaggacatcgcaacagtgcaggacgctgcggaccttatcgagaagctcatgctggaggcacctccaaaggtcgtctagatccagcaaccttgcgatcgacgaccttgtgtttgatctatgttgtgtgttaatttgttcgtgttgccccatttgttctttcttgatgattcaagatgaggttttgtattggtgttgctgaggtgaattagatagccccaaaggccacatgaagcagatgaggacagttcattccactttgaatttgtatgttgtaacttgtagtgctgctatagagaaaccaatggactgttatgaagagtcaatgcaactgttgcttttttagttttgggaagtcacacacatgaaagtctgaatcagatgcagtactaattgttgagcttggggtgcagatatatgcaaataccaggatgtcaggtgct

SEQ ID NO: 13376 - DNA, 1080 bp, Zea Mays
atttgggacaaatgaaatccacaaatttttccgctggagagcgcgatcctctgaaaagtatagacaacttttttccaaaaaaaagaaaagaggaaaaaaatgttatcttctacctccttagctgctcttctccatggccgcccccattatcctttccgtccgtcgaaggcgcatcttttcctagctctccccaacaaccctacccgtttcctggcctccgcctccgtccgggtcgcctatcctccccggtggcatctccgcgccgccgacggggagcgggacaaccgcgtgcaggagctgagggtgcccgattcttggctgacgcctgcaggagcaacgcagataaaattgacaagaaacgaagaagaatacatggcattttaataatggtttttgaaggagggacattcgcaacggggacaaaaggaatctgaatggctgagggagacactgcgcaagtggctcgacgacgagtactgcccggagccggccaacgtggacatcagcagcaccgccgcgcggtcgtatcgcgaatccctgatagcggggcagtctgacctgggagagatcttgctgaggatggtgggcgacctggacaagctgtcgtacagggagagcttccacggccccttctcggccgccaacgctgcagtccgtttgatcgctcagaggatggaggagtcactgcctgatgaatgacggtggtgcgcgacctggagtttctatatggcacgacttttgatgaagtcgtaggctatatgtacttttgacgatgaacaattcgatcaccattcctcaccgaggctgtcgctgacagaaaatggtgagaataggctcgagacttcatttttctgctgaaattcgccaacgtactattctgtttatgagcatgtctttgagacgagcggtgaaatgccaacgaggtgggtcgacttaagggagtgcgtggccttctctgaagtagttttgggtgtgaatttgcagttgactagaaataaagggcgcgctccgtggcgccctaccctacggtgccaaaacagatacatgctatctttgtatgtatacagatctgatacgtat

SEQ ID NO: 13377 - DNA, 1640 bp, Zea Mays
gattctttaagcacgttgagattgcgaatgacgcaatcggtacctagcacgtgaaaattccttccgctccagttattacggagcaatagggtggtgaactggtgactggagctggaatcgcatttcttgctctttggtctctccagaatcatcctccggccgagccttcttggaatcctcccgagattcgcttgcccgcccttttcttttcaagtggatctgaacttgggagggaaccccgatgcagccgcggtacggagaagcacgacagccgctgccggggcggtacgcgctgtaccacttcggcaccagcggcgccgccgtcgccgccgccaccgccgtgacccatccgttcgatgttatcaaagtcaggcttcaaatgcagcttgctgggcaaagaggaaacttagttggaatggtacttaaagtcacagcacctacaggggctcggtcactctacctgggacttgcaccagcgttggcgagagctgttgtctatggtggccttcggtttggactgtatgagccctgcaagcatgtctgcagttatgcatttggttcaacaaactttgcttttaaatttgcatctggagtcattgctgggggccttgcaactgctttaacaaatcccatggaagttttgaaggtgaggctgcagatgagtaaaagcagtaccagtacaataagagagatgagaaaagttatagcgcacgaagggtttaaagcactttggaaaggagtcggcccagcaatgacaagagcaggttgcctcactgcatcacaaatggcgacttacgatgaggccaaacaggccttaatgaagtggacaccacttgaagaaggttttcagttacatctcatctcgagtttcatagctggaacagctggtactcttgtgaccgcacctgtagacatgatcaaaacacggttaatgctgcaacaggagtccataggcgccagagtatacaggaacggattccattgtgcttcccaggttgtggtgacagagggtgtgaagtcactttataaaggtggatttgccacattcgcgagagtaggccctcagacaacgattacctttgtcgtgtgcgagaaactgcgcgaacttgcaggaatgactgccatctagtgccaccccaaattgcataatgtgtggggtccaacggttgaacagcatactctacccgagttttcacaccattctttattcaccattcatgatgagaagggagaagataagcacccactgggatgtttaaggattgggaagccagagctccttcagatttatcatacctcatttgaaatttcgaaatagcgtgattgttgttatgtttgctctaagacttactcatcatatctctaatctcatcttgtatttcgaactacactctacgaacaatacagtctacaatgtaaaaacattatttttggtgaccatatgggtaacctgttgtacatgctgtacacggtctaactaccattgaatgtgtgtgtgggtagctctcaagtttgagatcttgctccaccttggaccatgatgtatgcatgtctgggccttcaacgagcacatggtgatctttcttctgccttttgggtttggaattccattgcagacagcagagccacccaatattggc

SEQ ID NO: 13378 - DNA, 2759 bp, Zea Mays
gcacgtgaaaattccttccgctccagttattacggagcaatagggtggtgaactggtgactggagctggaatcgcatttcttgctctttggtctctccagaatcatcctccggccgagccttcttggaatcctcccgagattcgcttgcccgcccttttcttttcaagtggatctgaacttgggagggaaccccgatgcagccgcggtacggagaagcacgacagccgctgccggggcggtacgcgctgtaccacttcggcaccagcggcgccgccgtcgccgccgccaccgccgtgacccatccgttcggtcagctagctgctcttcttctcatctgttgcttgttattttgggtaatttgatattcttgaactgcctcgggtttcggttggggaaggacatcaaggaaatacgcatgtatgattcggcattcgggtgctaattcttgattttgttttagttccgccagtcagaaattctcccctctgaattctctgcttaggccgtgtttgcatccttggaattgaattccgttctaataattaattaaactaatttagttttatacataatatatttgtactacatttctacttttctacttgagataagcgagccgaagagtgcgttataagttacagcttagaaacatagaatagtgatatataaaatcaatttccaccacctcaccctaattttttggatagtcttatttaactttagaaaatgatagaatatcaaattccaaaccaaataactttactatattaaataaattctaattcctttaaaaccaaacggcccctagggaaatgctagttgagaattgagatgggttcgaagggatccaaacggtcctagggaaatgctagttgagaattgagatgggtccgacgttatagtgtagcagcatatactaattaattgtgcgaaaatgtgcctacaaaactagactaggtgtccgtttgtttgactttaatttgtactatttggactattcgtttcggattaaagccagttatttgggttgctacagctaaaatccattgagacaaaaacattgtagaagcagtagaagccagttatagttcaggtatacctacaggcagtggcgaaagagtacccatggatgttatcaaagtcaggcttcaaatgcagcttgctgggcaaagaggaaacttagttggaatgggaacaatatttacacaaatggttgaaagggaaggggctcggtcactctacctgggacttgcaccagcgttggcgagagctgttgtctatggtggccttcggtttggactgtatgagccctgcaagcatgtctgcagttatgcatttggttcaacaaactttgcttttaaatttgcatctggagtcattgctgggggccttgcaactgctttaacaaatcccatggaagttttgaaggtgaggctgcagatgagtaaaagcagtaccagtacaataagagagatgagaaaagttatagcgcacgaagggtttaaagcactttggaaaggagtcggcccagcaatgacaagagcaggttgcctcactgcatcacaaatggcgacttacgatgaggccaaacaggccttaatgaagtggacaccacttgaagaaggttttcagttacatctcatgtacagtgaattctctatttctctattatgatgtgtatcctttaatgagatgaatggatggctaatctttatctgcttggaagctcgagtttcatagctggaacagctggtactcttgtgaccgcacctgtagacatgatcaaaacacggttaatgctgcaacaggagtccataggcgccagagtatacaggaacggattccattgtgcttcccaggtgttgatcttaatatttcatttttgatgtttgtgctattaggaattattcctggtaagaacattgctagaattactttctataagtgcctgaaagcactgcgaaattgttaagctacaacattagtagtgaactattgtcacaagatgagaacaggaatgttacaaccgaggagattggaaatacaataccttgagcgccaacaacatgaaggtattcttctgatatttgtttccattctcttggtttgcaggttgtggtgacagagggtgtgaagtcactttataaaggtggatttgccacattcgcgagagtaggccctcagacaacgattacctttgtcgtgtgcgagaaactgcgcgaacttgcaggaatgactgccatctagtgccaccccaaattgcataatgtgtggggtccaacggttgaacagcatactctacccgagttttcacaccattctttattcaccattcatgatgagaagggagaagataagcacccactgggatgtttaaggattgggaagccagagctccttcagatttatcatacctcatttgaaatttcgaaatagcgtgattgttgttatgtttgctctaagacttactcatcatatctctaatctcatcttgtatttcgaactacactctacgaacaatacagtctacaatgtaaaaacattatttttggtgaccatatgggtaacctgttgtacatgctgtacacggtctaactaccattgaatgtgtgtgtgggtagctctcaagtttgagatcttgctccaccttggaccatgatgtatgcatgtctgggccttcaacgagcacatggtgatctttcttctgccttttgggtttggaattccattgcagacagcagagccacccaatattggc

SEQ ID NO: 13379 - DNA, 1628 bp, Zea Mays
gcacgtgaaaattccttccgctccagttattacggagcaatagggtggtgaactggtgactggagctggaatcgcatttcttgctctttggtctctccagaatcatcctccggccgagccttcttggaatcctcccgagattcgcttgcccgcccttttcttttcaagtggatctgaacttgggagggaaccccgatgcagccgcggtacggagaagcacgacagccgctgccggggcggtacgcgctgtaccacttcggcaccagcggcgccgccgtcgccgccgccaccgccgtgacccatccgttcggcctaccactattttcgtcctgcagatgttatcaaagtcaggcttcaaatgcagcttgctgggcaaagaggaaacttagttggaatgggaacaatatttacacaaatggttgaaagggaaggggctcggtcactctacctgggacttgcaccagcgttggcgagagctgttgtctatggtggccttcggtttggactgtatgagccctgcaagcatgtctgcagttatgcatttggttcaacaaactttgcttttaaatttgcatctggagtcattgctgggggccttgcaactgctttaacaaatcccatggaagttttgaaggtgaggctgcagatgagtaaaagcagtaccagtacaataagagagatgagaaaagttatagcgcacgaagggtttaaagcactttggaaaggagtcggcccagcaatgacaagagcaggttgcctcactgcatcacaaatggcgacttacgatgaggccaaacaggccttaatgaagtggacaccacttgaagaaggttttcagttacatctcatctcgagtttcatagctggaacagctggtactcttgtgaccgcacctgtagacatgatcaaaacacggttaatgctgcaacaggagtccataggcgccagagtatacaggaacggattccattgtgcttcccaggttgtggtgacagagggtgtgaagtcactttataaaggtggatttgccacattcgcgagagtaggccctcagacaacgattacctttgtcgtgtgcgagaaactgcgcgaacttgcaggaatgactgccatctagtgccaccccaaattgcataatgtgtggggtccaacggttgaacagcatactctacccgagttttcacaccattctttattcaccattcatgatgagaagggagaagataagcacccactgggatgtttaaggattgggaagccagagctccttcagatttatcatacctcatttgaaatttcgaaatagcgtgattgttgttatgtttgctctaagacttactcatcatatctctaatctcatcttgtatttcgaactacactctacgaacaatacagtctacaatgtaaaaacattatttttggtgaccatatgggtaacctgttgtacatgctgtacacggtctaactaccattgaatgtgtgtgtgggtagctctcaagtttgagatcttgctccaccttggaccatgatgtatgcatgtctgggccttcaacgagcacatggtgatctttcttctgccttttgggtttggaattccattgcagacagcagagccacccaatattggc

SEQ ID NO: 13380 - DNA, 1837 bp, Zea Mays
gcacgtgaaaattccttccgctccagttattacggagcaatagggtggtgaactggtgactggagctggaatcgcatttcttgctctttggtctctccagaatcatcctccggccgagccttcttggaatcctcccgagattcgcttgcccgcccttttcttttcaagtggatctgaacttgggagggaaccccgatgcagccgcggtacggagaagcacgacagccgctgccggggcggtacgcgctgtaccacttcggcaccagcggcgccgccgtcgccgccgccaccgccgtgacccatccgttcgatgttatcaaagtcaggcttcaaatgcagcttgctgggcaaagaggaaacttagttggaatgggaacaatatttacacaaatggttgaaagggaaggggctcggtcactctacctgggacttgcaccagcgttggcgagagctgttgtctatggtggccttcggtttggactgtatgagccctgcaagcatgtctgcagttatgcatttggttcaacaaactttgcttttaaatttgcatctggagtcattgctgggggccttgcaactgctttaacaaatcccatggaagttttgaaggtgaggctgcagatgagtaaaagcagtaccagtacaataagagagatgagaaaagttatagcgcacgaagggtttaaagcactttggaaaggagtcggcccagcaatgacaagagcaggttgcctcactgcatcacaaatggcgacttacgatgaggccaaacaggccttaatgaagtggacaccacttgaagaagctcgagtttcatagctggaacagctggtactcttgtgaccgcacctgtagacatgatcaaaacacggttaatgctgcaacaggagtccataggcgccagagtatacaggaacggattccattgtgcttcccaggtgttgatcttaatatttcatttttgatgtttgtgctattaggaattattcctggtaagaacattgctagaattactttctataagtgcctgaaagcactgcgaaattgttaagctacaacattagtagtgaactattgtcacaagatgagaacaggaatgttacaaccgaggagattggaaatacaataccttgagcgccaacaacatgaaggtattcttctgatatttgtttccattctcttggtttgcaggttgtggtgacagagggtgtgaagtcactttataaaggtggatttgccacattcgcgagagtaggccctcagacaacgattacctttgtcgtgtgcgagaaactgcgcgaacttgcaggaatgactgccatctagtgccaccccaaattgcataatgtgtggggtccaacggttgaacagcatactctacccgagttttcacaccattctttattcaccattcatgatgagaagggagaagataagcacccactgggatgtttaaggattgggaagccagagctccttcagatttatcatacctcatttgaaatttcgaaatagcgtgattgttgttatgtttgctctaagacttactcatcatatctctaatctcatcttgtatttcgaactacactctacgaacaatacagtctacaatgtaaaaacattatttttggtgaccatatgggtaacctgttgtacatgctgtacacggtctaactaccattgaatgtgtgtgtgggtagctctcaagtttgagatcttgctccaccttggaccatgatgtatgcatgtctgggccttcaacgagcacatggtgatctttcttctgccttttgggtttggaattccattgcagacagcagagccacccaatattggc

SEQ ID NO: 13381 - DNA, 1438 bp, Zea Mays
gaaaaaaaaacaggcctcgtcgattctgtgggccggagccattgggttcgaaaagccctggcttccctttcacggccgccctagcttccccacactgagctccttcgccgccgccctagctttcccgcgagcgggacggtagccgccgtatcctccttcctccaacaccgagcgggtccaggcaggcagcatcctcgcgccctgtcgtgtcgcctctgcctctgagttcagctcgccggcagccgccgcccgcaatggaggccctccggaaagcggaggcggagctcacggtgtacgtgcacccctccaacgccaagcgcgtccggcacgccacaaagagggcaaacccatatatgaaaggagtgaccgtaatgatcaaattgctgaacccgtttcttatggcaaaatcatgaatggcttggtgccatatttcagcgtccaagtgcatgccaccctgctgctgttctctccccagccggacatgatcctggaagggatggttgaaatgattgggaaggagtcaattcatgccattgtattaggggttttctcagtggcaattatgtctgaagatattaagttcaaattcaaatggaaaagtgatggagggaaatttgtgagcctcacagataaaaaacatgtgattgaaagaggaacaatgataaggttttctgtcaaaagggtggatacagaaatgagttgtcatattactggatctttaatcccacctcacactggatgcatgcgttggttgtcagtacatgatcctaaatatgcatcagaactcaaaagtggtgaaagtagatcaagggatacaagcatcaaaattgagcagaatgaacaagaacatagaatactcaagaatgaagatggtatggtgaaatctgaacggccatataaatcccgaaagagggggcgacacattgagaaatgacatttcattgaggccgtgaagatacaagaatgtggaagtcatgttcgcttcaatggttctgctgcctatttatgtttcttgtgggggggagaaggtgcctccagttggagatcccggtagcttcatagaaatgtacgatgatttttgtaaaacgaatggagggttgcatttgcaaattatcaccttttttgacaagatagtagtaactgatctcaccgaaggggtttattggcaaatggcaagtcccatgtttcaattataacccgggcctctgttgtgtcctatatcctgtaaaaggcctttccttttgaagcataactgaaagagttgcacacccattataaccattttttatcaagcaaaatctgaaagttgacacccaaagtttcccaatacgatgtaaaggacgctctcgaaccttctggtgtatgcacagctacaacaataatatagcgttgtccagcatttaggagcattttatgcacagctacaacaataatatcc

SEQ ID NO: 13382 - DNA, 1428 bp, Zea Mays
gaaaaaaaaacaggcctcgtcgattctgtgggccggagccattgggttcgaaaagccctggcttccctttcacggccgccctagcttccccacactgagctccttcgccgccgccctagctttcccgcgagcgggacggtagccgccgtatcctccttcctccaacaccgagcgggtccaggcaggcagcatcctcgcgccctgtcgtgtcgcctctgcctctgagttcagctcgccggcagccgccgcccgcaatggaggccctccggaaagcggaggcggagctcacggtgtacgtgcacccctccaacgccaagcgcgtccggcacgccgtatcccgccagcttagcgcgcttctcttcacgtatgtggaccgttttgatggcgtgttgctgatgcatgaagtttcattccttattggcaaagacaaagagggcaaacccatatatgaaaggagtgaccgtaatgatcaaattgctgaacccgtttcttatggcaaaatcatgaatggcttggtgccatatttcagcgtccaagtgcatgccaccctgctgctgttctctccccagccggacatgatcctggaaaagtgatggagggaaatttgtgagcctcacagataaaaaacatgtgattgaaagaggaacaatgataaggttttctgtcaaaagggtggatacagaaatgagttgtcatattactggatctttaatcccacctcacactggatgcatgcgttggttgtcagtacatgatcctaaatatgcatcagaactcaaaagtggtgaaagtagatcaagggatacaagcatcaaaattgagcagaatgaacaagaacatagaatactcaagaatgaagatggtatggtgaaatctgaacggccatataaatcccgaaagagggggcgacacattgagaaatgacatttcattgaggccgtgaagatacaagaatgtggaagtcatgttcgcttcaatggttctgctgcctatttatgtttcttgtgggggggagaaggtgcctccagttggagatcccggtagcttcatagaaatgtacgatgatttttgtaaaacgaatggagggttgcatttgcaaattatcaccttttttgacaagatagtagtaactgatctcaccgaaggggtttattggcaaatggcaagtcccatgtttcaattataacccgggcctctgttgtgtcctatatcctgtaaaaggcctttccttttgaagcataactgaaagagttgcacacccattataaccattttttatcaagcaaaatctgaaagttgacacccaaagtttcccaatacgatgtaaaggacgctctcgaaccttctggtgtatgcacagctacaacaataatatagcgttgtccagcatttaggagcattttatgcacagctacaacaataatatcc

SEQ ID NO: 13383 - DNA, 1367 bp, Zea Mays
gaaaaaaaaacaggcctcgtcgattctgtgggccggagccattgggttcgaaaagccctggcttccctttcacggccgccctagcttccccacactgagctccttcgccgccgccctagctttcccgcgagcgggacggtagccgccgtatcctccttcctccaacaccgagcgggtccaggcaggcagcatcctcgcgccctgtcgtgtcgcctctgcctctgagttcagctcgccggcagccgccgcccgcaatggaggccctccggaaagcggaggcggagctcacggtgtacgtgcacccctccaacgccaagcgcgtccggcacgccgtatcccgccagcttagcgcgcttctcttcaccgtccaagtgcatgccaccctgctgctgttctctccccagccggacatgatcctggaagggatggttgaaatgattgggaaggagtcaattcatgccattgtattaggggttttctcagtggcaattatgtctgaagatattaagttcaaattcaaatggaaaagtgatggagggaaatttgtgagcctcacagataaaaaacatgtgattgaaagaggaacaatgataaggttttctgtcaaaagggtggatacagaaatgagttgtcatattactggatctttaatcccacctcacactggatgcatgcgttggttgtcagtacatgatcctaaatatgcatcagaactcaaaagtggtgaaagtagatcaagggatacaagcatcaaaattgagcagaatgaacaagaacatagaatactcaagaatgaagatggtatggtgaaatctgaacggccatataaatcccgaaagagggggcgacacattgagaaatgacatttcattgaggccgtgaagatacaagaatgtggaagtcatgttcgcttcaatggttctgctgcctatttatgtttcttgtgggggggagaaggtgcctccagttggagatcccggtagcttcatagaaatgtacgatgatttttgtaaaacgaatggagggttgcatttgcaaattatcaccttttttgacaagatagtagtaactgatctcaccgaaggggtttattggcaaatggcaagtcccatgtttcaattataacccgggcctctgttgtgtcctatatcctgtaaaaggcctttccttttgaagcataactgaaagagttgcacacccattataaccattttttatcaagcaaaatctgaaagttgacacccaaagtttcccaatacgatgtaaaggacgctctcgaaccttctggtgtatgcacagctacaacaataatatagcgttgtccagcatttaggagcattttatgcacagctacaacaataatatcc

SEQ ID NO: 13384 - DNA, 1356 bp, Zea Mays
gaaaaaaaaacaggcctcgtcgattctgtgggccggagccattgggttcgaaaagccctggcttccctttcacggccgccctagcttccccacactgagctccttcgccgccgccctagctttcccgcgagcgggacggtagccgccgtatcctccttcctccaacaccgagcgggtccaggcaggcagcatcctcgcgccctgtcgtgtcgcctctgcctctgagttcagctcgccggcagccgccgcccgcaatggaggccctccggaaagcggaggcggagctcacggtgtatgtggaccgttttgatggcgtgttgctgatgcatgaagtttcattccttattggcaaagacaaagagggcaaacccatatatgaaaggagtgaccgtaatgatcaaattgctgaacccgtttcttatggcaaaatcatgaatggcttggtgccatatttcagcgtccaagtgcatgccaccctgctgctgttctctccccagccggacatgatcctggaaaagtgatggagggaaatttgtgagcctcacagataaaaaacatgtgattgaaagaggaacaatgataaggttttctgtcaaaagggtggatacagaaatgagttgtcatattactggatctttaatcccacctcacactggatgcatgcgttggttgtcagtacatgatcctaaatatgcatcagaactcaaaagtggtgaaagtagatcaagggatacaagcatcaaaattgagcagaatgaacaagaacatagaatactcaagaatgaagatggtatggtgaaatctgaacggccatataaatcccgaaagagggggcgacacattgagaaatgacatttcattgaggccgtgaagatacaagaatgtggaagtcatgttcgcttcaatggttctgctgcctatttatgtttcttgtgggggggagaaggtgcctccagttggagatcccggtagcttcatagaaatgtacgatgatttttgtaaaacgaatggagggttgcatttgcaaattatcaccttttttgacaagatagtagtaactgatctcaccgaaggggtttattggcaaatggcaagtcccatgtttcaattataacccgggcctctgttgtgtcctatatcctgtaaaaggcctttccttttgaagcataactgaaagagttgcacacccattataaccattttttatcaagcaaaatctgaaagttgacacccaaagtttcccaatacgatgtaaaggacgctctcgaaccttctggtgtatgcacagctacaacaataatatagcgttgtccagcatttaggagcattttatgcacagctacaacaataatatcc

SEQ ID NO: 13385 - DNA, 1193 bp, Zea Mays
atctcctccctatgcgttttgcaaagtatgtggaccgttttgatggcgtgttgctgatgcatgaagtttcattccttattggcaaagacaaagagggcaaacccatatatgaaaggagtgaccgtaatgatcaaattgctgaacccgtttcttatggcaaaatcatgaatggcttggtgccatatttcagcgtccaagtgcatgccaccctgctgctgttctctccccagccggacatgatcctggaagggatggttgaaatgattgggaaggagtcaattcatgccattgtattaggggttttctcagtggcaattatgtctgaagatattaagttcaaattcaaatggaaaagtgatggagggaaatttgtgagcctcacagataaaaaacatgtgattgaaagaggaacaatgataaggttttctgtcaaaagggtggatacagaaatgagttgtcatattactggatctttaatcccacctcacactggatgcatgcgttggttgtcagtacatgatcctaaatatgcatcagaactcaaaagtggtgaaagtagatcaagggatacaagcatcaaaattgagcagaatgaacaagaacatagaatactcaagaatgaagatggtatggtgaaatctgaacggccatataaatcccgaaagagggggcgacacattgagaaatgacatttcattgaggccgtgaagatacaagaatgtggaagtcatgttcgcttcaatggttctgctgcctatttatgtttcttgtgggggggagaaggtgcctccagttggagatcccggtagcttcatagaaatgtacgatgatttttgtaaaacgaatggagggttgcatttgcaaattatcaccttttttgacaagatagtagtaactgatctcaccgaaggggtttattggcaaatggcaagtcccatgtttcaattataacccgggcctctgttgtgtcctatatcctgtaaaaggcctttccttttgaagcataactgaaagagttgcacacccattataaccattttttatcaagcaaaatctgaaagttgacacccaaagtttcccaatacgatgtaaaggacgctctcgaaccttctggtgtatgcacagctacaacaataatatagcgttgtccagcatttaggagcattttatgcacagctacaacaataatatcc

SEQ ID NO: 13386 - DNA, 2635 bp, Zea Mays
agaaatataaagaaggaacgatcaaaatcgactaacatttctcgagcaaattcaacctcttgcaagttgcaccacaaatctgtcagattacctctcgtccgcgtcaaaaaaagggaggaaaaagggcaaaagaatctgaccgaaaccaaagttgctaataacttgggacgtcgtttcccggcgtgcacagcaccgctcgatcgagcaaacacaaacccttggtggagtcctctccgccgccgcgcgctaacaacctacgtacgctatcgccgcccgctcgcctcgacgggattggtccggccgttggcccgtcccccccaccacgctcgctccattggcaggcgagaccgtccatcctccgaccccacccgtcggccgccgggatggcggcttcgggcggggatgcgccggaactcgccgtgataacaaatgcttgtaatgctgcaagcgcacctgaagaaaataggcttgctgatgacagcaacaccatttcagaaaatgcccaggaatcattgagctctttgccagaacaagagtcaaatgatgctagtgttaacacagaaaagaaagaacctggcatttcaaaatgcaaatcagtggacgaaataccaaaaacagtggctgtaaagaggtgcaagaacattgattcaaagaaagtctcctcaaataacaataataatccaagctttactggcagtctggttctgaaaaaacagccagcgaagggaggccatctttttcaattatgtgaaaatggaatgtctcaagacacaaagactcctagcacaaggatatgcataaattcagcatgcaaagctgtcttcaattcagacaatgcattttgattgttgtggatcatcctgccacattgagtgcgcactcaagcaccgaaagactggatgcatagaacttggacaatctatacagcttgatggtaactactgctgtgctgcatgtggcaaggttattggaatacttgggttctggaagaggcagctggtagttgctaaagatgctcgtagagttgataatctctgttcccgcatatatctgagtcatagacttttggatggcacaactcgttttaaagagttgcatcggatcgtagaggatgcaaaagcaaagttggaaagtgaagttggcccccttgatggtacatcatccaagatggctcgtggtattgtaggccggctgcatgttgctgctgatgtgcagaaactttgcactttagcaattgaaaaggctaatgagtggcttagctcaaacattcaatctgaaacaaaacaaaatgatacacttccttctgcctgcaggtttaaatttgaagatattacagcttcatctttggtgttggttctcaaggaagctgtttcctcacagtatcatgctatcaaaggctataaactctggtactggaatagcagagaagcacctttcacaggagagcctgctgttttccccaaagaccaaagaaggattcttatatccaatctgcagccctgcacagaatattcgttccgtattatttcatttactgaggatggtgaactgggccattctgaatcaaaagtatttaccaagagtgtggaaattattcgtaagaacacagagctcggagcagaaggttgctcatcttctgccaagggagctggtaagagacaaaatgttaggtcattaggcttccaagtgcgccagctgggtaatgtcttccgaaaagcacagactgaggagaatggttaccccagcgcactgtgtaaagatgagattgaagattcatgcgatcagagtgattctgtgattccagtcaaggaccaaattccacgtggtgcctcccgtaagctcgatctcaatgagacctcagtcccagacctaaatgcagaagtagtcatgccaacagagtgctgccagaatgacaacggctgtagttctggaaagaatgcattcacaaaatcgaatggttgtggtgactccgaaacttgtgcggaggggcatgtaggggatgcaccggccatggaatccttgtctcaaagtcgcaagcaggcatcagatttggagcaggagacttgtgttgatgacagcaatttggtggcccgtgcagttaggctctttgccccgaagttaggccagttagatgacaactatgagtactgtgtgaagattatacgttggttggaatgttctggcctcattgagaaggatttcaggatgaaatttctaacctggttcagtttgagatcgacagaacaggaacggagagttgttatcaccttcatccgcaccctaatcgatgaacccagtagtttggctgcgcagcttttggattcctttgaagaaattgttaccagtaagaggctaagaactggtttctgtactaagttgtggcactaaccagatagagcatgaaacagctatctaataatactctagtattcttacatgggcaaaaattaactgggctgtagtgtaatggtgctttttatttgttttctgataatgtagttgtctgatattgttgtggcttggatatttgccatgatgatgtattcttatatgtgaaaaattaactgggatgacagtgtaatgctacttccatttgtttttatgataaacggttttgatctgatgttgctgtgct

SEQ ID NO: 13387 - DNA, 2729 bp, Zea Mays
agaaatataaagaaggaacgatcaaaatcgactaacatttctcgagcaaattcaacctcttgcaagttgcaccacaaatctgtcagattacctctcgtccgcgtcaaaaaaagggaggaaaaagggcaaaagaatctgaccgaaaccaaagttgctaataacttgggacgtcgtttcccggcgtgcacagcaccgctcgatcgagcaaacacaaacccttggtggagtcctctccgccgccgcgcgctaacaacctacgtacgctatcgccgcccgctcgcctcgacgggattggtccggccgttggcccgtcccccccaccacgctcgctccattggcaggcgagaccgtccatcctccgaccccacccgtcggccgccgggatggcggcttcgggcggggatgcgccggaactcgccgtgataacaaatgcttgtaatgctgcaagcgcacctgaagaaaataggcttgctgatgacagcaacaccatttcagaaaatgcccaggaatcattgagctctttgccagaacaagagtcaaatgatgctagtgttaacacagaaaagaaagaacctggcatttcaaaatgcaaatcagtggacgaaataccaaaaacagtggctgtaaagaggtgcaagaacattgattcaaagaaagtctcctcaaataacaataataatccaagctttactggcagtctggttctgaaaaaacagccagcgaagggaggccatctttttcaattatgtgaaaatggaatgtctcaagacacaaagactcctagcacaaggatatgcataaattcagcatgcaaagctgtcttcaattcagacaatgcattttgattgttgtggatcatcctgccacattgagtgcgcactcaagcaccgaaagactggatgcatagaacttggacaatctatacagcttgatggtaactactgctgtgctgcatgtggcaaggttattggaatacttgggttctggaagaggcagctggtagttgctaaagatgctcgtagagttgataatctctgttcccgcatatatctgagtcatagacttttggatggcacaactcgttttaaagagttgcatcggatcgtagaggatgcaaaagcaaagttggaaagtgaagttggcccccttgatggtacatcatccaagatggctcgtggtattgtaggccggctgcatgttgctgctgatgtgcagaaactttgcactttagcaattgaaaaggctaatgagtggcttagctcaaacattcaatctgaaacaaaacaaaatggtttaaatttgaagatattacagcttcatctttggtgttggttctcaaggaagctgtttcctcacagtatcatgctatcaaaggctataaactctggtactggaatagcagagaagcacctttcacaggagagcctgctgttttccccaaagaccaaagaaggattcttatatccaatctgcagccctgcacagaatattcgttccgtattatttcatttactgaggatggtgaactgggccattctgaatcaaaagtatttaccaagagtgtggaaattattcgtaagaacacagagctcggagcagaaggttgctcatcttctgccaagggagctggtaagagacaaaatgttaggtcattaggcttccaagtgcgccagctgggtaatgtcttccgaaaagcacagactgaggagaatggttaccccagcgcactgtgtaaagatgagattgaagattcatgcgatcagagtgattctgtgattccagtcaaggaccaaattccacgtggtgcctcccgtaagctcgatctcaatgagacctcagtcccagacctaaatgcagaagtagtcatgccaacagagtgctgccagaatgacaacggctgtagttctggaaagaatgcattcacaaaatcgaatggttgtggtgactccgaaacttgtgcggaggggcatgtaggggatgcaccggccatggaatccttgtctcaaagtcgcaagcaggcatcagatttggagcaggagacttgtgttgatgacagcaatttggtggcccgtgcagttaggctctttgccccgaagttaggccagttagatgacaactatgagtactgtgtgaagattatacgttggttggaatgttctggcctcattgagaaggatttcaggatgaaatttctaacctggttcagtttgagatcgacagaacaggaacggagagttgttatcaccttcatccgcaccctaatcgatgaacccagtagtttggctgcgcagcttttggattcctttgaagaaattgttaccagtaagaggctaagaactggtttctgtactaagttgtggcactaaccagatagagcatgaaacagctatctaataatactctagtattcttacattggcaagattaactgggatgacggtgtagtaagtacttctatatgttttctgataaatgtagttaaacagatgttgctgagcttgggtatttgccatgatgataatattcttacatgggcaaaaattaactgggctgtagtgtaatggtgctttttatttgttttctgataatgtagttgtctgatattgttgtggcttggatatttgccatgatgatgtattcttatatgtgaaaaattaactgggatgacagtgtaatgctacttccatttgtttttatgataaacggttttgatctgatgttgctgtgct

SEQ ID NO: 13388 - DNA, 2758 bp, Zea Mays
aagaatctgaccgaaaccaaagttgctaataacttgggacgtcgtttcccggcgtgcacagcaccgctcgatcgagcaaacacaaacccttggtggagtcctctccgccgccgcgcgctaacaacctacgtacgctatcgccgcccgctcgcctcgacgggattggtccggccgttggcccgtcccccccaccacgctcgctccattggcaggcgagaccgtccatcctccgaccccacccgtcggccgccgggatggcggcttcgggcggggatgcgccggaactcgccggtgttcctccttgccccatttcttctgccaggatggcgctgagtggggatctgttcagatctgccgtgataacaaatgcttgtaatgctgcaagcgcacctgaagaaaataggcttgctgatgacagcaacaccatttcagaaaatgcccaggaatcattgagctctttgccagaacaagagtcaaatgatgctagtgttaacacagaaaagaaagaacctggcatttcaaaatgcaaatcagtggacgaaataccaaaaacagtggctgtaaagaggtgcaagaacattgattcaaagaaagtctcctcaaataacaataataatccaagctttactggcagtctggttctgaaaaaacagccagcgaagggaggccatctttttcaattatgtgaaaatggaatgtctcaagacacaaagactcctagcacaaggatatgcataaattcagcatgcaaagctgtcttcaattcagacaatgcattttgtaagaggtgttcatgttgtatttgccatggttttgatgataacaaagatcctagcctttggttggtatgctcatcagagattggtgatcaggattgttgtggatcatcctgccacattgagtgcgcactcaagcaccgaaagactggatgcatagaacttggacaatctatacagcttgatggtaactactgctgtgctgcatgtggcaaggttattggaatacttgggttctggaagaggcagctggtagttgctaaagatgctcgtagagttgataatctctgttcccgcatatatctgagtcatagacttttggatggcacaactcgttttaaagagttgcatcggatcgtagaggatgcaaaagcaaagttggaaagtgaagttggcccccttgatggtacatcatccaagatggctcgtggtattgtaggccggctgcatgttgctgctgatgtgcagaaactttgcactttagcaattgaaaaggctaatgagtggcttagctcaaacattcaatctgaaacaaaacaaaatggtttaaatttgaagatattacagcttcatctttggtgttggttctcaaggaagctgtttcctcacagtatcatgctatcaaaggctataaactctggtactggaatagcagagaagcacctttcacaggagagcctgctgttttccccaaagaccaaagaaggattcttatatccaatctgcagccctgcacagaatattcgttccgtattatttcatttactgaggatggtgaactgggccattctgaatcaaaagtatttaccaagagtgtggaaattattcgtaagaacacagagctcggagcagaaggttgctcatcttctgccaagggagctggtaagagacaaaatgttaggtcattaggcttccaagtgcgccagctgggtaatgtcttccgaaaagcacagactgaggagaatggttaccccagcgcactgtgtaaagatgagattgaagattcatgcgatcagagtgattctgtgattccagtcaaggaccaaattccacgtggtgcctcccgtaagctcgatctcaatgagacctcagtcccagacctaaatgcagaagtagtcatgccaacagagtgctgccagaatgacaacggctgtagttctggaaagaatgcattcacaaaatcgaatggttgtggtgactccgaaacttgtgcggaggggcatgtaggggatgcaccggccatggaatccttgtctcaaagtcgcaagcaggcatcagatttggagcaggagacttgtgttgatgacagcaatttggtggcccgtgcagttaggctctttgccccgaagttaggccagttagatgacaactatgagtactgtgtgaagattatacgttggttggaatgttctggcctcattgagaaggatttcaggatgaaatttctaacctggttcagtttgagatcgacagaacaggaacggagagttgttatcaccttcatccgcaccctaatcgatgaacccagtagtttggctgcgcagcttttggattcctttgaagaaattgttaccagtaagaggctaagaactggtttctgtactaagttgtggcactaaccagatagagcatgaaacagctatctaataatactctagtattcttacattggcaagattaactgggatgacggtgtagtaagtacttctatatgttttctgataaatgtagttaaacagatgttgctgagcttgggtatttgccatgatgataatattcttacatgggcaaaaattaactgggctgtagtgtaatggtgctttttatttgttttctgataatgtagttgtctgatattgttgtggcttggatatttgccatgatgatgtattcttatatgtgaaaaattaactgggatgacagtgtaatgctacttccatttgtttttatgataaacggttttgatctgatgttgctgtgct

SEQ ID NO: 13389 - DNA, 670 bp, Zea Mays
cagtgcgctgccgcgtggatgcacgtggcggttgcctccagatctgtgttgccggcttgcggcgtggatgtacacgtggcgtggcggaggatacaaaatgaacagcacaggccagggcacagacgcacgcgtcaggtgcaccgtgcacccgctgaattgaacacctcaccaccatggacatggaggcgcaggcggcaaaggcgagaaccgaggacccgcgacgtcctcccagcgacggcgggccgagaaggcggctgcggtggaggcggagggcgccctgccgctgccgctgccgcacgaacgggtgccgcagccgcgcgacgtgtacaacgagcagctggagcggatgtgaatgcatgttttctgctcggcagtctcgatgaaccccaatcgacccaatgatcgatcgagcgatcctgctacgggtcctctttgattcctagagctctcacctcagcagtggaggaaaaaaactggatgcactggctattatgtgtgtatgttgtgagagtagtggggaggtttccctaaacatttttatgaggtgaacgttagcggtgtcagaaaagctggagtcggtgaagctcaaacagtatatagtacgtaggagatggacctacctaatacgtaggtggagtcagaggagtgtatatatttaacagtatgtaat

SEQ ID NO: 13390 - DNA, 542 bp, Zea Mays
caacaaccaacatcatgtgattttagtgaccttttaaatacatgtatgtaccgctcacccattgctatttaacgcttgcaggaaactcccactgataaagataaagagaaagcttcctcttcaatctcctccaaagaggttcaaacaaggatcattcataatcaaagattccacagaccaaaagacgaggaatgatatatgcaaccacacgaaactaactgagattcaaccattgtatgcattgcaccaccttttgttatcgatcctacccttttgtaactaaatataatgctcgcaagtataaacaacccttcctatgtggtactaaacaccaagatcagtttatgtgatgtaggaccagttttcctatgtggtattaaacaccaggattagtttatgtgatgtaggatcaattttcctatgtggtactaaacaccagtatcagattatgtgatgtaggatcagtttccgtggcgcagctcatatctatttgggctgatggcttattaagaagacatgataactatgtacgttatcagttt

SEQ ID NO: 13391 - DNA, 1839 bp, Zea Mays
gtggatgcacatcttgcgtttggaataattccgcgtccgcagcttagtctgatcgataccgaaatctatcgagcttcaaacgaaggaaaattcccatcggttaaccttacacataaggaagttggagggtcatattatatagttcgtgaaatcgtgagggatatcatccaagagaatagagtccttggtcctggtggcttagatgctatggtgctgaattttgaagattttgctgattcttcagggtcatccatgaagcatgaactgggtcaagacaatatcgagatattagatacgtctggtagtgaagtcagtaagggttatgtgcctgaaatatccaacactgatggatcttttctattgcaagacaatgccatcagcaaccagacactgttgggttcttccaatatcttagaggctggtattttgaatagtgtggtccaaaatgggagtgcagcagatgcaatattcatggaaacaaaccttgagaaacaagatgaagttccatctggtgaatcaattgagtttgacttgaatagttctgaagagcaagctcatttatttgctcaggtttctgattcagatgaaaacattgcactagacagtcaggcggatgcacaggacgtgatggccagtagtgctaccaatagagctattcttcccttagaagcttctgctgtttatgatgctgcacttttaagagatcatgagacattgcctaatgataatcatgatgcatcaactgatagttccgtggatgatgcaagtcacgttgagacgaccaatggtgttcaagcaaagcaagcttctttacatgagcatgatgcatcaactggaaatgtatcgattgaaaatgctcagagcttagatggtcagtttagtaatatatctactgatccaataaatggtgctaaattggaggctgaagttgcaaccaagacagttgaagcgtctaaagtacacaggctgcaagatgggtttgagcaaccattggctgatgctagctgtgatgggcaagaaaactctgacagccctgtttctcatccagcattagatacaaaggggctgttgcacacagaagatcagcagagtgtggtacaggtagatgaaagtgaattcaagaactcaacatctgggatcacaaaggaagatttcaagcatgagcaaggaattagcactgcaacagtgatcagcaggagaactttgaaagctcagcagaagaaagatgacaatctattctggcttgtgcttagggcatttgttgttgctatatcgaaaatctgggcaaaatgaacagtgcagaaaggcagcgtatgtggaactgaagatcgagtgaatccttcctagtggaaaacgagaaaccggtccatgaagttccatttctcccatgtgaatatagatgcgctacttttgtgccgcagtttaagtaatcttttttggagacagctggtctggtttgtagtcgcttcccactgtaggtgaaagaccatgttgggccgtgttcaacatttcacccatatagtcactccaaaacattgttttgcactttaaattgtactgatcgtagagtggattttgaatatgggtacgaggatgggtaagctgacggaaatagcttaaagtttagttatcctagtctggtgttcatgtgttagatgtttggtacaatggatgtcatgtgtcttttggtaaaaggaggatggatctcttttaatgctctatgaaatttgcagatttgttcattggatccacaaataaactgccgttggtttgttcttgttgaggtgaatttaggtttggatttgcctccccggttggagcgtaagcattgtttggttt

SEQ ID NO: 13392 - DNA, 645 bp, Zea Mays
ccgtttcgcgccagcttatatatgtagacaaattattactgtcagtatatgtaacaagacaacaaaatcccggccagtggccagcaaataacgccaccaaataagtcaataacgagttgttcagaaactcgtccgaaaaccacatgtacaaaacaccccagatacagcggcgttacctgcttcttttacatccaaggtaatctaaaacctcctcggtttccctaccctagcagattctaatggaaagcaaatgggcttccggcaacaaagtctgttacacgctaggctagcgaaacatggcgcaacagatgacgttgcgctcggtatctcgtccagtcagcagcaaaggctgagaggcagcgcgtttccccacatgaacagcaggtggtcactgctgtgcttcagcggatgtcaaacctcaaggggagaactctacctgccataatcacggcaatgggttgagcgagaacaggtcctaagctgcacatggggaaaaaggtttcatcgcttccggccctttgatcttgaagcaatcaagcggatggcctgcttccccagctccacgttctcagacctgccattgtctaactgaatacacagtgtgccacccatgacattcgacaccatcccttgatgcctgccaag

SEQ ID NO: 13393 - DNA, 78 bp, Zea Mays
catttgccatcagaagttagatggacttcaatcctctttccgatagcatccttgcccaacttgcgtaggatccaattt

SEQ ID NO: 13394 - DNA, 3178 bp, Zea Mays
ttctcatttcccctagccttccactgcaaactcacattcatcacacactctcgtcgctggacagcgttcatccaccaattcaacgtttgcgccatctcagccttctgtcgtttccatcatggcttgaagctgcagataaggtggatttggagttctgaacggctcagtcaatcattgaacaaaggaagggagtgaaataactgaaggccagaagaatggcagaaggtttgatactagttgtgcttcaaaaaatcgcaaccaccttaggaggagctgcattgagtgtaattaagtcaaaattagggaaaggagccaacattttacttgaagcagagaacagcatgaaagaaattgagagtgagttcgaaataatgcaagcatacataagtcaagcagacccgtacagtgaaagtaacaaaattctgaaaccatggttgaagaatgtaagaaaaatagcttctgaagtcgaggacatcattgatgaatatgcctttctacttggaaaactggacaacgcaggatacttggcgaagaagttccaccattcgagatacatcactgcatggagtgacatttcttctcagttgaagcaagtgcaagcacgcctacaaaatttgacagttctgaaagacagatatggcatcacagtagttggacctggtggtggatcatcaagccataataacagtcgtaagaattacctgtctgaatcttcctacctgaatgatgatggtgatggtgtaatggtaggcaacgaagatgaagtaaagaagttgacagaatgcatagatggtgctggtgcagatcgtgcagttatctccatctggggaatgggcggttcaggaaaaacaatccttgcaaggggcatctatagaaaacgagaagttagaaagaacttccagtgctgtgcctggataacagtatcactgaattatcaagtcgaagaccttttgaacaagctcataaaggaactccacatccaagatgtgcctgatgcaactgacagtacacatttggttgctaggatccagaatcatctcaaggacaagaggtaccttgttgttttggatgacatgtggaacagggagtcttggttattctttgatcgagtatttgtcaagaatctttatggaagtagagtcatcgttaccactcgaacagaagctgttgcgtcaatagctgagctgaaccatactataagaattggccttctttcacagggggagtcatggaagctcttcggcagaaaggcattctcaaagataggcaaggaagaaccgacctgccctcagggccttgttcaatgggcaaacaaaatcctcgagagatgccaaggtctgccacttgctattgtagccatagggagccttctgtcatacagagaaatggaggaacaagagtggagactcttctacaatcaacttaattggcaactgacaaataacccagaactcaacttcgtatcgagcgtcctaaagctaagcttgaatgatcttccaagccacttgaggaattgcttcctgtactgtggcttgttccccaaagactatcaaatacgtcggaagtgtctaatcagactgtgggtagctgaaggttttgtggaagaccggggaacagagattacactggaagaagtggccgaggagtacctcaaggaactcacacggcgttcactgtttcaagtgatggaaaggaatgaattttcacggccaagaagattccaggtgcacgatcttgttagagagatgacactggccatatcaagaaatgagaggtttggtcatgtaagtgaccagccagatgtaacagacattggcgatgtaggaaaacgtgtatcagtgcacagtgggggccaaatctatcagccaggtccgtcttcgcagcatctgcgttcatttttgttgtttgacaaacacgtgccgctttcatggatcagcatcgcttcatcggacttcaaactgttaagagtcctgtgcctcaggtactccctccttgaggacattccagatgccatgacttgtttgttcaatctgcaccatctagactgctctcgtactaaagtaaggaaggtaccaagatcagtggcaaggctgaagaaactagagacattgcatctcaggttcgcccgtgtgagggagttgccgtctgaaataacaatgctcacaaacctccgccacttgtctgtgagtgacgacttgtatggcacatcaatttgtggtactatccgcagtctcaagcacctgcaaactcttcgagaggtgaaagtcaacaaagatttggctaaaagtcttggttacctgacacaactaagaagcttaggaattactggagtcatacaaagccacaatgcagatctttgggcttctatcaggaagatgactgtccttaacaaactagccgtcgcaactcctggcgagagtaacgaagtgcttagttttgaagagctgaggccgctcaagaacctggagaagttctacttgaccggcaagttggcagaagggaagctttttccagtatctaatggttttcagaaacttaaggtcctaacaatgcgctggtctaagctaacacacgaccccctaagttccttatgtcaaatggaaaatctcgtctaccttaatctttactgtgcatacgatggggaatgcttgatcttctcttctgggtggtttccaaagctcaagcaactctacctaggcaagcttgagagactgaggtcaattcaaataagtgatggcgccattgaaaatttaacatacctggaacttcatgagctgtggaatctaaaaagtgtccctgaaggccttgtataccttaggtctcttcagcacttgtatgcacgaaagatgcctgcagatttcgtggaggaactggagggaagttgccagggctttgttcggcacattgccaacattgaatgtatgtgacaacaagctctcctgtccttgtaatgattatatatctttagtttctttagtggttccttgatttccagtgaattgtcatgtaagcgggttgttatattttgggcatctatattttttgttgtgttatgtgtgacaaagaaaactgtatagtagcatgcatattttgttgaataattttcttggttgtgatgagaggtagtgacaacatgtggagtcatgcatgaatgaaaaactaacacgtaatgagtgag

SEQ ID NO: 13395 - DNA, 77 bp, Zea Mays
cttttataaggaaaccactatctaatagttcatccaaataatctgatcctatgtcctctattttcttttgctggata

SEQ ID NO: 13396 - DNA, 711 bp, Zea Mays
cgcagctgggccaacttcagccatttcggcccacttcacccgcgcatgcggcatgcgcgacactgatatcgccttcgtgcggttgcgccgacgcctgggccccacctgtctgacattgtgtggatgtgggtcacgggttcgccgacaagtggggtccacacgctgacttatcctcagaatgtcgcataccctctcggcctcgacactggcaagtggccccggaacagctgcctcagcacgctgcctgaatgaactcgccgagatcgtgcgtggggatctcgccggcgaaccggccctgcagacctcccctcgcctcagcactataaggccacttctctagttttcgatgcgattgaccttaccccattgcccagattaagaaaacctagctgccatcactagagggagagcttagagaggcaagtcagagagcacggcgccacgccgggaaattctaggattggggcgtacctcaccaacactcgcatcgaggtgaccgctttggtgcagggaggtcgggcgtaacactctcacttggtgccggaactgggagcgtcaccaatcgaccgttgattcgagccagggcatagcgaatcctcggctcatcgccgccgggacaaatcgctaccttctgtcttctgtgcgaagagcctctgactgaggatcctggtgcccagcagatagaagttgctgagcaggagctcactgaag

SEQ ID NO: 13397 - DNA, 1061 bp, Zea Mays
gtccgaggctccaagctgtgccgacaaagtgatgaatcacccaaacaaccacactgacatctcatcttgatccatccagctttgcctcgatcgccggccggtagccatgtcccccacggaagaagccgctggtggtggtggcgacgactatgaccgcttgagcgagctgaaggcgttcgacgacagcaaggccggcgtcaagggcctcgtggacgctggcgtcacgaccatccctgccatcttccgcggccatctccttcaggaagggccgaagtcgcacgggaggaggtggtcgcccagttgaaggctgcagccgagacggtggggttcttccagctggtgaaccacggcgttcccagcgagctcctgtgcgagatgctgccgtcggtgaggcggttcaacgaggagccccacgaggtgaagcggccctactacacgcgggacgcacgtcgcaaggactcgcatgcgcagggcggcctgcaggcgctcctcgcatccaggtggctggacgtgcctccggtggccggcgcgctcctggtgaacgtcggagaccttctccagctggtcagcaacgggcggttcaagagcgtggagcaccgggtggtggctaaccggagcagggacacggcgagagtgtcagtggcgtgcttctgcaacgcggacatcgcgagatccacgaggctgtatggacccatcgcggagctcatcgccgcggacgacagcgacggcgcgggaagggcgctgtacaggaacgtgacggtcccggagttcctagcgcactacgacaagaaaggcctcgacggtcgcccggcgctccaccgcttccagctgcttcaataattttacatcacatcagtcctgactctggtgatatcatgtcagtatgtcactgtgggctactccggtactctaatacagttatggatggatcagatcaatactaatctctggtaattttttttaaggatctagaggagtcgaagcccctatagcttaaattaagaacttaaagaaagagttaaggtcttaaggatatacagattcaagaaacaaaaaaaaaa

SEQ ID NO: 13398 - DNA, 875 bp, Zea Mays
gaggctccaagctgtgccgacaaagtgatgaatcacccaaacaaccacactgacatctcatcttgatccatccagctttgcctcgatcgccggccggtagccatgtcccccacggaagaagccgctggtggtggtggcgacgactatgaccgcttgagcgagctgaaggcgttcgacgacagcaaggccggcgtcaagggcctcgtggacgctggcgtcacgaccatccctgccatcttccgcggccatctccttcaggaagggccgaaggactcgcatgcgcagggcggcctgcaggcgctcctcgcatccaggtggctggacgtgcctccggtggccggcgcgctcctggtgaacgtcggagaccttctccagctggtcagcaacgggcggttcaagagcgtggagcaccgggtggtggctaaccggagcagggacacggcgagagtgtcagtggcgtgcttctgcaacgcggacatcgcgagatccacgaggctgtatggacccatcgcggagctcatcgccgcggacgacagcgacggcgcgggaagggcgctgtacaggaacgtgacggtcccggagttcctagcgcactacgacaagaaaggcctcgacggtcgcccggcgctccaccgcttccagctgcttcaataattttacatcacatcagtcctgactctggtgatatcatgtcagtatgtcactgtgggctactccggtactctaatacagttatggatggatcagatcaatactaatctctggtaattttttttaaggatctagaggagtcgaagcccctatagcttaaattaagaacttaaagaaagagttaaggtcttaaggatatacagattcaagaaacaaaaaaaaaa

SEQ ID NO: 13399 - DNA, 2063 bp, Zea Mays
tttaatccccttcatcataaccaaacctttacctgaaacattaaagaaaatagaaaagtggagctatccgattatacatgtaggcttcacagcaaaagaccaaaaaaggataacagaaacacaatctggtggtagacagcaccaggagcccacttagcccttttttagaacactgtgtcagttaaaatataggatcttgtgctccctaatccaggaagtgatacaggggatccctaccgactaggcgattgaatagttgttaaccctctatgaaagagcattaaatacagctacagcaaagaatatatggttctgatccactacaagtgccaacataaataaaagcaaaatcattttctagaaagcgcttcatggtggcaatttcattcaatatggtgatgcctgtaatatcagagaaaaaggattaagatcttcatatctcagtcttggtttttttttcttcttcacaaatcaatgtagaagttgtttggcagtgtgctcccggcctgcaagtcccatgacaaatctttttcttttatatgtgaggactcagattaggtgtgcaatgctcatgttgaaccatatatgcatttgaagggctagatcaggttttgggatataacttcatggataatttatgtattactcaagtgaattgtaacttcggtaatatcagtagtatttcctatttggtacaagcacctctggtttcctatcctgttcttctatataaaatagctatctttcaatttctacttgtagcagtgactccagtaaaatacagcctcaacccaaactggtttgaacaagagaagatacaagtcagtgttctgtttggtcagctgtgtgtgatgcaggaatgcaggatgaactaagaatacaagatgccgtctggtttccatgatgtgtgctttacaaggttatgacattagaatttaacctgcattaatccacctacttaaccttaatttcacttttgcagctcacctttgtccaatttaatcactaatgtagacccccacttgcatagggttgtaagagacccaattttgcgaatcaaactaatcctcacccatgaaaggcaggtaattgtcccaaacacaccaccataccttctctttcattaaaaaaacagatatgctacaagccaaatactccagaaccatccaaatcaccaactaactaatcaactatgggcatacataaatttgaaaacagattaaagatatattagctataaagataacacaaatacccatgcaagtgaagctttttcaggcttagagtctcagcccaatacagcagattagcagtctgactgtaggaatcaaggtttagtcatgtttagtactaaacctctgtgtggttacatggtcagaaatcaggagtcaggagccagtgccaaaataaagtgaatatatcagagaaattttcacccccacatttcaaatccagacatttattgaaaccaaatagtcccgttcccatggttaaaatagagctgaaaacacacatgcatgtaacttaaaatatcccacccgaatcagatcttctgcacaatctgtagaaacttagataacatagcattaatctaacaaaagaaagctctaaatggtgcaattatagaccaaaaaatgtaagcagttcctaagagtagacccagaactgtacaataaagattaaagactacaaattagaccaggcacaaataattggctaccccccagggtgaacaacagaacaatgtccatagcaaaacaatacttatcaaacaaattgtgacgctagaatcgggggaacataacctaagccgcacggagtccagccccatcatcccaagtccgcacctgaggtcctcgaaatggcgccacagccacacgttgcctcgccatcggtgagccataaaccctagcacgaggttgaggttccattcgaacggagaggcaagggatagcggaaacacgggcggcgtgggtttaccgtagccaacgacggcgccgacgagggagcccgcggcggactcccaggcgaagcggaggaggcgtgtcaggatcgggttggag

SEQ ID NO: 13400 - DNA, 1528 bp, Zea Mays
aaaaaattggccacggacaaaggagccacaaacaacaaatcactcccagcaagcacacaccgtaacatcaaagccaacgacgacgcggggccggccgcccatggccttcacgtccttattgggcagcgacgcggagcggaaggtggcggtggcggaggtggcgctgcgggcggtgctgtgcgggctaggcgcgctggcggcggcgctggtggcgacggacacgcagacgcgcaccttcttctccctgcagaagaaggcgacctacacggacatgaaggccatggtgctcctggtggccgccgcggccacggccgccggctacagcctgctgcaggcggcgcgctgctgctgctgcgtcgccctgctgcgcacgtccatccgcccccgcgcccgcctgctgctggcctggtgcgtcttcgcgtgcgaccaggcgctggcgtacgcgctgctggccgccgtcgccgccgcgctgcaggcctccgtcgtcgccaagcaaggcctgccccagctgcagtggatggccatctgcgccctctacggcgccttctgcaggcaggcaggcgccggcgtcgcctgcgccgtcgccgccgccgtcgacgccgccctgctcgccttcctttccgccttcaacctcttcaggctctacggcgccaaggcctagcgcccagcccaccaccacgacgtagctttgttgcattaattagcacagcagaggtgccttccatctgaccatcctctcttgcaaacaccgtaacaccgcgtagtagagtagagattatggagagacaattaataaggtgcgttcaagctttattaacatatataaacgcattactcatcaataaattctacacgcatgtacatgcggcctgcgggccacgcgtcgctgtgggggaacaagtcccttcaagtgcggtgcgagtgcgatgtctcgtttttttttctttcatcaaggtaagtatagtccacaggcgtgcagcaactccactacggattacggaacatcatacatcagtttggtgcaacagaatcaaacgctttcttcctctttgattgatgattgatttcgaacgcacgcacccagctttgcatgattgcgcgtgctatgcatgcattggcggtggcggggacacgtggttggttttgccttctatttcatgatttcaggcccagcgctatatatatgcactttgagctagcctctaacgggacaatctacttctaaaaggtgcttacaagaagctctgctactatgctgggaatcgaggacagggccaggaattcaccacccactaatagtatccctacgcacgcgcgctgtgcaaatactttagtcgagtctggttgacgactaaaacaattcagggatgtttgaatgcactagagataatagttagtgactaaatttagctagagacattcaaacatcttagctaatagttcagctattagatattttttgggccatattctttgcgttgttttttgtttctatccatgtctgctatttggaaataagaaaatctac

SEQ ID NO: 13401 - DNA, 430 bp, Zea Mays
gcgccagattgctctcccctgccgagacctccaaaacagaatcgcaccaaccccgtcgggctcctcggcctccccttatgcagactcctcacccctgggctataaagaaatccgagcgccatgccccctgctcaccagaacagaaccaagaacacaggatatctcgataccattgcaggaggggatggatcaccatgggagaaagtggggacgccgcgagcaggattcgttgagcacgacatcgtgatttccggtcgagaacaggtaccacataatgaggcgcatgaaggaattctacgatgagttcgtgagtggtctaggtcgtcgtctcccagtcaactttgggttgctggatcattgtcttcgtatgatgtaattatttaactattttgtacagaactgtgttatatattaatgatgtgacattcat

SEQ ID NO: 13402 - DNA, 1269 bp, Zea Mays
ctccaaaacagaatcgcaccaaccccgtcgggctcctcggcctccccttatgcagactcctcacccctgggctataaagaaatccgagcgccatgccccctgctcaccagaacagaaccaagaacacaggatatctcgataccattgcaggaggggatggatcaccatgggagaaagtggggacgccgcgagcaggattcgttgagcacgacatcgtgatttccggtaacaacccctcccatagattctctttgagcctagctttgttttgatgtgtttcgcttagagcaccgggcaccgtatcggcaacggaccaatcaccggtgaagctctgtcgtatgggggcggcgacgccgctgctctggtcgtggcgggcaagggggaagtgccttaaacgtggattaaaggatgaacggttgagattaggcctgtgcataccattttgtggggtgatctgagctactgatcgatgacggacgaatgagatctaatcggggagtctgttaattcctgctcgttgattcgggatagcacaagtgagatcgaatctcagctatttttaattgcgatcgtagatctcggatctgacggcttgtttagcgtaccatttcggtttatgaaaattttaatcttgaccgttgaaagtcgcctataggggggtggataggcgaatcctgaaaattataactttacaccccaactagatcccttgcttagtggttagaacaagacacaaaattatcgaagtataaaaactaagtcctttgcttgcaatgggtattgtattcaaagagtacggaatttaattaataacaatactactagagatggtggagaataatgcaagagggcttaaataagaagagtagcacaagttctttcttgcaaggagttgcttctctaaatgtgattttaacttgaagcaacacaaaaggatattaacaaagagtagcgcaagagaacttagaaagagagagaacaaacaaatcacaagcaataaacacacgagacacgggtgatttgttttaccgaggttcggccctcgatggcctagtccccgttgaggagtccactaaggacgggtctctttcaaccctttccctctctcaaccgatccccaagatcagcgagctcttcttcttctcaaggatcacttaagaccccgcaaggatcgccacacacttaggtgtctcttgctagctttacaagcctccaaaactttggaggaagttcaatgggagtcaaaactccacgcacaatgaacgcaag

SEQ ID NO: 13403 - DNA, 2128 bp, Zea Mays
aggagttacaggactgcgacaaattttaatctcgcacccgtaagtggcgacgaatctcgcggtgcggaggcgcgacagaggcggtgtcgactccgacggactcgcagctaccggtggagacgccccaccggcgcactcctccaacgttcatagtttaagggcttgatttggataattagtcatcaacagaagtgataaaaaatggtggttcttgcagcatcaatcgtttcaaagtcgggaaaagcacttgtttcaagacagtttgttgacatgtctcgcataagaattgaaggattacttgctgcgttcccaaaactggttggaactgggaagcagcacacttatgtcgaaactgaaaatgtgcgatatgtttatcaacctattgaaggtttatatcttctacttatcacaaacaagcagagcaatattcttgaagatctggacactttgaggctcctctccaagctcgtgcctgaatactccccttcattggatgaggagggtatttgtaaaacagcatttgagattatatttgctttcgatgaagccatatctcttgggaacaaggaaaatgtaacagtgcaacaagtcaaacaatattgtgagatggagagccatgaagagaaggcacacaagctgatgatgcaaaccaaaatcaatgaaaccaaggatctcatgaagaagagggctaatgagcttgacaaaatgaggatggaaagaggcaaacttgacaaaggaggatactcatcaatatctggtccacgcgtgattgaaaaaactttcagtgacatgagcatcagtggttctggattaggtggactgagcactgacatggactcatttgctagcaagcccaaaggccgtccatctacagcagctactgcacctggtaaaggttttggtatgaaattaggcaagacacagaagacaaatcaattccttgaatctttgaaagccgaaggagaagtcattttggaggatgtacaaccaagtgcagtttctacaagatcatctgctcttccaagtgaccctgtcacagtaactatagaagagaagctcaatgttgttgttaaaagagatggtggtattaataactttgatgttcaaggaacacttgctcttcaggttctcaatgatactgatgggttcatccaattgcagattgaaagccaagatattcctgggcttagcttcaaaacacacccaaatatcaacaaggatttgtttaacagtcagcaaattttgggagcaaaagatccaaacaggccttttccgagtggtcaaaatgaaactcctctggtgaaatggagaatccaggggatggatgagtcatctttacctctgtcagtcaattgctggccgtctgtatctggaaatgaaacctatgtgaacattgaatatgaagcttctgagatgtttgatctgcacaatgttgtcatatctatacctctgcccgcagttcgggaggctccaagtgtcagacagatagatggagagtggaagttggactcaagaaactctgtgttggaatggtctattctccttattgatcagtcaaatcgcagtggttccatggaatttgttgttcccccagctgatccgtcatcatttttccccatctctgttggattttctgcatcgagtactttcagtgatctgaaggttactggaatccttcctctgaaggaaggcaaccctccgaagttttcccagcgggctcgtttgctcacagctaactatcaagttgtttaatggttgtaccgttgtccgagtgttgatccacttaaatatattcgaatagcatatttttgtgacatggcatgctactggcatgaacttttgcaagtcatgggatggaagatcattttgggttttgaaaacctttactatgtgcttctcattgttagcatgttgcacaaatgctctgatgtgttgctaccagagaaataagtaatgttcttgcctttcgtttgcctgcattttgtacccgttctttccccttgaggataatcttgtaaggacgatgttatcgtctgggcttgtgtaatgtgatctgctggtggaagagcatctccaccggaacccttatcccttctataataactaacaaggtacaaggtcatctcca

SEQ ID NO: 13404 - DNA, 2075 bp, Zea Mays
ataattcacattcagttttttcatttttaaaacgagtgtgacatgaatgctctagatttagcacacctagtacttgtttgagcacgtcgcctaataaaattccccattccaatacacagatctcgcacccgtaagtggcgacgaatctcgcggtgcggaggcgcgacagaggcggtgtcgactccgacggactcgcagctaccggtggagacgccccaccggcgcactcctccaacgttcatagtttaagggcttgatttggataattagtcatcaacagaagtgataaaaaatggtggttcttgcagcatcaatcgtttcaaagtcgggaaaaggtttatatcttctacttatcacaaacaagcagagcaatattcttgaagatctggacactttgaggctcctctccaagctcgtgcctgaatactccccttcattggatgaggagggtatttgtaaaacagcatttgagattatatttgctttcgatgaagccatatctcttgggaacaaggaaaatgtaacagtgcaacaagtcaaacaatattgtgagatggagagccatgaagagaaggcacacaagctgatgatgcaaaccaaaatcaatgaaaccaaggatctcatgaagaagagggctaatgagcttgacaaaatgaggatggaaagaggcaaacttgacaaaggaggatactcatcaatatctggtccacgcgtgattgaaaaaactttcagtgacatgagcatcagtggttctggattaggtggactgagcactgacatggactcatttgctagcaagcccaaaggccgtccatctacagcagctactgcacctggtaaaggttttggtatgaaattaggcaagacacagaagacaaatcaattccttgaatctttgaaagccgaaggagaagtcattttggaggatgtacaaccaagtgcagtttctacaagatcatctgctcttccaagtgaccctgtcacagtaactatagaagagaagctcaatgttgttgttaaaagagatggtggtattaataactttgatgttcaaggaacacttgctcttcaggttctcaatgatactgatgggttcatccaattgcagattgaaagccaagatattcctgggcttagcttcaaaacacacccaaatatcaacaaggatttgtttaacagtcagcaaattttgggagcaaaagatccaaacaggccttttccgagtggtcaaaatgaaactcctctggtgaaatggagaatccaggggatggatgagtcatctttacctctgtcagtcaattgctggccgtctgtatctggaaatgaaacctatgtgaacattgaatatgaagcttctgagatgtttgatctgcacaatgttgtcatatctatacctctgcccgcagttcgggaggctccaagtgtcagacagatagatggagagtggaagttggactcaagaaactctgtgttggaatggtctattctccttattgatcagtcaaatcgcagtggttccatggaatttgttgttcccccagctgatccgtcatcatttttccccatctctgttggattttctgcatcgagtactttcagtgatctgaaggttactggaatccttcctctgaaggaaggcaaccctccgaagttttcccagcgggctcgtttgctcacagctaactatcaagttgtttaatggttgtaccgttgtccgagtgttgatccacttaaatatattcgaatagcatatttttgtgacatggcatgctactggcatgaacttttgcaagtcatgggatggaagatcattttgggttttgaaaacctttactatgtgcttctcattgttagcatgttgcacaaatgctctgatgtgttgctaccagagaaataagtaatgttcttgcctttcgtttgcctgcattttgtacccgttctttccccttgaggataatcttgtaaggacgatgttatcgtctgggcttgtgtaatgtgatctgctggtggaagagcatctccaccggaacccttatcccttctataataactaacaaggtacaaggtcatctcca

SEQ ID NO: 13405 - DNA, 1761 bp, Zea Mays
ggcataataacagacagccaaatttgagagtggcaaaacagcaaatttctcctcccctccctagtccctaccaaattcgccaccatccccatctatattatccagtcctctgctcatcctatacctttgctttgcctctccttcacttcacttcaactccatcgcccgttgcagcggcggcggcggcaatcatatcacccagacgcggacgccatagtagattagattgatctctccgtggggaggaagaggagcaagagccatgtccagccccacgcacgtccgcaaggccatccgcttcgcctccctgcgggcaaagatcgcgcagcagggcgcaggaatatcaccaggacgccgcgccggagtgcggcaaggggaacgcgggcctgccgctggcggtggcggaggcgctggtgcactacaccacctcgaacgtgacgccgcagcagaccgcggacgagatcggggtgtcgctgcgcgtgctgcagcgccgcgcgccctgcaacttcctcgtcttcgggctgggcctcgacagccctatgtgggcggcgctgaaccacggcggccgcaccgtgttcctggaggaggacgcgtcgtggatcgccagcgtgcgttccaagcacccggggctcgagtcctaccacgtcgcctacgacaccgtgctcaccgacgccgactcgctcctggggctccgcgaccacccggcctgcgtcgcgcagccagacctcgccgccgccgccgccgcgtcctgccgcctcgcgctcgccctcaagggcctcccgcccgtcttccacgaactggagtgggacctcgtcatggtcgacgcgcccacggggtggacgccgcaggcgcccggacggatggccgccatctacaccgccggcatggcggcgcgcgcgcgcaggcccggggacggacccaccgacgtcttcgtgcacgacgtcgaccgacccgtcgaggacaacttctccaaggcgttcctgtgcgagggatacctcgccgagcaggtcggccggatcaggcacttcgtcatcccgtcccaccgtgagaaggacggcacaccattctgcccttgacaatctttattttgattctttgagagtttgagtgagagccatccatccataatccatctctctttttttttttgcttttcctgcgctctgccttggctttatttacatacatatatatgagacgaaaaaacactacagcatgcatatgcagcagccgtcagcaactggagctccttcatcattctttctaattttgcgggtgaaccacaccatgatggagttaagaggcgggtctgcgcacgccgcccgatcaggaagtggactcgccagattcgacgtcggatgcattaattattctatcttctttgattgttctgctttggatcggcggtgcacgttggctgatggtggttcatcaagaggtggagcttgtgatgtgacgtgggcgtcgtagccaaactatggtcatttctgcatttttttgaaaagaaagatattaagagttttcaaaaaccatacaatagagttgaagcaaagtcttggaaagcatcttccgaccactgttttgcaagtaaacacacatccaacaaaaaggagactctaaacacactctagtgacccttaatcttaagactagacggccacccatgtgcccaggagaaaatatccatagccactcgcgcttagaaatgtgatgcctccatagcaagatcttgtgaattcgagcatcggtggatagccaaag

SEQ ID NO: 13406 - DNA, 1635 bp, Zea Mays
atttgagagtggcaaaacagcaaatttctcctcccctccctagtccctaccaaattcgccaccatccccatctatattatccagtcctctgctcatcctatacctttgctttgcctctccttcacttcacttcaactccatcgcccgttgcagcggcggcggcggcaatcatatcacccagacgcggacgccatagtagattagattgatctctccgtggggaggaagaggagcaagagccatgtccagccccacgcacgtccgcaaggccatccgcttcgcctccctgcgggcaaagatcgcgcagcagggtaagacaggcctggcgctgcgcctgctcctcgccgccgcactcgccggcttcctcctcgtgttcgccgcgcgcaccctggtcacgccgtcccctgccccgacctcgtcgtcccaggcgcaggaatatcaccaggacgccgcgccggagtgcggcaaggggaacgcgggcctgccgctggcggtggcggaggcgctggtgcactacaccacctcgaacgtgacgccgcagcagaccgcggacgagatcggggtgtcgctgcgcgtgctgcagcgccgcgcgccctgcaacttcctcgtcttcgggctgggcctcgacagccctatgtgggcggcgctgaaccacggcggccgcaccgtgttcctggaggaggacgcgtcgtggatcgccagcgtgcgttccaagcacccggggctcgagtcctaccacgtcgcctacgacaccgtgctcaccgacgccgactcgctcctggggctccgcgaccacccggcctgcgtcgcgcagccagacctcgccgccgccgccgccgcgtcctgccgcctcgcgctcgccctcaagggcctcccgcccgtcttccacgaactggagtgggacctcgtcatggtcgacgcgcccacggggtggacgccgcaggcgcccggacggatggccgccatctacaccgccggcatggcggcgcgcgcgcgcaggcccggggacggacccaccgacgtcttcgtgcacgacgtcgaccgacccgtcgaggacaacttctccaaggcgttcctgtgcgagggatacctcgccgagcaggtcggccggatcaggcacttcgtcatcccgtcccaccaattttgcgggtgaaccacaccatgatggagttaagaggcgggtctgcgcacgccgcccgatcaggaagtggactcgccagattcgacgtcggatgcattaattattctatcttctttgattgttctgctttggatcggcggtgcacgttggctgatggtggttcatcaagaggtggagcttgtgatgtgacgtgggcgtcgtagccaaactatggtcatttctgcatttttttgaaaagaaagatattaagagttttcaaaaaccatacaatagagttgaagcaaagtcttggaaagcatcttccgaccactgttttgcaagtaaacacacatccaacaaaaaggagactctaaacacactctagtgacccttaatcttaagactagacggccacccatgtgcccaggagaaaatatccatagccactcgcgcttagaaatgtgatgcctccatagcaagatcttgtgaattcgagcatcggtggatagccaaag

SEQ ID NO: 13407 - DNA, 1578 bp, Zea Mays
caaatttctcctcccctccctagtccctaccaaattcgccaccatccccatctatattatccagtcctctgctcatcctatacctttgctttgcctctccttcacttcacttcaactccatcgcccgttgcagcggcggcggcggcaatcatatcacccagacgcggacgccatagtagattagattgatctctccgtggggaggaagaggagcaagagccatgtccagccccacgcacgtccgcaaggccatccgcttcgcctccctgcgggcaaagatcgcgcagcagggtaagacaggcctggcgctgcgcctgctcctcgccgccgcactcgccggcttcctcctcgtgttcgccgcgcgcaccctggtcacgccgtcccctgccccgacctcgtcgtcccaggcgcaggaatatcaccaggacgccgcgccggagtgcggcaaggggaacgcgggcctgccgctggcggtggcggaggcgctggtgcactacaccacctcgaacgtgacgccgcagcagaccgcggacgagatcggggtgtcgctgcgcgtgctgcagcgccgcgcgccctgcaacttcctcgtcttcgggctgggcctcgacagccctatgtgggcggcgctgaaccacggcggccgcaccgtgttcctggaggaggacgcgtcgtggatcgccagcgtgcgttccaagcacccggggctcgagtcctaccacgtcgcctacgacaccgtgctcaccgacgccgactcgctcctggggctccgcgaccacccggcctgcgtcgcgcagccagacctcgccgccgccgccgccgcgtcctgccgcctcgcgctcgccctcaagggcctcccgcccgtcttccacgaactggagtgggacctcgtcatggtcgacgcgcccacggggtggacgccgcaggcgcccggacggatggccgccatctacaccgccggcatggcggcgcgcgcgcgcaggcccggggacggacccaccgacgtcttcgtgcacgacgtcgaccgacccgtcgaggacaacttctccaaggcgttcctgtgcgagggatacctcgccgagcagaattttgcgggtgaaccacaccatgatggagttaagaggcgggtctgcgcacgccgcccgatcaggaagtggactcgccagattcgacgtcggatgcattaattattctatcttctttgattgttctgctttggatcggcggtgcacgttggctgatggtggttcatcaagaggtggagcttgtgatgtgacgtgggcgtcgtagccaaactatggtcatttctgcatttttttgaaaagaaagatattaagagttttcaaaaaccatacaatagagttgaagcaaagtcttggaaagcatcttccgaccactgttttgcaagtaaacacacatccaacaaaaaggagactctaaacacactctagtgacccttaatcttaagactagacggccacccatgtgcccaggagaaaatatccatagccactcgcgcttagaaatgtgatgcctccatagcaagatcttgtgaattcgagcatcggtggatagccaaag

SEQ ID NO: 13408 - DNA, 825 bp, Zea Mays
gttctatgttcgatctgtatcacgggaagcacatctgctggcctacaccagattcttccatggttgtattatcacaatgtcattggtgtttcacatttctttctattagttgaaggagaggctgcaaagccagctgtcacctctgttcttgaatctattcaggatgctagaatggattggatcattcacctcgatactgatgagttgattcatcaagctggtgcccgagagtactccctgaggcgattgcttttagatgttcctgacaacgttgacatggttatcttccccaattatgaaagcagcattgaccgtatgacattaaggatccttttactgaggcctttataattgcatcgacagcaactgaggaggagatggggaactggtaccgggaacataactatgccccatggctatcattcgtggcctcaaggaacccgacgtctttaccaatgcagtaacatcagcgaaagcacagtcgaaaacgaagccgtcaaacatgggtctcggaaacaaggaggctatggatccaaccgaacgtaactgctggtcagtccacactggaaggtggtcacgagaggttacaggcaaccgtaagaaagatcttggaaatggtggacgcccaggaacaggaagaagcaatgccgccgaggccgtcccctggtttgctcgagctctcggaacgcgccactgctttgtcatgacgacttgacgacgctgtgaggttctggaggcgttattaagcatggactcgggttgtttaaccatgctaggtgatacagcgcccgatagggcgctattttttctagtgaatattcatat

SEQ ID NO: 13409 - DNA, 3746 bp, Zea Mays
ggcttttataattttggttcgctcgaaataaattcaacacgtttaaatatttacgtacagaccgtgagctgaggactaggctagtgggtcgactcggtacgacctgaaattcaaaaaaaagacctgcgggcttgggccgggcgggacggcccgaatgtacctccggatacagacgtgtcatccacccacccatttgcttcccctctgcagctctgctctgtttgcttactcttcccttccatggcggcatacgccggaaccctagttccacccttcctcaccgtccgcctcgcggtctcccacctcagatccattaccccggggtcctactccctgagccactgtctcccccgcctcgcggtcgcccgtgcggcctcccgcggaaacggagacggcgacggcgggcctccagcggagggggagaaggagcgccggcgctcgtcactcccagcgctgtcggagatccggtggggggagctgctatccccggaccccaccaacgccgtggctgtggtgctcacgggcgcgctcgtatgggctggcgcctcactgctgctgcagctcgcgctcatctccgcggcaatctttgccgccgctgtcaagtactcgtttgtcgccgcgctcctgttattcgtccttatcgcgctgctgtgatcgatccgccttaaggaaaaaagctgtaaattcgcacgaagcattcggatggaagatcaggtagaggaaaaaacagaggatttcaaatgtttccatttttgtatggagcagtagaaaatatttgtctgccagtgccaactgccaagtgcttaaaatttttctgcacactgagatatttggattgcaaattagtctcagcaaacaggggatacctaagaagaacaaccagaataaagtgctgttcaattcaaatgtttattcaatatacaaacgtgctatctgaaaccagaatgatgaaaatatcaatacatgggtgtcttacagacaaacacaccaaataacatcaacaccagttattccagaatgactatattgtagattagaaactctcatttgtgttgtaatgcatcaaatatgaagacctagaaaagaccaacgacaacgacgatgaagctttttctggtatcaacctagccaatggagatgaaaccagaaaagaccaatctgttgtttataaattcattgtgctcattttccttctgttggagaacttcgtttgctgctttcaggatgcattcctgtatacataaaaaatattacctgacattgaaagctcgggatttttttctcgaaagcgcaagagagctgcgcgaaaatatattaagaaggagataaaggtccaaaaggaccccaagataccaaaataaagctcgggattttgaaattgccttttaataatttaatgtagttaacatatttcctgcctaaatctgttttttaaatttgtgcctgcagtttatgctattatgtaagttgagaatttcatttccgagaaatattgcaaaataccttctgttgaagaattttatttgctgatttaagtatgctttcctgcacatcaagaaaatgtattgttatcttctattttacttctgtcacagaccccctttttgttatcaaggaagattatgagacattgatactgaccttatttttaagaaagtgaatttcttgctgcatgatctgcatctggtaaaagatgtctcacattagtttgttgtgtaatctgaacgagtttagaaataagaagggggatacagttgtcttgcctttgtggaacatgtccggtaataccacaattcaagacctttctcaagcacatgcattctctccagtctcatgtcctctgttccccctccagtggatctgctttgattcatgtgtcagtttttttatatgttagatggttcatcatgtctggtagtctaaatgcctcattaaatcgtattttaattcaaaagtttcttgattattagaataggaagtttcgtgattgttctaacagttagagctaatacacaagtgtggatgttatttctgttttgctagtattaacttcctgttgttgagtatcttggtgatgtttactactcccttggtcctgatatataaggcgtaaccacctctgattcaattaccaaggaacatatttaatttcctctctcaacactagtactactgcatcgatttaccgacatctagagacagagagagtatcccttgtattataaaagcggtttcacattatatattaagacgaagggagtagtctacttggctttaccatgtaggaagtgtttcaaaactcttttattgcccattgaaacacttgactgcaatagtagacagtagtataccagtaaggccctatatacctaacagtcagttctaaggtttttctgtttcaattatttgtgcagcaattgagagattgaaaacaaagtgccacaattaaaggcttcatacagctttgtcagcattttgtatgtaatgtattacttcgcatgtttgtcatgccgtgttggagttgtacttagatagttcatgatagatatttttggaatgaaatgtacaccggggagggcctcactgtgaattcatgatagattagcaagcaggatgaacatttgctgaagttttttttttttgctgaattcatgatatagattagcaagcaagatgcaattcattcatggggttgtcatcttgaacatgaaaccttaccttaaattaaatcatgccgcagtagacatatctcttcctttaacaaggaaacccaatgttccattacctgttaagcataaaaatatttattttagtattagatcagaggttgggatatgtttttacttaaaaaggtttaatctgtttactcacgccccttactcatgctcaaattacacactcatgctatccttggttagttggttacatttcaatgtgatgcattcacttgaagaggtagtataacatctctaatagattcatagatatgactttgtagattttttgctcaaaatatccaaagagaaaggtagactggcttcgtagatttttgctttccatttgacctgttgctgtgatgctctggtacctctcaaccaagctttgcatatttcttgcattttgagtgtaagggaaaacatctaagaagttatgtcgcacttaagattcacatataacaacataaattcttggacatcccctgtagaggaaaatatgattccacctacatcaaaccacagagcactgacagttattttgccttcttgagcaacccttacgggctcttgggtccacagagcaccttcaattcgttgcattatcaccttccttcggtccattgtttcgtcactaactgcacctacagttttgattggcctcgcagatttaatttgcagaggtggcactcgtggcaaacagacactgactttgctttcctctgaagccgaatacacatgcattgacatggcctgcttttatatagcaatccaccttgtaagaaatatgacctttgggttacttgcatagctgtgggccgccccacatgaaactatgaaagcatctcgctggccactgtacatctttatttaagctctgtaaattcttatgaatattgtaatatgatatagtttgtatacttgtgttatgattaagtgaactcatcttgtaagatcctgttcggctgttcctgcgtgtaaggagaatttgttgttattgcttaccttgaacataacggcatgtgatgttta

SEQ ID NO: 13410 - DNA, 1116 bp, Zea Mays
ggcttttataattttggttcgctcgaaataaattcaacacgtttaaatatttacgtacagaccgtgagctgaggactaggctagtgggtcgactcggtacgacctgaaattcaaaaaaaagacctgcgggcttgggccgggcgggacggcccgaatgtacctccggatacagacgtgtcatccacccacccatttgcttcccctctgcagctctgctctgtttgcttactcttcccttccatggcggcatacgccggaaccctagttccacccttcctcaccgtccgcctcgcggtctcccacctcagatccattaccccggggtcctactccctgagccactgtctcccccgcctcgcggtcgcccgtgcggcctcccgcggaaacggagacggcgacggcgggcctccagcggagggggagaaggagcgccggcgctcgtcactcccagcgctgtcggagatccggtggggggagctgctatccccggaccccaccaacgccgtggctgtggtgctcacgggcgcgctcgtatgggctggcgcctcactgctgctgcagctcgcgctcatctccgcggcaatctttgccgccgctgtcaagtactcgtttgtcgccgcgctcctgttattcgtccttatcgcgctgctgtgatcgatccgccttaagaattttcgtcattatcacaggaaaaaagctgtaaattcgcacgaagcattcggatggaagatcagttttgattggcctcgcagatttaatttgcagaggtggcactcgtggcaaacagacactgactttgctttcctctgaagccgaatacacatgcattgacatggcctgcttttatatagcaatccaccttgtaagaaatatgacctttgggttacttgcatagctgtgggccgccccacatgaaactatgaaagcatctcgctggccactgtacatctttatttaagctctgtaaattcttatgaatattgtaatatgatatagtttgtatacttgtgttatgattaagtgaactcatcttgtaagatcctgttcggctgttcctgcgtgtaaggagaatttgttgttattgcttaccttgaacataacggcatgtgatgttta

SEQ ID NO: 13411 - DNA, 4128 bp, Zea Mays
ggcttttataattttggttcgctcgaaataaattcaacacgtttaaatatttacgtacagaccgtgagctgaggactaggctagtgggtcgactcggtacgacctgaaattcaaaaaaaagacctgcgggcttgggccgggcgggacggcccgaatgtacctccggatacagacgtgtcatccacccacccatttgcttcccctctgcagctctgctctgtttgcttactcttcccttccatggcggcatacgccggaaccctagttccacccttcctcaccgtccgcctcgcggtctcccacctcagatccattaccccggggtcctactccctgagccactgtctcccccgcctcgcggtcgcccgtgcggcctcccgcggaaacggagacggcgacggcgggcctccagcggagggggagaaggagcgccggcgctcgtcactcccagcgctgtcggagatccggtggggggagctgctatccccggaccccaccaacgccgtggctgtggtgctcacgggcgcgctcgtatgggctggcgcctcactgctgctgcagctcgcgctcatctccgcggcaatctttgccgccgctgtcaagtactcgtttgtcgccgcgctcctgttattcgtccttatcgcgctgctgtgatcgatccgccttaaggaaaaaagctgtaaattcgcacgaagcattcggatggaagatcaggtagaggaaaaaacagaggatttcaaatgtttccatttttgtatggagcagtagaaaatatttgtctgccagtgccaactgccaagtgcttaaaatttttctgcacactgagatatttggattgcaaattagtctcagcaaacaggggatacctaagaagaacaaccagaataaagtgctgttcaattcaaatgtttattcaatatacaaacgtgctatctgaaaccagaatgatgaaaatatcaatacatgggtgtcttacagacaaacacaccaaataacatcaacaccagttattccagaatgactatattgtagattagaaactctcatttgtgttgtaatgcatcaaatatgaagacctagaaaagaccaacgacaacgacgatgaagctttttctggtatcaacctagccaatggagatgaaaccagaaaagaccaatctgttgtttataaattcattgtgctcattttcctggcagtaaaaaatgagcttgtcagttacctgtaccattagcatcttctacttttctaatgaaagtatgacctttatttgcaatcaaatggagagtgtgatctgccccttgtaaaatttgcaatcaatgaagagtatgatctgccccttataaatgtggagtttgttttggtaggtactaccttttgaagttgggtggttttcaataaagcctgaatttaggattcagttttgtaatttatatcttcctccttattgcaggtttaaaattttaatttgtagttcatgatagctatgcatggacacaataatatgtaagactaagtaatgaccatttgccaagggaatactgcaaactgtctatctaagtatctattgttaccttctgttggagaacttcgtttgctgctttcaggatgcattcctgtatacataaaaaatattacctgacattgaaagctcgggatttttttctcgaaagcgcaagagagctgcgcgaaaatatattaagaaggagataaaggtccaaaaggaccccaagataccaaaataaagctcgggattttgaaattgccttttaataatttaatgtagttaacatatttcctgcctaaatctgttttttaaatttgtgcctgcagtttatgctattatgtaagttgagaatttcatttccgagaaatattgcaaaataccttctgttgaagaattttatttgctgatttaagtatgctttcctgcacatcaagaaaatgtattgttatcttctattttacttctgtcacagaccccctttttgttatcaaggaagattatgagacattgatactgaccttatttttaagaaagtgaatttcttgctgcatgatctgcatctggtaaaagatgtctcacattagtttgttgtgtaatctgaacgagtttagaaataagaagggggatacagttgtcttgcctttgtggaacatgtccggtaataccacaattcaagacctttctcaagcacatgcattctctccagtctcatgtcctctgttccccctccagtggatctgctttgattcatgtgtcagtttttttatatgttagatggttcatcatgtctggtagtctaaatgcctcattaaatcgtattttaattcaaaagtttcttgattattagaataggaagtttcgtgattgttctaacagttagagctaatacacaagtgtggatgttatttctgttttgctagtattaacttcctgttgttgagtatcttggtgatgtttactactcccttggtcctgatatataaggcgtaaccacctctgattcaattaccaaggaacatatttaatttcctctctcaacactagtactactgcatcgatttaccgacatctagagacagagagagtatcccttgtattataaaagcggtttcacattatatattaagacgaagggagtagtctacttggctttaccatgtaggaagtgtttcaaaactcttttattgcccattgaaacacttgactgcaatagtagacagtagtataccagtaaggccctatatacctaacagtcagttctaaggtttttctgtttcaattatttgtgcagcaattgagagattgaaaacaaagtgccacaattaaaggcttcatacagctttgtcagcattttgtatgtaatgtattacttcgcatgtttgtcatgccgtgttggagttgtacttagatagttcatgatagatatttttggaatgaaatgtacaccggggagggcctcactgtgaattcatgatagattagcaagcaggatgaacatttgctgaagttttttttttttgctgaattcatgatatagattagcaagcaagatgcaattcattcatggggttgtcatcttgaacatgaaaccttaccttaaattaaatcatgccgcagtagacatatctcttcctttaacaaggaaacccaatgttccattacctgttaagcataaaaatatttattttagtattagatcagaggttgggatatgtttttacttaaaaaggtttaatctgtttactcacgccccttactcatgctcaaattacacactcatgctatccttggttagttggttacatttcaatgtgatgcattcacttgaagaggtagtataacatctctaatagattcatagatatgactttgtagattttttgctcaaaatatccaaagagaaaggtagactggcttcgtagatttttgctttccatttgacctgttgctgtgatgctctggtacctctcaaccaagctttgcatatttcttgcattttgagtgtaagggaaaacatctaagaagttatgtcgcacttaagattcacatataacaacataaattcttggacatcccctgtagaggaaaatatgattccacctacatcaaaccacagagcactgacagttattttgccttcttgagcaacccttacgggctcttgggtccacagagcaccttcaattcgttgcattatcaccttccttcggtccattgtttcgtcactaactgcacctacagttttgattggcctcgcagatttaatttgcagaggtggcactcgtggcaaacagacactgactttgctttcctctgaagccgaatacacatgcattgacatggcctgcttttatatagcaatccaccttgtaagaaatatgacctttgggttacttgcatagctgtgggccgccccacatgaaactatgaaagcatctcgctggccactgtacatctttatttaagctctgtaaattcttatgaatattgtaatatgatatagtttgtatacttgtgttatgattaagtgaactcatcttgtaagatcctgttcggctgttcctgcgtgtaaggagaatttgttgttattgcttaccttgaacataacggcatgtgatgttta

SEQ ID NO: 13412 - DNA, 2066 bp, Zea Mays
ggcttttataattttggttcgctcgaaataaattcaacacgtttaaatatttacgtacagaccgtgagctgaggactaggctagtgggtcgactcggtacgacctgaaattcaaaaaaaagacctgcgggcttgggccgggcgggacggcccgaatgtacctccggatacagacgtgtcatccacccacccatttgcttcccctctgcagctctgctctgtttgcttactcttcccttccatggcggcatacgccggaaccctagttccacccttcctcaccgtccgcctcgcggtctcccacctcagatccattaccccggggtcctactccctgagccactgtctcccccgcctcgcggtcgcccgtgcggcctcccgcggaaacggagacggcgacggcgggcctccagcggagggggagaaggagcgccggcgctcgtcactcccagcgctgtcggagatccggtggggggagctgctatccccggaccccaccaacgccgtggctgtggtgctcacgggcgcgctcgtatgggctggcgcctcactgctgctgcagctcgcgctcatctccgcggcaatctttgccgccgctgtcaagtactcgtttgtcgccgcgctcctgttattcgtccttatcgcgctgctgtgatcgatccgccttaagaattttcgtcattatcacaggaaaaaagctgtaaattcgcacgaagcattcggatggaagatcagcaattgagagattgaaaacaaagtgccacaattaaaggcttcatacagctttgtcagcattttgtatgtaatgtattacttcgcatgtttgtcatgccgtgttggagttgtacttagatagttcatgatagatatttttggaatgaaatgtacaccggggagggcctcactgtgaattcatgatagattagcaagcaggatgaacatttgctgaagttttttttttttgctgaattcatgatatagattagcaagcaagatgcaattcattcatggggttgtcatcttgaacatgaaaccttaccttaaattaaatcatgccgcagtagacatatctcttcctttaacaaggaaacccaatgttccattacctgttaagcataaaaatatttattttagtattagatcagaggttgggatatgtttttacttaaaaaggtttaatctgtttactcacgccccttactcatgctcaaattacacactcatgctatccttggttagttggttacatttcaatgtgatgcattcacttgaagaggtagtataacatctctaatagattcatagatatgactttgtagattttttgctcaaaatatccaaagagaaaggtagactggcttcgtagatttttgctttccatttgacctgttgctgtgatgctctggtacctctcaaccaagctttgcatatttcttgcattttgagtgtaagggaaaacatctaagaagttatgtcgcacttaagattcacatataacaacataaattcttggacatcccctgtagaggaaaatatgattccacctacatcaaaccacagagcactgacagttattttgccttcttgagcaacccttacgggctcttgggtccacagagcaccttcaattcgttgcattatcaccttccttcggtccattgtttcgtcactaactgcacctacagttttgattggcctcgcagatttaatttgcagaggtggcactcgtggcaaacagacactgactttgctttcctctgaagccgaatacacatgcattgacatggcctgcttttatatagcaatccaccttgtaagaaatatgacctttgggttacttgcatagctgtgggccgccccacatgaaactatgaaagcatctcgctggccactgtacatctttatttaagctctgtaaattcttatgaatattgtaatatgatatagtttgtatacttgtgttatgattaagtgaactcatcttgtaagatcctgttcggctgttcctgcgtgtaaggagaatttgttgttattgcttaccttgaacataacggcatgtgatgttta

SEQ ID NO: 13413 - DNA, 1383 bp, Zea Mays
cttcggcttccttatcgcgtaaatggcgccgcgccgggcggatctccgtcgcccgcgcgtacttaccggtcgtgcgctgaccgaagccacgcgtgcctgtgatatatgcctccttgggtcgtccttgcccagcctgtacctcggaggttagctgcacgctgagactaatttacccgaagccgcatgaagagagaggagagcatcgccgccgcgtcgagcatgtggcaaccggtgtctgggtcgcagggcagaggggcgttggtgtccgctggtgccaagggtcatccgcgtgcaagcagctggtcgcacgcgtcctcgaatttccggaggttcttcgccgaagcaccctgcgcgcctgcttcgcggtccgacgtggtcggcctatttgggcacccaattgaccggtgagtccacatccattgtgttccataccaacttcgtagcgattttcgtaggatttcgttagagattagtcttcatgtcgccggcgaactaggggcggcaatggcgccgccgcggctgagaagatcgagtcgccgccggcatcacctgggataggttggccgtgggcccttaatctcgtgggggacggtcccaactcccaattagaacaccggataccggttcggcctgggttcatccccggcgttcgatgcgaatcaagcgggtggcaaacaatctgggtacataaaaatgtacaccgttagatccagatcctagggtttacatcgtgtaccgattcgtgctgggattaaactaatctacgccgttggctgctaatcgggcggccgataccacgccataccccttcgcgagcgcatcctttcatataagtccctggattattatagaattaacccgtagtccacaacaggggaggtctgggtcttaaggatatttgcgttgtgaaccctggctttcggttaaatcttgcgcccggtcgaggaaacagaaaatcagggaaaagtaaatagaaaatgatttttaatataaaaataatggttagaacttgtttaattcctagaaaattcatattaatttcaaattgatccattccagtttctataattttgtattatcattgtttatcatatagtgtgtctattttgacatgaaaaccatattaaaatttatctcttaattaatcttgtatcaaatacataaaacctttagaaattcataacttaaaatccataactccaaaattaatgattctttttcctataatcttattttaatgcgtagattattaatatgtattttgtttacatgtttggtgtgatgttaatttcctctttatactatgcttgtttgtattgtggcgagtataagagcctgtggttgaggatcacggtgttcagcatgtagaagttgctgagcagg

SEQ ID NO: 13414 - DNA, 1211 bp, Zea Mays
ccaaaaggctgtaagaatatatgtaaagatgactaaatggctatatatggctgagatctccagcatggggaggggaaggattgagatcaagaggatcgagaacaacacgagccggcaggtcaccttctgcaagcgccgcaatgggctcctcaagaaggcgtacgagctctccgtcctctgcgacgccgaggtggcgctcgtcgtcttctccagccgcggacgcctctacgagtacgccaacaacagtgtgaaggctacgatcgagaggtacaagaaggcacacgccgttggctcttcctctggccccccactcttagagcacaatgcccagcaattctaccagcaagaatccgcaaaactgcgcaaccagatccaaatgctgcaaaacactaacaggcacttggttggtgactctgtgggaaacttgtcactcaaagagctgaagcagctggagagccgccttgagaaaggcatctctaagatcagggccaggaagagtgagctgttggctgccgagatcaattacatgggtcaaaaggagaacttgagcttccagatggacacatggaatcttcagacaaggtatggcattgctattgaggagggagagcaacagctgcagcaggtgactgtggcccagtctgtcgcagcagcagcggccaccgacgtggagctgaatccgttcttggagatggataccaaatgcttcttccctggcggccccttcgcgacactggacatgaagtgcttcttccccggcagcttgcagatgctggaggcacagcagcgccagatgcttgccaccgagctgaacctcggctaccaactggcgccgcctgacactgacgttgccaacaataaccctcagcagttctaaactggatccatgagaaagccaactgtgaccgatggaagctggctgttgcctctagatgatattggcttccataacctagcttattatggtgtgtattgttgccttttgtgtgtgattctccttactactgatggagaataaacctaatcgattgggcataatgatcaaatgctacagcacccgtgaggctgtgatcaggacatcatgtttgttttgaatagcactttttatctattacgaggactctaggcctcaatatatagaggtacaggagattacaaatatacacaaaactccttatacaatgggaaaatacaaataaagtatatatatc

SEQ ID NO: 13415 - DNA, 1267 bp, Zea Mays
atcagtagtagtggcattttgcccctgctgtgccatctctctctcgctctcgctcctctcctctttttctctcctgctcagccttgcttcccgtcccatcctttctttcccttgggcgcattcagcagcttcagcctggccggccggcctgctattaaaccactttgcttgcaagtcaccttctgcaagcgccgcaatgggctcctcaagaaggcgtacgagctctccgtcctctgcgacgccgaggtggcgctcgtcgtcttctccagccgcggacgcctctacgagtacgccaacaacagtgtgaaggctacgatcgagaggtacaagaaggcacacgccgttggctcttcctctggccccccactcttagagcacaatgcccagcaattctaccagcaagaatccgcaaaactgcgcaaccagatccaaatgctgcaaaacactaacaggcacttggttggtgactctgtgggaaacttgtcactcaaagagctgaagcagctggagagccgccttgagaaaggcatctctaagatcagggccaggaagagtgagctgttggctgccgagatcaattacatgggtcaaaaggagaacttgagcttccagatggacacatggaatcttcagacaaggtatggcattgctattgaggagggagagcaacagctgcagcaggtgactgtggcccagtctgtcgcagcagcagcggccaccgacgtggagctgaatccgttcttggagatggataccaaatgcttcttccctggcggccccttcgcgacactggacatgaagtgcttcttccccggcagcttgcagatgctggaggcacagcagcgccagatgcttgccaccgagctgaacctcggctaccaactggcgccgcctgacactgacgttgccaacaataaccctcagcagttctaaactggatccatgagaaagccaactgtgaccgatggaagctggctgttgcctctagatgatattggcttccataacctagcttattatggtgtgtattgttgccttttgtgtgtgattctccttactactgatggagaataaacctaatcgattgggcataatgatcaaatgctacagcacccgtgaggctgtgatcaggacatcatgtttgttttgaatagcactttttatctattacgaggactctaggcctcaatatatagaggtacaggagattacaaatatacacaaaactccttatacaatgggaaaatacaaataaagtatatatatc

SEQ ID NO: 13416 - DNA, 1251 bp, Zea Mays
gccgactagcttctctgctgactgctacttggataatatgcttcttatttgtttatcacactcgatttccctttttcctgctttctatatctgagatctccagcatggggaggggaaggattgagatcaagaggatcgagaacaacacgagccggcaggtcaccttctgcaagcgccgcaatgggctcctcaagaaggcgtacgagctctccgtcctctgcgacgccgaggtggcgctcgtcgtcttctccagccgcggacgcctctacgagtacgccaacaacagtgtgaaggctacgatcgagaggtacaagaaggcacacgccgttggctcttcctctggccccccactcttagagcacaatgcccagcaattctaccagcaagaatccgcaaaactgcgcaaccagatccaaatgctgcaaaacactaacaggcacttggttggtgactctgtgggaaacttgtcactcaaagagctgaagcagctggagagccgccttgagaaaggcatctctaagatcagggccaggaagagtgagctgttggctgccgagatcaattacatgggtcaaaaggagaacttgagcttccagatggacacatggaatcttcagacaaggtatggcattgctattgaggagggagagcaacagctgcagcaggtgactgtggcccagtctgtcgcagcagcagcggccaccgacgtggagctgaatccgttcttggagatggataccaaatgcttcttccctggcggccccttcgcgacactggacatgaagtgcttcttccccggcagcttgcagatgctggaggcacagcagcgccagatgcttgccaccgagctgaacctcggctaccaactggcgccgcctgacactgacgttgccaacaataaccctcagcagttctaaactggatccatgagaaagccaactgtgaccgatggaagctggctgttgcctctagatgatattggcttccataacctagcttattatggtgtgtattgttgccttttgtgtgtgattctccttactactgatggagaataaacctaatcgattgggcataatgatcaaatgctacagcacccgtgaggctgtgatcaggacatcatgtttgttttgaatagcactttttatctattacgaggactctaggcctcaatatatagaggtacaggagattacaaatatacacaaaactccttatacaatgggaaaatacaaataaagtatatatatc

SEQ ID NO: 13417 - DNA, 1212 bp, Zea Mays
cttggataatatgcttcttatttgtttatcacactcgatttccctttttcctgctttctatatctgagatctccagcatggggaggggaaggattgagatcaagaggatcgagaacaacacgagccggcaggtcaccttctgcaagcgccgcaatgggctcctcaagaaggcgtacgagctctccgtcctctgcgacgccgaggtggcgctcgtcgtcttctccagccgcggacgcctctacgagtacgccaacaacagtgtgaaggctacgatcgagaggtacaagaaggcacacgccgttggctcttcctctggccccccactcttagagcacaatgcccagcaagaatccgcaaaactgcgcaaccagatccaaatgctgcaaaacactaacaggcacttggttggtgactctgtgggaaacttgtcactcaaagagctgaagcagctggagagccgccttgagaaaggcatctctaagatcagggccaggaagagtgagctgttggctgccgagatcaattacatgggtcaaaaggagaacttgagcttccagatggacacatggaatcttcagacaaggtatggcattgctattgaggagggagagcaacagctgcagcaggtgactgtggcccagtctgtcgcagcagcagcggccaccgacgtggagctgaatccgttcttggagatggataccaaatgcttcttccctggcggccccttcgcgacactggacatgaagtgcttcttccccggcagcttgcagatgctggaggcacagcagcgccagatgcttgccaccgagctgaacctcggctaccaactggcgccgcctgacactgacgttgccaacaataaccctcagcagttctaaactggatccatgagaaagccaactgtgaccgatggaagctggctgttgcctctagatgatattggcttccataacctagcttattatggtgtgtattgttgccttttgtgtgtgattctccttactactgatggagaataaacctaatcgattgggcataatgatcaaatgctacagcacccgtgaggctgtgatcaggacatcatgtttgttttgaatagcactttttatctattacgaggactctaggcctcaatatatagaggtacaggagattacaaatatacacaaaactccttatacaatgggaaaatacaaataaagtatatatatc

SEQ ID NO: 13418 - DNA, 577 bp, Zea Mays
cgagtgtatgatgtgaccaagttcttggaggaccaccctgggggagaggatgtgcttctccatgcatcagcctctggggatgccacggaagcattcgaagaggtgggacacagcacttcagccgtcagcatgatggacagctacttgattggaagcatcaaggactatgttcgtccgagtgcatcgaaggccacagatccttggagcgctgatgttctaccaaattccaggacgatgcaagggaacaaagtcactcctaatccaaataccttcctggactttcttctcccattgtttgtgcttggcctggcatttgcagcttggtattacctaaccttcatctccaagaaccattaaatacagtgaagctgggaattatttctcactattatactgttagggttatatcagagaaaacattaaaagaaggcaaaccttgtattatggtattttgcacttgaaggttgctagctagggtttccttggatgtcctttcttacatgtaacaggcatgtcagtacgcagatgtatgaatgaaacaatttatccttatttttccaatttgtgcttcagattc

SEQ ID NO: 13419 - DNA, 2206 bp, Zea Mays
cttacatgcaagccccaagccccgaaacctgtgagggtcagtactataaatatccgatctcgtcggaaccctacccttttgagaactccccttctccgccactaccgaagcccttgtacccctcaccgccgccgctgctgctagggagcttccatccgcgcgcgcctacaacgagagctagcagcggtagcggccgttatcttgtcgctccggctccgttcgtgtacccaagtcccagcctagatgccgcagatggaggggtccactgatcagatcgccgccggctggttcgctaaggagccggcttccgagcggcccgtgggcttgccgaggaccggctcttccagtcgcctcaacgcgcaggcgccggagttcgtgccgcgggggccgccgccaccggcgccggcggttgtgctgccgcctccgccgcaggtgatccgcatgttcgccgcgcctcccccgccgccgcgtgggggcttcttctccgcgccgcagccccggccgttcgagtactatgcgcctatcggtgaacgcagcggatttgctgccaaggagcaacaggcgccggagctggaagcggagatgctcccgcccgccgcggtgaagacggagccggtggtggatgggctcgacgacgaggtggtgcacaagatcaccaagcaggtggaatactattttagtgacatcaaccttgctactacagaacatctgatgagattcattaccaaggattctgagggatttgcaaagagaaaaattgagctttatttctgaagcaaaaggagggaaagcattggttattggtgatttactgtgtgctccttaataaggactgccccatcctttgttttcaacagtgtagaaatcttgaagtgccaatatcggtaattgctggctttaagaaagtaaaaacttctgtgcgcaataatgtgatgcttgctgcggctctccgaacctcatcaaaacttgttgtaagcgatgacggtaagagagtcaaaaggcagcagccatttacagaatctgatttgcaggagctccagtcccggattgttgtagcagaaaatcttcctggtgatccctcctaccagaatcttaagaagatattttcagctgttggaagactccaaatggcactggtcctgcaactaatagatcttccaagttagatatgctttttgctaacaagctgcatgctttcgtggagtacgaaactcctgaggatgctgcgaaggctattttggagctcaatgatgagaaaaactggagaaatgggcttagagttcggttgctgaatacttgcacggtgaagggggcaggcaaaggaaaaaacggaatgaatgaaactgatggaaatagtgaggaggatgtctccactttgaaccattctaacgagaaacagtttgaacaatcctctcaactgttagatgtactgccggaacacttgtttgatgagaatttcaacaaggaagttcccaagcgcggcaaagggcgcggtcgcggtggcagagggcatgggcgtggcaaccatcaatataacaatcaccatcacaataaccagcaccaccagaacaaccagccgcagtacaataaccatggcaacaaccaccttggtgggaaccgtggcagccttcactctgttggtactacaccgcataacctgataaccaagcttgagccgcatccgcagctgcctattggggccaacaagcttccaccaggcccccgcatgcctgatggcaccaggggtttcaccatgggcagggggaagccacaggctgtgctacctgggttgtgtgctgttggtgttgagtgaggcatgcagattgctgcttgtatgcttgtattgtatatctttgtggtgggagtatttgtgcgtcacactttgtggacacggcgagctgtcaaaaccagtatattacattcgctttgtaatcgtgtatctggcaatttggtcggttggcacgggtatgaatcaattttttttgaaatcagtatctatcatagaaaaggacaagcacactaaaatgtagcgtggtgatttagggcacgtttagtttgtggctaaatgtgccacactttgcctaaggttagtggttctaattgaataactaaccttagtcagaaaaattaggcaaagtatgacaattgaggtaatgaaccaaacatgactttagtctgccctcctattgcgtcattttgttgtcat

SEQ ID NO: 13420 - DNA, 1542 bp, Zea Mays
ccgaaacctgtgagggtcagtactataaatatccgatctcgtcggaaccctacccttttgagaactccccttctccgccactaccgaagcccttgtacccctcaccgccgccgctgctgctagggagcttccatccgcgcgcgcctacaacgagagctagcagcggtagcggccgttatcttgtcgctccggctccgttcgtgtacccaagtcccagcctagatgccgcagatggaggggtccactgatcagatcgccgccggctggttcgctaaggagccggcttccgagcggcccgtgggcttgccgaggaccggctcttccagtcgcctcaacgcgcaggcgccggagttcgtgccgcgggggccgccgccaccggcgccggcggttgtgctgccgcctccgccgcaggtgatccgcatgttcgccgcgcctcccccgccgccgcgtgggggcttcttctccgcgccgcagccccggccgttcgagtactatgcgcctatcggtgaacgcagcggatttgctgccaaggagcaacaggcgccggagctggaagcggagatgctcccgcccgccgcggtgaagacggagccggtggtggatgggctcgacgacgaggtggtgcacaagatcaccaagcaggtggaatactattttagtgacatcaaccttgctactacagaacatctgatgagattcattaccaaggattctgagggatttgtgccaatatcggtaattgctggctttaagaaagtaaaaacttctgtgcgcaataatgtgatgcttgctgcggctctccgaacctcatcaaaacttgttgtaagcgatgacggtaagagagtcaaaaggcagcagccatttacagaatctgatttgcaggagctccagtcccggattgttgtagcagaaaatcttcctggtgatccctcctaccagaatcttaagaagatattttcagctgttggaagactccaaatggcactggtcctgcaactaatagatcttccaagttagatatgctttttgctaacaagctgcatgctttcgtggagtacgaaactcctgaggatgctgcgaaggctattttggagctcaatgatgagaaaaactggagaaatgggcttagagttcggttgctgaatacttgcacggtgaagggggcaggcaaaggaaaaaacggaatgaatgaaactgatggaaatagtgaggaggatgtctccactttgaaccattctaacgagaaacagtttgaacaatcctctcaactgttagatgtactgccggaacacttggtaagatactgttgtgggccttctttttctaaacccaaaaaatagactagagcaaaaaggacctataatttatttagtgccttgacattttgtgaagaaccatttgggtgacgatccattaccacccctacatagaatacgagtgcatttatactcgtgttagataccatctgatttcaaatgtaggtcatttaggacagtaacatggccttctatatgacaaaggacttttaacatttgttaaaat

SEQ ID NO: 13421 - DNA, 1431 bp, Zea Mays
atttactgtgtgctccttaataaggactgccccatcctttgttttcaacagtgtagaaatcttgaagtgccaatatcggtaattgctggctttaagaaagtaaaaacttctgtgcgcaataatgtgatgcttgctgcggctctccgaacctcatcaaaacttgttgtaagcgatgacggtaagagagtcaaaaggcagcagccatttacagaatctgatttgcaggagctccagtcccggattgttgtagcagaaaatcttcctggtgatccctcctaccagaatcttaagaagatattttcagctgttggaagtttgatttcaatccgaacttgctatcctcagactccaaatggcactggtcctgcaactaatagatcttccaagttagatatgctttttgctaacaagctgcatgctttcgtggagtacgaaactcctgaggatgctgcgaaggctattttggagctcaatgatgagaaaaactggagaaatgggcttagagttcggttgctgaatacttgcacggtgaagggggcaggcaaaggaaaaaacggaatgaatgaaactgatggaaatagtgaggaggatgtctccactttgaaccattctaacgagaaacagtttgaacaatcctctcaactgttagatgtactgccggaacacttgtttgatgagaatttcaacaaggaagttcccaagcgcggcaaagggcgcggtcgcggtggcagagggcatgggcgtggcaaccatcaatataacaatcaccatcacaataaccagcaccaccagaacaaccagccgcagtacaataaccatggcaacaaccaccttggtgggaaccgtggcagccttcactctgttggtactacaccgcataacctgataaccaagcttgagccgcatccgcagctgcctattggggccaacaagcttccaccaggcccccgcatgcctgatggcaccaggggtttcaccatgggcagggggaagccacaggctgtgctacctgggttgtgtgctgttggtgttgagtgaggcatgcagattgctgcttgtatgcttgtattgtatatctttgtggtgggagtatttgtgcgtcacactttgtggacacggcgagctgtcaaaaccagtatattacattcgctttgtaatcgtgtatctggcaatttggtcggttggcacgggtatgaatcaattttttttgaaatcagtatctatcatagaaaaggacaagcacactaaaatgtagcgtggtgatttagggcacgtttagtttgtggctaaatgtgccacactttgcctaaggttagtggttctaattgaataactaaccttagtcagaaaaattaggcaaagtatgacaattgaggtaatgaaccaaacatgactttagtctgccctcctattgcgtcattttgttgtcat

SEQ ID NO: 13422 - DNA, 1129 bp, Zea Mays
ttttaatctgcagagactgatgagggcatagcacaggctatcatccggtccaacatcgacttccgcagagagccttggtcaaaggtgtcggaaaatgcaaaagatcttgtgaggaagatgcttgatccaagcccctactgtcggttgactgcccagcaggttctagaacatccctggatacagaatgccagtgcagctcccaacatcccacttggagaagcagtgaggtccaggctgaagcaattcactgttatgaacaagttcaagaagaaggccctgcttgtggtggcagagtacctaccagccgaagagctggaagcaatcagggagttgtttcagttgctggacacgaacaaggatgggcatcttacaatcgaagaactcaggaagggaatgcgattgataggccacaatgtccatgacactgacgtcgatatgctcatggaagctgccgacatcgacgggaacgggaccctggactgcaaggagttcgtgacagtctccattcacctgaagaaaatccgtagcgaggatcacctgcccaaggtgttcagctacttcgacaagaacgggagcgggtacatcgagatcgaagagctgaaggaggccctctctccaagaggtgaccagaaggcgatcgaggacataatcctagacgtcgatatagacagggacgggaagataagctacgaggagtttgagctgatgatgaaagctggagtggactggaggaatacgtcgcggcagtactcgagagcggtgtacaacaccctcagccgcaagatgttcaaggacgcgtcactgaagcttggtagtaacaatggtccacttgctgctgcagccgtcaaagaacaacaagatgttgattgagtgatgtgtctactgcctgcaaactcgactaaaacagagaacacgagaactgtacccagttttccatgttttgtgtataggtcgccacattttggcaaggaaatgtatcaggggcggtcaattgactcaggttcaggtgcattgtgcatatgtcaagacactcccaattacaccctttatttttctcataaaaaaaacaatgttgttatctaccaacatcagcaagctgtgttgtaaaacatatctttaatcgttatta

SEQ ID NO: 13423 - DNA, 993 bp, Zea Mays
gtcggaaaatgcaaaagatcttgtgaggaagatgcttgatccaagcccctactgtcggttgactgcccagcaggttctagaacatccctggatacagaatgccagtgcagctcccaacatcccacttggagaagcagtgaggtccaggctgaagcaattcactgttatgaacaagttcaagaagaaggccctgcttgtggtggcagagtacctaccagccgaagagctggaagcaatcagggagttgtttcagttgctggacacgaacaaggatgggcatcttacaatcgaagaactcaggaagggaatgcgattgataggccacaatgtccatgacactgacgtcgatatgctcatggaagctgccgacatcgacgggaacgggaccctggactgcaaggagttcgtgacagtctccattcacctgaagaaaatccgtagcgaggatcacctgcccaaggtgttcagctacttcgacaagaacgggagcgggtacatcgagatcgaagagctgaaggaggccctctctccaagaggacgggaagataagctacgaggagtttgagctgatgatgaaagctggagtggactggaggaatacgtcgcggcagtactcgagagcggtgtacaacaccctcagccgcaagatgttcaaggacgcgtcactgaagcttggtagtaacaatggtccacttgctgctgcagccgtcaaagaacaacaagatgttgattgagtgatgtgtctactgcctgcaaactcgactaaaacagagaacacgagaactgtacccagttttccatgttttgtgtataggtcgccacattttggcaaggaaatgtatcaggggcggtcaattgactcaggttcaggtgcattgtgcatatgtcaagacactcccaattacaccctttatttttctcataaaaaaaacaatgttgttatctaccaacatcagcaagctgtgttgtaaaacatatctttaatcgttatta

SEQ ID NO: 13424 - DNA, 50 bp, Zea Mays
ctagaaacatggaagaagcgggtcgcgggcgtttgggcgtagaccgggcg

SEQ ID NO: 13425 - DNA, 778 bp, Zea Mays
aggtcgggggtgggagctctggcgggcgcgacgggcggggccaggggcgcgctctccggcgggcgcgacgggcggggtcgggggcgagcactccggcggggaagtgctagggagaggggctcgcgcgtatggactcgacggcggacggtggccagggacgaagtggcgcgcggacgggcgagcagcaaggcgacggcgcggctggaagaagctcggcgagcaggaatcgggcgcgccgcggaatgaagaactagaagcttgggcgccggcagaggaagctgggagcggaatgaagctccacaagcagggatctgagcagaagagggagagaagcagggaggcgggcgctgccatggctgggaagcttgaccagggaactctacgagagagagatggagatgggctgggcaccgagcgctgcaggaaggagataagctccgtgagaaaaaatctcaaggactacgtgcgtgtacaagggaagaagaagcagctgggctgcgcgcggttcttatccagggcgtgggaggaggctaaaaatctgctggggacggcagcgcgagtccggcaagcgctggacggacgtatgaggagctggacgacgatgcccacgacgatgaggaggaggacgcctgcagccggcgccgaggttacttggctctcggcggcgagccgcaggagggcggcaattccttgctggcggcggctagggtttgcgggggttttggggagggcgcgtggtggtgggggagggcgcgtggtggtgggggcggacgcggag

SEQ ID NO: 13426 - DNA, 677 bp, Zea Mays
ccacgcccgcccgccgcaatccccagtccccaaccgccctccgcaatcccctaccgcccgccgtgatacccgccgccgcggcagccgcccgccgcaacctctgcctagataaggatagggggcgccctcctccctcgatcatccgcacttgtgtagccatcgcgccatctacaccggccaccgccacacgaaggttcgtctctggccttgcggcttgcgacctcgaggtgaccgagcccgcgggctccatgacgacaacggtgacgccggaggcaaagatggcggcgcagcagcaggcccccgcgtcgcgctcctcctcccgacctcgccgtcgagtccctattcccgccggacctcgatatcttcgcaggccgctggaccccgccggggcgggtgaccgatgcagtgcgctctcgatccgtgcagagcgcaggtggttggatggccgcccgtgcgcaactaccggaagaataccctcgccgccgcgaccgcctccaggagcaaggcgccgacggaggaggccgcatccggagctgggcccatgtacgtgaaggtgagcatggatggcgcgccctacctcaggaaggtggacatcaagatgtactccagctacgaggacctctccctggcgctcgagaagatgttcagctgcttcatcgctgcctgtgattttaaag

SEQ ID NO: 13427 - DNA, 852 bp, Zea Mays
ccacgcccgcccgccgcaatccccagtccccaaccgccctccgcaatcccctaccgcccgccgtgatacccgccgccgcggcagccgcccgccgcaacctctgcctagataaggatagggggcgccctcctccctcgatcatccgcacttgtgtagccatcgcgccatctacaccggccaccgccacacgaaggttcgtctctggccttgcggcttgcgacctcgaggtgaccgagcccgcgggctccatgacgacaacggtgacgccggaggcaaagatggcggcgcagcagcaggcccccgcgtcgcgctcctcctcccgacctcgccgtcgagtccctattcccgccggacctcgatatcttcgcaggccgctggaccccgccggggcgggtgaccgatgcagtgcgctctcgatccgtgcagagcgcaggtggttggatggccgcccgtgcgcaactaccggaagaataccctcgccgccgcgaccgcctccaggagcaaggcgccgacggaggaggccgcatccggagctgggcccatgtacgtgaaggtgagcatggatggcgcgccctacctcaggaaggtggacatcaagatgtactccagctacgaggacctctccctggcgctcgagaagatgttcagctgcttcatcgctggtcaaagtggtctgcataaatcatcgagcaaagacagactgactaatggctcaaaggtggatgccctcaaagatcaggagtatgtccttacatatgaggataaggatgcagactggatgcttgtcggtgatcttccctgggaattaccttcagagttggaggagctcaccattagggcggttcttttgcc

SEQ ID NO: 13428 - DNA, 3388 bp, Zea Mays
aaacgacccaccacacgcttaaacagaagtttcagaaatgcgaaaagaaaataggaaacagacaaaaaaggcagaatcaggaggctagacgaaaggaggagaaagagagaacaatcagtagttttctttcttgttggacattcgggcggccaaagcagcggcccccttatctccagggaccaggggaggtcgcacaccaacgcaccgtccttccctttcctcctcctcctccctctcctcggaaggtcaagtgacggtatttgtgaccatggcagggaccttactccagtcagttgccctgggaacaccatttgggggtcgcatgagaacccattgttggaggtcccatggcaccaggaggcctgcctctatgttggcagtgtcacttagccgccctgtcaagatgtcagcatttgtgggtctaagatcagtgcatagcttctcggtcacaccgacggtgtccaattccaggtcggcagttgcatcttacaggtcatcgcgacagacaagacgatctcgttttgtcactcaggcaatgtttgagaggttcacggagaaagctattaaggtcatcatgcttgcgcaagaggaagcaaggcgcctgggccacaactttgttggaactgagcagatcctcttgggtctgattggagagggcactggtattgcagctaaggtgctcaagtccatgggaataaatcttaaggatgcacgtgtggaggtggagaagattattggccgcggcaatggttttgttgctgttgaaataccattcacaccacgtgcgaaacgtgttttggagctctccttggaggaagctcgccaattaggacataattatattggatctgagcacctgctccttggactgcttcgtgagggtgaaggtgtggcggctcgtgtgcttgagagtctcggagctgaccccagcaatatccgtacacaagttattcgaatgattggtgagaccacagaagctgttggtgctggagttggcggcggcagcagtggtaataagatgccaactcttgaggagtatggaactaatttaacaaaattagcagaggagggaaaattagatcctgttgttggaaggcagccacaaattgagcgtgtggtacaaattttaggcagacgaaccaagaacaatccctgcttgattggagagcctggtgttggaaaaactgcaattgctgaaggacttgctcagcgcatttctacaggcgatgtacctgaaacaatagaagggaaaaaggtcataacccttgacatgggacttcttgttgctggcacaaagtaccgtggagaattcgaagaaagattaaagaagctgatggaggaaataaagcaaagtgatgagataatactctttattgatgaagttcacactctgataggagcaggagcagcggaaggtgctatagatgctgctaatatcttgaagcctgcgttggccagaggtgaattacagtgcattggagccactacactagatgaatataggaagcacattgagaaagacccagcacttgaacggaggtttcaacctgtgaaagtgccagaaccaacagtagatgaaaccattgaaatcctcagaggactgagggaacgatatgagatccaccataaacttcgttacactgatgaagctctgattgcagctgcaaagctgtcatatcaatatatcagtgatcggtttctcccagataaggcaattgacttgattgatgaagcaggttcccgtgttaggctacagcatgcacaggtccccgaggaagcaagagagcttgacaaggagctcaaacaagtcacgaaacagaagaatgaagctgttcgaagccaggattttgagaaggctggggaattgagagaccgtgaaatggaattgaaggcccagataacagccctcattgacaagagcaaggaattgagcaaagcagaggaagagtctggagagacaggacctatggtcaatgaagaagatatccagcacatagtatcttcatggactggcatccctgtggagaaggtttccagcgatgaatctgataagcttcttaagatggaagagactttgcacaagcgtgtcattggccaagatgaggctgtggtagcaattagtcgctccatccgccgtgctcgtgtgggtctcaagaaccccaacaggccaattgcaagctttatttttgctggtcccaccggcgttgggaagtctgagcttgcaaaggctcttgcagcctattactttggctctgaggaggctatgatccggcttgatatgagtgaattcatggagagacacacggtatccaagctgattggttcacctccaggatatgtaggatacactgagggtggccagctgacagaggcagttcgacggcggccatacacagttgtgctctttgatgagattgagaaggcacaccctgatgtcttcaacatgatgcttcagattttggaagatgggagattgactgacagcaagggaaggacggtggacttcaagaacacactcctgatcatgacctcaaatgtagggagcagtgtcatcgagaagggtggaaggaagatcggatttgaccttgactctgatgagaaggacagtagctacagcaggatcaagagcctggtcatcgaggagatgaagcagtatttccgacctgagttcctcaaccgtctcgatgagatgatcgtgttcaggcagcttaccaagctcgaggtcaaggagatagcggacatcatgctccaggaggtctttgacaggctgaaggccaaggacatcaatcttcaagtgaccgagaagttcaaggagcgggtggtggacgaaggctacaaccctagctatggtgcacgcccgctgaggcgagccatcatgaggctgctggaggacagccttgctgagaagatgctcgcaggggaggtaaaggagggcgactctgccatagtagatgtggactcggaggggaaggttgttgtgctcaatggtcagggcggcataccggagctctcaactccggcgatcaccgtttagctcgtacataacaaatgacaaaattaatagcatagtttttgttcaaacacattatcatttatggttagaatatctgtgtatatgtagtggtatagtcaatggggaaatcgttcctgcctctaaattcctttttttcaagttaaggtgtttcttttgtcgcaagttaatctgcctggttattaagatattgtttacagagtgatgtgaaaagctcttgtctgtgttcaaggatacatatacagacgggtcaagtagcatgtaggcaatagttccaatataggcctcagcgttgtctttaaccgagcatccgaaaacacttgcacctaaataccgtcgcctgaaaatacaaaaaaa

SEQ ID NO: 13429 - DNA, 3258 bp, Zea Mays
gaaagagagaacaatcagtagttttctttcttgttggacattcgggcggccaaagcagcggcccccttatctccagggaccaggggaggtcgcacaccaacgcaccgtccttccctttcctcctcctcctccctctcctcggaagggaccttactccagtcagttgccctgggaacaccatttgggggtcgcatgagaacccattgttggaggtcccatggcaccaggaggcctgcctctatgttggcagtgtcacttagccgccctgtcaagatgtcagcatttgtgggtctaagatcagtgcatagcttctcggtcacaccgacggtgtccaattccaggtcggcagttgcatcttacaggtcatcgcgacagacaagacgatctcgttttgtcactcaggcaatgtttgagaggttcacggagaaagctattaaggtcatcatgcttgcgcaagaggaagcaaggcgcctgggccacaactttgttggaactgagcagatcctcttgggtctgattggagagggcactggtattgcagctaaggtgctcaagtccatgggaataaatcttaaggatgcacgtgtggaggtggagaagattattggccgcggcaatggttttgttgctgttgaaataccattcacaccacgtgcgaaacgtgttttggagctctccttggaggaagctcgccaattaggacataattatattggatctgagcacctgctccttggactgcttcgtgagggtgaaggtgtggcggctcgtgtgcttgagagtctcggagctgaccccagcaatatccgtacacaagttattcgaatgattggtgagaccacagaagctgttggtgctggagttggcggcggcagcagtggtaataagatgccaactcttgaggagtatggaactaatttaacaaaattagcagaggagggaaaattagatcctgttgttggaaggcagccacaaattgagcgtgtggtacaaattttaggcagacgaaccaagaacaatccctgcttgattggagagcctggtgttggaaaaactgcaattgctgaaggacttgctcagcgcatttctacaggcgatgtacctgaaacaatagaagggaaaaaggtcataacccttgacatgggacttcttgttgctggcacaaagtaccgtggagaattcgaagaaagattaaagaagctgatggaggaaataaagcaaagtgatgagataatactctttattgatgaagttcacactctgataggagcaggagcagcggaaggtgctatagatgctgctaatatcttgaagcctgcgttggccagaggtgaattacagtgcattggagccactacactagatgaatataggaagcacattgagaaagacccagcacttgaacggaggtttcaacctgtgaaagtgccagaaccaacagtagatgaaaccattgaaatcctcagaggactgagggaacgatatgagatccaccataaacttcgttacactgatgaagctctgattgcagctgcaaagctgtcatatcaatatatcagtgatcggtttctcccagataaggcaattgacttgattgatgaagcaggttcccgtgttaggctacagcatgcacaggtccccgaggaagcaagagagcttgacaaggagctcaaacaagtcacgaaacagaagaatgaagctgttcgaagccaggattttgagaaggctggggaattgagagaccgtgaaatggaattgaaggcccagataacagccctcattgacaagagcaaggaattgagcaaagcagaggaagagtctggagagacaggacctatggtcaatgaagaagatatccagcacatagtatcttcatggactggcatccctgtggagaaggtttccagcgatgaatctgataagcttcttaagatggaagagactttgcacaagcgtgtcattggccaagatgaggctgtggtagcaattagtcgctccatccgccgtgctcgtgtgggtctcaagaaccccaacaggccaattgcaagctttatttttgctggtcccaccggcgttgggaagtctgagcttgcaaaggctcttgcagcctattactttggctctgaggaggctatgatccggcttgatatgagtgaattcatggagagacacacggtatccaagctgattggttcacctccaggatatgtaggatacactgagggtggccagctgacagaggcagttcgacggcggccatacacagttgtgctctttgatgagattgagaaggcacaccctgatgtcttcaacatgatgcttcagattttggaagatgggagattgactgacagcaagggaaggacggtggacttcaagaacacactcctgatcatgacctcaaatgtagggagcagtgtcatcgagaagggtggaaggaagatcggatttgaccttgactctgatgagaaggacagtagctacagcaggatcaagagcctggtcatcgaggagatgaagcagtatttccgacctgagttcctcaaccgtctcgatgagatgatcgtgttcaggcagcttaccaagctcgaggtcaaggagatagcggacatcatgctccaggaggtctttgacaggctgaaggccaaggacatcaatcttcaagtgaccgagaagttcaaggagcgggtggtggacgaaggctacaaccctagctatggtgcacgcccgctgaggcgagccatcatgaggctgctggaggacagccttgctgagaagatgctcgcaggggaggtaaaggagggcgactctgccatagtagatgtggactcggaggggaaggttgttgtgctcaatggtcagggcggcataccggagctctcaactccggcgatcaccgtttagctcgtacataacaaatgacaaaattaatagcatagtttttgttcaaacacattatcatttatggttagaatatctgtgtatatgtagtggtatagtcaatggggaaatcgttcctgcctctaaattcctttttttcaagttaaggtgtttcttttgtcgcaagttaatctgcctggttattaagatattgtttacagagtgatgtgaaaagctcttgtctgtgttcaaggatacatatacagacgggtcaagtagcatgtaggcaatagttccaatataggcctcagcgttgtctttaaccgagcatccgaaaacacttgcacctaaataccgtcgcctgaaaatacaaaaaaa

SEQ ID NO: 13430 - DNA, 3171 bp, Zea Mays
agaacctccagcgatcctcgtcttctgtgtcaagtgacggtatttgtgaccatggcagggaccttactccagtcagttgccctgggaacaccatttgggggtcgcatgagaacccattgttggaggtcccatggcaccaggaggcctgcctctatgttggcagtgtcacttagccgccctgtcaagatgtcagcatttgtgggtctaagatcagtgcatagcttctcggtcacaccgacggtgtccaattccaggtcggcagttgcatcttacaggtcatcgcgacagacaagacgatctcgttttgtcactcaggcaatgtttgagaggttcacggagaaagctattaaggtcatcatgcttgcgcaagaggaagcaaggcgcctgggccacaactttgttggaactgagcagatcctcttgggtctgattggagagggcactggtattgcagctaaggtgctcaagtccatgggaataaatcttaaggatgcacgtgtggaggtggagaagattattggccgcggcaatggttttgttgctgttgaaataccattcacaccacgtgcgaaacgtgttttggagctctccttggaggaagctcgccaattaggacataattatattggatctgagcacctgctccttggactgcttcgtgagggtgaaggtgtggcggctcgtgtgcttgagagtctcggagctgaccccagcaatatccgtacacaagttattcgaatgattggtgagaccacagaagctgttggtgctggagttggcggcggcagcagtggtaataagatgccaactcttgaggagtatggaactaatttaacaaaattagcagaggagggaaaattagatcctgttgttggaaggcagccacaaattgagcgtgtggtacaaattttaggcagacgaaccaagaacaatccctgcttgattggagagcctggtgttggaaaaactgcaattgctgaaggacttgctcagcgcatttctacaggcgatgtacctgaaacaatagaagggaaaaaggtcataacccttgacatgggacttcttgttgctggcacaaagtaccgtggagaattcgaagaaagattaaagaagctgatggaggaaataaagcaaagtgatgagataatactctttattgatgaagttcacactctgataggagcaggagcagcggaaggtgctatagatgctgctaatatcttgaagcctgcgttggccagaggtgaattacagtgcattggagccactacactagatgaatataggaagcacattgagaaagacccagcacttgaacggaggtttcaacctgtgaaagtgccagaaccaacagtagatgaaaccattgaaatcctcagaggactgagggaacgatatgagatccaccataaacttcgttacactgatgaagctctgattgcagctgcaaagctgtcatatcaatatatcagtgatcggtttctcccagataaggcaattgacttgattgatgaagcaggttcccgtgttaggctacagcatgcacaggtccccgaggaagcaagagagcttgacaaggagctcaaacaagtcacgaaacagaagaatgaagctgttcgaagccaggattttgagaaggctggggaattgagagaccgtgaaatggaattgaaggcccagataacagccctcattgacaagagcaaggaattgagcaaagcagaggaagagtctggagagacaggacctatggtcaatgaagaagatatccagcacatagtatcttcatggactggcatccctgtggagaaggtttccagcgatgaatctgataagcttcttaagatggaagagactttgcacaagcgtgtcattggccaagatgaggctgtggtagcaattagtcgctccatccgccgtgctcgtgtgggtctcaagaaccccaacaggccaattgcaagctttatttttgctggtcccaccggcgttgggaagtctgagcttgcaaaggctcttgcagcctattactttggctctgaggaggctatgatccggcttgatatgagtgaattcatggagagacacacggtatccaagctgattggttcacctccaggatatgtaggatacactgagggtggccagctgacagaggcagttcgacggcggccatacacagttgtgctctttgatgagattgagaaggcacaccctgatgtcttcaacatgatgcttcagattttggaagatgggagattgactgacagcaagggaaggacggtggacttcaagaacacactcctgatcatgacctcaaatgtagggagcagtgtcatcgagaagggtggaaggaagatcggatttgaccttgactctgatgagaaggacagtagctacagcaggatcaagagcctggtcatcgaggagatgaagcagtatttccgacctgagttcctcaaccgtctcgatgagatgatcgtgttcaggcagcttaccaagctcgaggtcaaggagatagcggacatcatgctccaggaggtctttgacaggctgaaggccaaggacatcaatcttcaagtgaccgagaagttcaaggagcgggtggtggacgaaggctacaaccctagctatggtgcacgcccgctgaggcgagccatcatgaggctgctggaggacagccttgctgagaagatgctcgcaggggaggtaaaggagggcgactctgccatagtagatgtggactcggaggggaaggttgttgtgctcaatggtcagggcggcataccggagctctcaactccggcgatcaccgtttagctcgtacataacaaatgacaaaattaatagcatagtttttgttcaaacacattatcatttatggttagaatatctgtgtatatgtagtggtatagtcaatggggaaatcgttcctgcctctaaattcctttttttcaagttaaggtgtttcttttgtcgcaagttaatctgcctggttattaagatattgtttacagagtgatgtgaaaagctcttgtctgtgttcaaggatacatatacagacgggtcaagtagcatgtaggcaatagttccaatataggcctcagcgttgtctttaaccgagcatccgaaaacacttgcacctaaataccgtcgcctgaaaatacaaaaaaa

SEQ ID NO: 13431 - DNA, 3175 bp, Zea Mays
cttgcctgctaccacctgattctcgtttcgaggtcaagtgacggtatttgtgaccatggcagggaccttactccagtcagttgccctgggaacaccatttgggggtcgcatgagaacccattgttggaggtcccatggcaccaggaggcctgcctctatgttggcagtgtcacttagccgccctgtcaagatgtcagcatttgtgggtctaagatcagtgcatagcttctcggtcacaccgacggtgtccaattccaggtcggcagttgcatcttacaggtcatcgcgacagacaagacgatctcgttttgtcactcaggcaatgtttgagaggttcacggagaaagctattaaggtcatcatgcttgcgcaagaggaagcaaggcgcctgggccacaactttgttggaactgagcagatcctcttgggtctgattggagagggcactggtattgcagctaaggtgctcaagtccatgggaataaatcttaaggatgcacgtgtggaggtggagaagattattggccgcggcaatggttttgttgctgttgaaataccattcacaccacgtgcgaaacgtgttttggagctctccttggaggaagctcgccaattaggacataattatattggatctgagcacctgctccttggactgcttcgtgagggtgaaggtgtggcggctcgtgtgcttgagagtctcggagctgaccccagcaatatccgtacacaagttattcgaatgattggtgagaccacagaagctgttggtgctggagttggcggcggcagcagtggtaataagatgccaactcttgaggagtatggaactaatttaacaaaattagcagaggagggaaaattagatcctgttgttggaaggcagccacaaattgagcgtgtggtacaaattttaggcagacgaaccaagaacaatccctgcttgattggagagcctggtgttggaaaaactgcaattgctgaaggacttgctcagcgcatttctacaggcgatgtacctgaaacaatagaagggaaaaaggtcataacccttgacatgggacttcttgttgctggcacaaagtaccgtggagaattcgaagaaagattaaagaagctgatggaggaaataaagcaaagtgatgagataatactctttattgatgaagttcacactctgataggagcaggagcagcggaaggtgctatagatgctgctaatatcttgaagcctgcgttggccagaggtgaattacagtgcattggagccactacactagatgaatataggaagcacattgagaaagacccagcacttgaacggaggtttcaacctgtgaaagtgccagaaccaacagtagatgaaaccattgaaatcctcagaggactgagggaacgatatgagatccaccataaacttcgttacactgatgaagctctgattgcagctgcaaagctgtcatatcaatatatcagtgatcggtttctcccagataaggcaattgacttgattgatgaagcaggttcccgtgttaggctacagcatgcacaggtccccgaggaagcaagagagcttgacaaggagctcaaacaagtcacgaaacagaagaatgaagctgttcgaagccaggattttgagaaggctggggaattgagagaccgtgaaatggaattgaaggcccagataacagccctcattgacaagagcaaggaattgagcaaagcagaggaagagtctggagagacaggacctatggtcaatgaagaagatatccagcacatagtatcttcatggactggcatccctgtggagaaggtttccagcgatgaatctgataagcttcttaagatggaagagactttgcacaagcgtgtcattggccaagatgaggctgtggtagcaattagtcgctccatccgccgtgctcgtgtgggtctcaagaaccccaacaggccaattgcaagctttatttttgctggtcccaccggcgttgggaagtctgagcttgcaaaggctcttgcagcctattactttggctctgaggaggctatgatccggcttgatatgagtgaattcatggagagacacacggtatccaagctgattggttcacctccaggatatgtaggatacactgagggtggccagctgacagaggcagttcgacggcggccatacacagttgtgctctttgatgagattgagaaggcacaccctgatgtcttcaacatgatgcttcagattttggaagatgggagattgactgacagcaagggaaggacggtggacttcaagaacacactcctgatcatgacctcaaatgtagggagcagtgtcatcgagaagggtggaaggaagatcggatttgaccttgactctgatgagaaggacagtagctacagcaggatcaagagcctggtcatcgaggagatgaagcagtatttccgacctgagttcctcaaccgtctcgatgagatgatcgtgttcaggcagcttaccaagctcgaggtcaaggagatagcggacatcatgctccaggaggtctttgacaggctgaaggccaaggacatcaatcttcaagtgaccgagaagttcaaggagcgggtggtggacgaaggctacaaccctagctatggtgcacgcccgctgaggcgagccatcatgaggctgctggaggacagccttgctgagaagatgctcgcaggggaggtaaaggagggcgactctgccatagtagatgtggactcggaggggaaggttgttgtgctcaatggtcagggcggcataccggagctctcaactccggcgatcaccgtttagctcgtacataacaaatgacaaaattaatagcatagtttttgttcaaacacattatcatttatggttagaatatctgtgtatatgtagtggtatagtcaatggggaaatcgttcctgcctctaaattcctttttttcaagttaaggtgtttcttttgtcgcaagttaatctgcctggttattaagatattgtttacagagtgatgtgaaaagctcttgtctgtgttcaaggatacatatacagacgggtcaagtagcatgtaggcaatagttccaatataggcctcagcgttgtctttaaccgagcatccgaaaacacttgcacctaaataccgtcgcctgaaaatacaaaaaaa

SEQ ID NO: 13432 - DNA, 2583 bp, Zea Mays
aaataacagtgtaccccagtgacaggacataattatattggatctgagcacctgctccttggactgcttcgtgagggtgaaggtgtggcggctcgtgtgcttgagagtctcggagctgaccccagcaatatccgtacacaagttattcgaatgattggtgagaccacagaagctgttggtgctggagttggcggcggcagcagtggtaataagatgccaactcttgaggagtatggaactaatttaacaaaattagcagaggagggaaaattagatcctgttgttggaaggcagccacaaattgagcgtgtggtacaaattttaggcagacgaaccaagaacaatccctgcttgattggagagcctggtgttggaaaaactgcaattgctgaaggacttgctcagcgcatttctacaggcgatgtacctgaaacaatagaagggaaaaaggtcataacccttgacatgggacttcttgttgctggcacaaagtaccgtggagaattcgaagaaagattaaagaagctgatggaggaaataaagcaaagtgatgagataatactctttattgatgaagttcacactctgataggagcaggagcagcggaaggtgctatagatgctgctaatatcttgaagcctgcgttggccagaggtgaattacagtgcattggagccactacactagatgaatataggaagcacattgagaaagacccagcacttgaacggaggtttcaacctgtgaaagtgccagaaccaacagtagatgaaaccattgaaatcctcagaggactgagggaacgatatgagatccaccataaacttcgttacactgatgaagctctgattgcagctgcaaagctgtcatatcaatatatcagtgatcggtttctcccagataaggcaattgacttgattgatgaagcaggttcccgtgttaggctacagcatgcacaggtccccgaggaagcaagagagcttgacaaggagctcaaacaagtcacgaaacagaagaatgaagctgttcgaagccaggattttgagaaggctggggaattgagagaccgtgaaatggaattgaaggcccagataacagccctcattgacaagagcaaggaattgagcaaagcagaggaagagtctggagagacaggacctatggtcaatgaagaagatatccagcacatagtatcttcatggactggcatccctgtggagaaggtttccagcgatgaatctgataagcttcttaagatggaagagactttgcacaagcgtgtcattggccaagatgaggctgtggtagcaattagtcgctccatccgccgtgctcgtgtgggtctcaagaaccccaacaggccaattgcaagctttatttttgctggtcccaccggcgttgggaagtctgagcttgcaaaggctcttgcagcctattactttggctctgaggaggctatgatccggcttgatatgagtgaattcatggagagacacacggtatccaagctgattggttcacctccaggatatgtaggatacactgagggtggccagctgacagaggcagttcgacggcggccatacacagttgtgctctttgatgagattgagaaggcacaccctgatgtcttcaacatgatgcttcagattttggaagatgggagattgactgacagcaagggaaggacggtggacttcaagaacacactcctgatcatgacctcaaatgtagggagcagtgtcatcgagaagggtggaaggaagatcggatttgaccttgactctgatgagaaggacagtagctacagcaggatcaagagcctggtcatcgaggagatgaagcagtatttccgacctgagttcctcaaccgtctcgatgagatgatcgtgttcaggcagcttaccaagctcgaggtcaaggagatagcggacatcatgctccaggaggtctttgacaggctgaaggccaaggacatcaatcttcaagtgaccgagaagttcaaggagcgggtggtggacgaaggctacaaccctagctatggtgcacgcccgctgaggcgagccatcatgaggctgctggaggacagccttgctgagaagatgctcgcaggggaggtaaaggagggcgactctgccatagtagatgtggactcggaggggaaggttgttgtgctcaatggtcagggcggcataccggagctctcaactccggcgatcaccgtttagctcgtacataacaaatgacaaaattaatagcatagtttttgttcaaacacattatcatttatggttagaatatctgtgtatatgtagtggtatagtcaatggggaaatcgttcctgcctctaaattcctttttttcaagttaaggtgtttcttttgtcgcaagttaatctgcctggttattaagatattgtttacagagtgatgtgaaaagctcttgtctgtgttcaaggatacatatacagacgggtcaagtagcatgtaggcaatagttccaatataggcctcagcgttgtctttaaccgagcatccgaaaacacttgcacctaaataccgtcgcctgaaaatacaaaaaaa

SEQ ID NO: 13433 - DNA, 1618 bp, Zea Mays
tacccggttgctcccccttggatccttgtttgcttcctgctgcctggccttctctcctccccaaaatcaatccctcgcccacaaaggagagccagccaaaccttccacctcctccatttccagccccgtccccacaccagctcgcgtaacctcctccccatggctggaggcggcggcgcaggcgcgggctcgtcgtccggcggcggcggagggggcggcagggagggcgactgggactgcggcagctgcggcaaccgcaactacgccttccgctcgctttgcaaccgctgcaagcatccgcgcctcctcgtcgaccccaacaccccgcgcgactccaagtggctaccccgcgccggggactggatctgcaccggttgcagtaacaataattatgcatccagaaagaactgcaaaaagtgtggcttgcccaaggaggaagcagcaatgccagcattgcaaatggcagggatggctatgccagcttatgcaacttatattgcaagactacaaagccttgctgcttctgcttctgcctataacatgaactttgggatggctgccaattcacctttgcagcagcaactacttgcaaatgcaaactggccctatgggatggctggtagatatgggatgcaatcttctggttggccatttggcaacggcaacccaaatcagtttttaggtgttccaaaggattggcgtaatggagattggttctgcagctgtggatctcataactattcatctcgtactcagtgcaaagagtgtggtgcacctgtaccatcgagcattccctccacaacaatgaaagctacatctgatgcctcttccactcacaggcgtcctggctacagcctcagctagttggggcaaaccatctagaaggtcaatttgaggacggtcttcttcctctagtgtagccgcttcttcatctgtgagttgagcacctggagcaaactgactgagacgggccctctcccttgatggactgggcgagagccgagcaagatgcacttgctctgcatgtgcaggctctacaaccttttcatctgttagttgttcacctggagcaaaagaaggactgagcgagagctgatcaagacgcacctgccatgtcttctctacagccctttctgactgcacaggcacctgctctgcatgtgcaggctctacaacctgtgccttgtctggtattgtggcacggttgtcacctgtgagttgtgcatctggagcacactggcattcaatgttccatcgtgaaacattgtctgtcacctgtgagttttgcataagtctaaactgatccattgttctagcaagaaaatcatcatcgcgagttttaaggaaacattcacgatccttcgcgtctttgacataatcagaccatgttgaattactgtcaaggtgagtcgtttcatgtccaaggatccacatggagtgcctgtggaagaaataattatttagatgagtatgtactgggatcttgaattaactaagtatccaaaggctgatcctttgccaacaaaaaaacaaaatttaattaaaccaacaaaaaggaacaaaagttaacctactttgctcttgtcaaagccacattagttctcataacacaatcaag

SEQ ID NO: 13434 - DNA, 1432 bp, Zea Mays
tacccggttgctcccccttggatccttgtttgcttcctgctgcctggccttctctcctccccaaaatcaatccctcgcccacaaaggagagccagccaaaccttccacctcctccatttccagccccgtccccacaccagctcgcgtaacctcctccccatggctggaggcggcggcgcaggcgcgggctcgtcgtccggcggcggcggagggggcggcagggagggcgactgggactgcggcagctgcggcaaccgcaactacgccttccgctcgctttgcaaccgctgcaagcatccgcgcctcctcgtcgaccccaacaccccgcgcgactccaagtggctaccccgcgccggggactggatctgcaccgcagcaactacttgcaaatgcaaactggccctatgggatggctggtagatatgggatgcaatcttctggttggccatttggcaacggcaacccaaatcagtttttaggtgttccaaaggattggcgtaatggagattggttctgcagctgtggatctcataactattcatctcgtactcagtgcaaagagtgtggtgcacctgtaccatcgagcattccctccacaacaatgaaagctacatctgatgcctcttccacattaggaactaagcggttggcttcagaggacctggccaatgactgggataataaaaggctaaatccaggaaatgacaattatccactttcaacaggagctgcaaataatttatttttgggtattgagcaaggagctggaagcagcaatggccagtctgcctttcccaagtttgacaatgggagctcagtggcattaccatctgggcagggaatgtctggtcttatgggaaaaggggcaaaatggcgtgacggggactggttgtgcaacaactgcaacaatcacaactatgcatctcgtgcgttttgcaacaggtgcaaaactcagaaagaatctgcagttcaccctggtgtgttatagcttgctgttggattattttgttccaggatatgttgctgcctgttctagctccttcctcaaggctgcggtttgagttttttcgattctgcagtgtttttgctgctctaaaatgtttgtctcgatatttcattagtgcttgttgaagttccccatttgtttatggtataagcgcttgaataaaatgtttctggaaagtaccggcctacaatctggattttggcaaaataattgaattagttgttgtacaatgaggcaaattgtcttacgttgtacttgatgaactctggagtattatcactcgtcgggttgaaaaggggaactatacaatgtaatttcagtacagattattattttttcctgagaactccagttgtgctgttatgcgagttttgcccattcagaatacttttgatgcattcatcagaattcggctgttactttttc

SEQ ID NO: 13435 - DNA, 1518 bp, Zea Mays
cttggatccttgtttgcttcctgctgcctggccttctctcctccccaaaaccccgcgcgactccaagtggctaccccgcgccggggactggatctgcaccggttgcagtaacaataattatgcatccagaaagaactgcaaaaagtgtggcttgcccaaggaggaagcagcaatgccagcattgcaaatggcagggatggctatgccagcttatgcaacttatattgcaagactacaaagccttgctgcttctgcttctgcctataacatgaactttgggatggctgccaattcacctttgcagcagcaactacttgcaaatgcaaactggccctatgggatggctggtagatatgggatgcaatcttctggttggccatttggcaacggcaacccaaatcagtttttaggtgttccaaaggattggcgtaatggagattggttctgcagctgtggatctcataactattcatctcgtactcagtgcaaagagtgtggtgcacctgtaccatcgagcattccctccacaacaatgaaagctacatctgatgcctcttccagtatttatgcaatgctgtacactgtgttaaacatctggcaagtggttcactggtggacgcatctccaggtccgagcgtaaaaatcttaagttttgagcataaaacccctcggttataagcgtaaataccgagccaatatgaggttcatatctatgcattaggaactaagcggttggcttcagaggacctggccaatgactgggataataaaaggctaaatccaggaaatgacaattatccactttcaacaggagctgcaaataatttatttttgggtattgagcaaggagctggaagcagcaatggccagtctgcctttcccaagtttgacaatgggagctcagtggcattaccatctgggcagggaatgtctggtcttatgggaaaaggggcaaaatggcgtgacggggactggttgtgcaacaactgcaacaatcacaactatgcatctcgtgcgttttgcaacaggtgcaaaactcagaaagaatctgcagttcaccctggtgtgttatagcttgctgttggattattttgttccaggatatgttgctgcctgttctagctccttcctcaaggctgcggtttgagttttttcgattctgcagtgtttttgctgctctaaaatgtttgtctcgatatttcattagtgcttgttgaagttccccatttgtttatggtataagcgcttgaataaaatgtttctggaaagtaccggcctacaatctggattttggcaaaataattgaattagttgttgtacaatgaggcaaattgtcttacgttgtacttgatgaactctggagtattatcactcgtcgggttgaaaaggggaactatacaatgtaatttcagtacagattattattttttcctgagaactccagttgtgctgttatgcgagttttgcccattcagaatacttttgatgcattcatcagaattcggctgttactttttc

SEQ ID NO: 13436 - DNA, 2108 bp, Zea Mays
cttggatccttgtttgcttcctgctgcctggccttctctcctccccaaaatcaatccctcgcccacaaaggagagccagccaaaccttccacctcctccatttccagccccgtccccacaccagctcgcgtaacctcctccccatggctggaggcggcggcgcaggcgcgggctcgtcgtccggcggcggcggagggggcggcagggagggcgactgggactgcggcagctgcggcaaccgcaactacgccttccgctcgctttgcaaccgctgcaagcatccgcgcctcctcgtcgaccccaacaccccgcgcgactccaagtggctaccccgcgccggggactggatctgcaccgcagcaactacttgcaaatgcaaactggccctatgggatggctggtagatatgggatgcaatcttctggttggccatttggcaacggcaacccaaatcagtttttaggtgttccaaaggattggcgtaatggagattggttctgcagctgtggatctcataactattcatctcgtactcagtgcaaagagtgtggtgcacctgtaccatcgagcattccctccacaacaatgaaagctacatctgatgcctcttccagcactgcatgtggatccttggacatgaattcaacatggtgacagacaatgtttcacgatggaacattgaatgccagtgtgctccagatgcacaactcacatgtgacaaccatgctacaataccagacaaggctccagatgcacaactcacaggtgacaaccgtgccacaataccagacaaggcacaggttgtagagcctgcacatgcagagcaggtgcctatgcagtcagaaagagctgcagaaaagacatggcagctgtgtcttaatcagctctcgcacattccttcttttgctccaggtgaacaactaacagacgaaaaggttgtagagcctgcacatgcaaagcaagtgcatcttgctcagctctcgcccagtccatcaagggagagggcccgtctcagtcagtttgctcaaggtgctcaactcacagatgaagaagcggctgcactagaggaagaagaccatcctcaaattgaccttctggatggtttgcggcgcggaggccggctgcggggttccggggcagcgcgtctcgcggaggtgcgtagacgacggcggagcggcgtcctcacctccatggcgtcgctgtcgagcaagcaccacgtcctaatccaggtgctgctcgcccgcggcccgctctctgagcgcgacttccacgctttcatcgatggcgcctttggcaagaacaccgcattaggaactaagcggttggcttcagaggacctggccaatgactgggataataaaaggctaaatccaggaaatgacaattatccactttcaacaggagctgcaaataatttatttttgggtattgagcaaggagctggaagcagcaatggccagtctgcctttcccaagtttgacaatgggagctcagtggcattaccatctgggcagggaatgtctggtcttatgggaaaaggggcaaaatggcgtgacggggactggttgtgcaacaactgcaacaatcacaactatgcatctcgtgcgttttgcaacaggtgcaaaactcagaaagaatctgcagttcaccctggtgtgttatagcttgctgttggattattttgttccaggatatgttgctgcctgttctagctccttcctcaaggctgcggtttgagttttttcgattctgcagtgtttttgctgctctaaaatgtttgtctcgatatttcattagtgcttgttgaagttccccatttgtttatggtataagcgcttgaataaaatgtttctggaaagtaccggcctacaatctggattttggcaaaataattgaattagttgttgtacaatgaggcaaattgtcttacgttgtacttgatgaactctggagtattatcactcgtcgggttgaaaaggggaactatacaatgtaatttcagtacagattattattttttcctgagaactccagttgtgctgttatgcgagttttgcccattcagaatacttttgatgcattcatcagaattcggctgttactttttc

SEQ ID NO: 13437 - DNA, 1077 bp, Zea Mays
cctggccttctctcctccccaaaatcaatccctcgcccacaaaggagagccagccaaaccttccacctcctccatttccagccccgtccccacaccagctcgcgtaacctcctccccatggctggaggcggcggcgcaggcgcgggctcgtcgtccggcggcggcggagggggcggcagggagggcgactgggactgcggcagctgcggcaaccgcaactacgccttccgctcgctttgcaaccgctgcaagcatccgcgcctcctcgtcgaccccaacaccccgcgcgactccaagtggctaccccgcgccggggactggatctgcaccgcagcaactacttgcaaatgcaaactggccctatgggatggctggtagatatgggatgcaatcttctggttggccatttggcaacggcaacccaaatcagtttttaggtgttccaaaggattggcgtaatggagattggttctgcagctgtggatctcataactattcatctcgtactcagtgcaaagagtgtggtgcacctgtaccatcgagcattccctccacaacaatgaaagctacatctgatgcctcttccagtgcaaaactcagaaagaatctgcagttcaccctggtgtgttatagcttgctgttggattattttgttccaggatatgttgctgcctgttctagctccttcctcaaggctgcggtttgagttttttcgattctgcagtgtttttgctgctctaaaatgtttgtctcgatatttcattagtgcttgttgaagttccccatttgtttatggtataagcgcttgaataaaatgtttctggaaagtaccggcctacaatctggattttggcaaaataattgaattagttgttgtacaatgaggcaaattgtcttacgttgtacttgatgaactctggagtattatcactcgtcgggttgaaaaggggaactatacaatgtaatttcagtacagattattattttttcctgagaactccagttgtgctgttatgcgagttttgcccattcagaatacttttgatgcattcatcagaattcggctgttactttttc

SEQ ID NO: 13438 - DNA, 893 bp, Zea Mays
atcaatccctcgcccacaaaggagagccagccaaaccttccacctcctccatttccagccccgtccccacaccagctcgcgtaacctcctccccatggctggaggcggcggcgcaggcgcgggctcgtcgtccggcggcggcggagggggcggcagggagggcgactgggactgcggcagctgcggcaaccgcaactacgccttccgctcgctttgcaaccgctgcaagcatccgcgcctcctcgtcgaccccaacaccccgcgcgactccaagtggctaccccgcgccggggactggatctgcaccgcagcaactacttgcaaatgcaaactggccctatgggatggctggtagatatgggatgcaatcttctggttggccatttggcaacggcaacccaaatcagtttttaggtgttccaaaggattggcgtaatggagattggttctgcagctgtggatctcataactattcatctcgtactcagtgcaaagagtgtggtgcacctgtaccatcgagcattccctccacaacaatgaaagctacatctgatgcctcttccagtatttatgcaatgctgtacactgtgttaaacatctggcaagtggttcactggtggacgcatctccaggtccgagcgtaaaaatcttaagttttgagcataaaacccctcggttataagcgtaaataccgagccaatatgaggttcatatctatggtgggttgtattcacgatcctatttttatgttaattccgaaaaatatgggagtcacatccatggggtttatatttttatgcagatccaaaaattatggcagatttgtggtggtgtagtattgtatggttaagacttataagacttatgtatcgtgtggttgagagttgaaactt

SEQ ID NO: 13439 - DNA, 2747 bp, Zea Mays
atcaatccctcgcccacaaaggagagccagccaaaccttccacctcctccatttccagccccgtccccacaccagctcgcgtaacctcctccccatggctggaggcggcggcgcaggcgcgggctcgtcgtccggcggcggcggagggggcggcagggagggcgactgggactgcggcagctgcggcaaccgcaactacgccttccgctcgctttgcaaccgctgcaagcatccgcgcctcctcgtcgaccccaacaccccgcgcgactccaagtggctaccccgcgccggggactggatctgcaccggttgcagtaacaataattatgcatccagaaagaactgcaaaaagtgtggcttgcccaaggaggaagcagcaatgccagcattgcaaatggcagggatggctatgccagcttatgcaacttatattgcaagactacaaagccttgctgcttctgcttctgcctataacatgaactttgggatggctgccaattcacctttgcagcagcaactacttgcaaatgcaaactggccctatgggatggctggtagatatgggatgcaatcttctggttggccatttggcaacggcaacccaaatcagtttttaggtgttccaaaggattggcgtaatggagattggttctgcagctgtggatctcataactattcatctcgtactcagtgcaaagagtgtggtgcacctgtaccatcgagcattccctccacaacaatgaaagctacatctgatgcctcttccagtatttatgcaatgctgtacactgtgttaaacatctggcaagtggttcactggtggacgcatctccaggtccgagcgtaaaaatcttaagttttgagcataaaacccctcggttataagcgtaaataccgagccaatatgaggttcatatctatgatggtttcgaagaaaacaataaacagggcttaaaaatattgttgaagctgctgtggtagccaatattgttggcagatttgcggaagcatgcgccgagcagaagaagaaaaccaacgttggtatagtatctccatatgcagcccaattagacaaaataatggtgggaatataggctttgttgattgtgttatgagaactaatgtggctttgacaagagcaaagcactgcatgtggatccttggacatgaattcaacatggtatgatttagtcaaagacgcgaaggatcgtgaatgtttctttaaagctcgcgatgatgatttttttgctagaacaatggatcagtttagacttatgcaaaactcacaggtgacagacaatgtttcacgatggaacattgaatgccagtgtgctccagatgcacaactcacatgtgacaaccatgctacaataccagacaaggctccagatgcacaactcacaggtgacaaccgtgccacaataccagacaaggcacaggttgtagagcctgcacatgcagagcaggtgcctatgcagtcagaaagagctgcagaaaagacatggcagctgtgtcttaatcagctctcgcacattccttcttttgctccaggtgaacaactaacagacgaaaaggttgtagagcctgcacatgcaaagcaagtgcatcttgctcagctctcgcccagtccatcaagggagagggcccgtctcagtcagtttgctcaaggtgctcaactcacagatgaagaagcggctgcactagaggaagaagaccatcctcaaattgaccttctggatggtttgcggcgcggaggccggctgcggggttccggggcagcgcgtctcgcggaggtgcgtagacgacggcggagcggcgtcctcacctccatggcgtcgctgtcgagcaagcaccacgtcctaatccaggtgctgctcgcccgcggcccgctctctgagcgcgacttccacgctttcatcgatggcgcctttggcaagaacaccgcattaggaactaagcggttggcttcagaggacctggccaatgactgggataataaaaggctaaatccaggaaatgacaattatccactttcaacaggagctgcaaataatttatttttgggtattgagcaaggagctggaagcagcaatggccagtctgcctttcccaagtttgacaatgggagctcagtggcattaccatctgggcagggaatgtctggtcttatgggaaaaggggcaaaatggcgtgacggggactggttgtgcaacaactgcaacaatcacaactatgcatctcgtgcgttttgcaacaggtgcaaaactcagaaagaatctgcagttcaccctggtgtgttatagcttgctgttggattattttgttccaggatatgttgctgcctgttctagctccttcctcaaggctgcggtttgagttttttcgattctgcagtgtttttgctgctctaaaatgtttgtctcgatatttcattagtgcttgttgaagttccccatttgtttatggtataagcgcttgaataaaatgtttctggaaagtaccggcctacaatctggattttggcaaaataattgaattagttgttgtacaatgaggcaaattgtcttacgttgtacttgatgaactctggagtattatcactcgtcgggttgaaaaggggaactatacaatgtaatttcagtacagattattattttttcctgagaactccagttgtgctgttatgcgagttttgcccattcagaatacttttgatgcattcatcagaattcggctgttactttttc

SEQ ID NO: 13440 - DNA, 2632 bp, Zea Mays
gtcaaggttaatagctgactactgctttcacatctgttggggttttctgccaacttctaccgagttacactggttagactgttggagaaactcccatcatcagtctgtacaaaaacgggtatttatgcaatgctgtacactgtgttaaacatctggcaagtggttcactggtggacgcatctccaggtccgagcgtaaaaatcttaagttttgagcataaaacccctcggttataagcgtaaataccgagccaatatgaggttcatatctatggtgggttgtattcacgatcctatttttatgttaattccgaaaaatatgggagtcacatccatggggtttatatttttatgcagatccaaaaattatggcagatttgtggtggtgtagtattgtatggttaagacttataagacttatgtatcgtgtggttgagagttgaaacttatttgtggatttgtgattgctaaagagaacaggtttgggcgaagcctctttgagagattaagtggacttgatttcccaaagcacatgctaaatattcaatatagaatgcaccctttcatcagcaagtttccaaatcaaaaattttatgaaggaaaaattatagatggtctgaacgttaaggactataacaatatttatctcgatgtgcatatatatggtccttattcattcatccatgttgaagatggtttcgaagaaaacaataaacagggcttaaaaatattgttgaagctgctgtggtagccaatattgttggcagatttgcggaagcatgcgccgagcagaagaagaaaaccaacgttggtatagtatctccatatgcagcccaagtaatttctttgcaagaaagagttcagatttataagaagcatgactttctttctattgaagtatgcattgttgattcatgtcaaagtgctgagaaagacattaatcctttcaacagttagacaaaataatggtgggaatataggctttgttgattgtgttatgagaactaatgtggctttgacaagagcaaagcactgcatgtggatccttggacatgaattcaacatggtatgatttagtcaaagacgcgaaggatcgtgaatgtttctttaaagctcgcgatgatgatttttttgctagaacaatggatcagtttagacttatgcaaaactcacaggtgacagacaatgtttcacgatggaacattgaatgccagtgtgctccagatgcacaactcacatgtgacaaccatgctacaataccagacaaggctccagatgcacaactcacaggtgacaaccgtgccacaataccagacaaggcacaggttgtagagcctgcacatgcagagcaggtgcctatgcagtcagaaagagctgcagaaaagacatggcagctgtgtcttaatcagctctcgcacattccttcttttgctccaggtgaacaactaacagacgaaaaggttgtagagcctgcacatgcaaagcaagtgcatcttgctcagctctcgcccagtccatcaagggagagggcccgtctcagtcagtttgctcaaggtgctcaactcacagatgaagaagcggctgcactagaggaagaagaccatcctcaaattgaccttctggatggtttgcggcgcggaggccggctgcggggttccggggcagcgcgtctcgcggaggtgcgtagacgacggcggagcggcgtcctcacctccatggcgtcgctgtcgagcaagcaccacgtcctaatccaggtgctgctcgcccgcggcccgctctctgagcgcgacttccacgctttcatcgatggcgcctttggcaagaacaccgcattaggaactaagcggttggcttcagaggacctggccaatgactgggataataaaaggctaaatccaggaaatgacaattatccactttcaacaggagctgcaaataatttatttttgggtattgagcaaggagctggaagcagcaatggccagtctgcctttcccaagtttgacaatgggagctcagtggcattaccatctgggcagggaatgtctggtcttatgggaaaaggggcaaaatggcgtgacggggactggttgtgcaacaactgcaacaatcacaactatgcatctcgtgcgttttgcaacaggtgcaaaactcagaaagaatctgcagttcaccctggtgtgttatagcttgctgttggattattttgttccaggatatgttgctgcctgttctagctccttcctcaaggctgcggtttgagttttttcgattctgcagtgtttttgctgctctaaaatgtttgtctcgatatttcattagtgcttgttgaagttccccatttgtttatggtataagcgcttgaataaaatgtttctggaaagtaccggcctacaatctggattttggcaaaataattgaattagttgttgtacaatgaggcaaattgtcttacgttgtacttgatgaactctggagtattatcactcgtcgggttgaaaaggggaactatacaatgtaatttcagtacagattattattttttcctgagaactccagttgtgctgttatgcgagttttgcccattcagaatacttttgatgcattcatcagaattcggctgttactttttc

SEQ ID NO: 13441 - DNA, 834 bp, Zea Mays
cgacttgctttctcaacatatggcatcttcgcattaggaactaagcggttggcttcagaggacctggccaatgactgggataataaaaggctaaatccaggaaatgacaattatccactttcaacaggagctgcaaataatttatttttgggtattgagcaaggagctggaagcagcaatggccagtctgcctttcccaagtttgacaatgggagctcagtggcattaccatctgggcagggaatgtctggtcttatgggaaaaggggcaaaatggcgtgacggggactggttgtgcaacaactgcaacaatcacaactatgcatctcgtgcgttttgcaacaggtgcaaaactcagaaagaatctgcagttcaccctggtgtgttatagcttgctgttggattattttgttccaggatatgttgctgcctgttctagctccttcctcaaggctgcggtttgagttttttcgattctgcagtgtttttgctgctctaaaatgtttgtctcgatatttcattagtgcttgttgaagttccccatttgtttatggtataagcgcttgaataaaatgtttctggaaagtaccggcctacaatctggattttggcaaaataattgaattagttgttgtacaatgaggcaaattgtcttacgttgtacttgatgaactctggagtattatcactcgtcgggttgaaaaggggaactatacaatgtaatttcagtacagattattattttttcctgagaactccagttgtgctgttatgcgagttttgcccattcagaatacttttgatgcattcatcagaattcggctgttactttttc

SEQ ID NO: 13442 - DNA, 3612 bp, Zea Mays
ccgtcgcatcgccggttgcagttctcgtttgactcggtcttcaccttgtcggtccagtcgattgccaggtacctcctcttccttcgcatctgctgaccacaaagtagggttcttgggtcctagggtttttagttcttgtggaatattggaattcagtggtaaattatagagcacttaataggattgcttgctacagaagtatcaagtgtcagctttgtctcagcacctaatcagtaattgcccagtccaataaatagttgtaatattttgtgtttcacttctctgaccattgtttaaaattgttgggggcgcaagggatgacatatcaccctggaacaccgatacacgattttcttgcagaaacccatacaatactttcataacagatggttaaactccttgcatcttttttcccttttaggttggagggatccgttggacatggcatggcctgatgtattggacacacttttcgtggatgcgtgtttcaaagaggttgagaacggcatctatgtaatagaattcactcaccttttttggcagaatgttacaaaatccattaataacacacgaatatgactattccacttaaggatctgcaaaataggtttaaatatttcaaagatttgtggggacggtacaataagcttacgcgacagttgtcaagtggcgcaggcccgataaagctctcacttgaagagataaaaaaagaacttgaatcgggtaaatacgaacgtatgttgcaatatttggatcagctcacacatatatttataagctgtgatgagcataagtcaccatcagtacctgcgtatcgtgccaatattagatgtgggaacttaagtagtgcaagtactgggaagcgcagcattgacgagacctcttccagccatgttcggcagaagagctcgaaagttcatttggctcagtcattacaaaatgacattacccacgaagatgcaatgcaatatcttaaagaccatgacatcttaggtggtactttaaaattttgtatagccaataagttacttaaagactatcaaaatctgaccacgttctcccgtctgaaatctcttgaggaaaggattagtttcctggaaggaacctgaaattaaaatctgatggatcagtttcctaccagtaacctggaaattagaatctgatccctcttccttaaaggtaatccagtttgtttaggtcttctgtagtcatgtcagttatttatcttgttcctgtgtttttttgctagtctagtttggccttaaaatctaagaggccagctaaaagcaaatacatgtcatggagactgtgttcaaccttggtttctttctgtttacatgtttttctatcttctgaaagtaatgatgattgtatattgctttctttgtaatagactagcaaaaaaaggtgagtgaattacaatccgtctgaaatctctttctttgaagtatttaaacctattttgcagatacttaagtggaatagtcatattcgtttgttcattaatggattttgtaacattctgccaaaaaaggtgagtgaattctgctacatagatgccgttctcaacctctttgaaacacgcatccacgaaaagtgtgtccaatacatcaggccgtgccatgtccaacggatccctccaacctaaaagggaaaaaaagatgcaaggagtttaaccatctgttctgaaagtattgtatggatttctgcaagcaaatcgtgtatcggtgttccagggtgatatgccatcccttgcgccctaacaattttaaacaatgattgctaaagagaacaggtttgggcgaagcctctttgagagattaagtggacttgatttcccaaagcacatgctaaatattcaatatagaatgcaccctttcatcagcaagtttccaaatcaaaaattttatgaaggaaaaattatagatggtctgaacgttaaggactataacaatatttatctcgatgtgcatatatatggtccttattcattcatccatgttgaagatggtttcgaagaaaacaataaacagggcttaaaaatattgttgaagctgctgtggtagccaatattgttggcagatttgcggaaggcactgcatgtggatccttggacatgaattcaacatggtatgatttagtcaaagacgcgaaggatcgtgaatgtttctttaaagctcgcgatgatgatttttttgctagaacaatggatcagtttagacttatgcaaaactcacaggtgacagacaatgtttcacgatggaacattgaatgccagtgtgctccagatgcacaactcacatgtgacaaccatgctacaataccagacaaggctccagatgcacaactcacaggtgacaaccgtgccacaataccagacaaggcacaggttgtagagcctgcacatgcagagcaggtgaacaactaacagacgaaaaggttgtagagcctgcacatgcaaagcaagtgcatcttgctcagctctcgcccagtccatcaagggagagggcccgtctcagtcagtttgctcaaggtgctcaactcacagatgaagaagcggctgcactagaggaagaagaccatcctcaaattgaccttctggatggtttgcggcgcggaggccggctgcggggttccggggcagcgcgtctcgcggaggtgcgtagacgacggcggagcggcgtcctcacctccatggcgtcgctgtcgagcaagcaccacgtcctaatccaggtgctgctcgcccgcggcccgctctctgagcgcgacttccacgctttcatcgatggcgcctttggcaagaacaccgcattaggaactaagcggttggcttcagaggacctggccaatgactgggataataaaaggctaaatccaggaaatgacaattatccactttcaacaggagctgcaaataatttatttttgggtattgagcaaggagctggaagcagcaatggccagtctgcctttcccaagtttgacaatgggagctcagtggcattaccatctgggcagggaatgtctggtcttatgggaaaaggggcaaaatggcgtgacggggactggttgtgcaacaactgcaacaatcacaactatgcatctcgtgcgttttgcaacaggtgcaaaactcagaaagaatctgcagttcaccctggtgtgttatagcttgctgttggattattttgttccaggatatgttgctgcctgttctagctccttcctcaaggctgcggtttgagttttttcgattctgcagtgtttttgctgctctaaaatgtttgtctcgatatttcattagtgcttgttgaagttccccatttgtttatggtataagcgcttgaataaaatgtttctggaaagtaccggcctacaatctggattttggcaaaataattgaattagttgttgtacaatgaggcaaattgtcttacgttgtacttgatgaactctggagtattatcactcgtcgggttgaaaaggggaactatacaatgtaatttcagtacagattattattttttcctgagaactccagttgtgctgttatgcgagttttgcccattcagaatacttttgatgcattcatcagaattcggctgttactttttc

SEQ ID NO: 13443 - DNA, 2053 bp, Zea Mays
ccgtcgcatcgccggttgcagttctcgtttgactcggtcttcaccttgtcggtccagtcgattgccaggtacctcctcttccttcgcatctgctgaccacaaagtagggttcttgggtcctagggtttttagttcttgtggaatattggaattcagtggtaaattatagagcacttaataggattgcttgctacagaagtatcaagtgtcagctttgtctcagcacctaatcagtaattgcccagtccaataaatagttgtaatattttgtgtttcacttctctgaccattgtttaaaattgttgggggcgcaagggatgacatatcaccctggaacaccgatacacgattttcttgcagaaacccatacaatactttcataacagatggttaaactccttgcatcttttttcccttttaggttggagggatccgttggacatggcatggcctgatgtattggacacacttttcgtggatgcgtgtttcaaagaggttgagaacggcatctatgtaatagaattcactcaccttttttggcagaatgttacaaaatccattaataacacacgaatatgactattccacttaaggatctgcaaaataggtttaaatatttcaaagatttgtggggacggtacaataagcttacgcgacagttgtcaagtggcgcaggcccgataaagctctcacttgaagaggtatctcacctgaacatttcagtctttctctatttatagaacttaacactaactgacgctttccattgcagataaaaaaagaacttgaatcgggtaaatacgaacgtatgttgcaatatttggatcagctcacacatatatttataagctgtgatgagcataagtcaccatcagtacctgcgtatcgtgccaatattagatgtgggaacttaagtagtgcaagtactgggaagcgcagcattgacgagacctcttccagccatgttcggcagaagagctcgaaagttcatttggctcagtcattacaaaatgacattacccacgaagatgcaatgcaatatcttaaagaccatgacatcttaggtggtactttaaaattttgtatagccaataagttacttaaagactatcaaaatctgaccacgttctcccgtctgaaatctcttgaggaaaggattagtttcctggaaggaacctgaaattaaaatctgatggatcagtttcctaccagtaacctggaaattagaatctgatccctcttccttaaagcattaggaactaagcggttggcttcagaggacctggccaatgactgggataataaaaggctaaatccaggaaatgacaattatccactttcaacaggagctgcaaataatttatttttgggtattgagcaaggagctggaagcagcaatggccagtctgcctttcccaagtttgacaatgggagctcagtggcattaccatctgggcagggaatgtctggtcttatgggaaaaggggcaaaatggcgtgacggggactggttgtgcaacaactgcaacaatcacaactatgcatctcgtgcgttttgcaacaggtgcaaaactcagaaagaatctgcagttcaccctggtgtgttatagcttgctgttggattattttgttccaggatatgttgctgcctgttctagctccttcctcaaggctgcggtttgagttttttcgattctgcagtgtttttgctgctctaaaatgtttgtctcgatatttcattagtgcttgttgaagttccccatttgtttatggtataagcgcttgaataaaatgtttctggaaagtaccggcctacaatctggattttggcaaaataattgaattagttgttgtacaatgaggcaaattgtcttacgttgtacttgatgaactctggagtattatcactcgtcgggttgaaaaggggaactatacaatgtaatttcagtacagattattattttttcctgagaactccagttgtgctgttatgcgagttttgcccattcagaatacttttgatgcattcatcagaattcggctgttactttttc

SEQ ID NO: 13444 - DNA, 2997 bp, Zea Mays
gaggactcgcccttcatttgttgggggagagaatggaggttggagggaggggcagaacttcaatgcgggcagtgaaggccagaaggggcacgccggcggcgacggcggagaccgtggtgttctgtgcagtggctaaatttctatagtaaaagctgtgcaccatgctgtgcagggagtttgccacgtcacttctttcttctcagccgttggataccaaacggagtacacaaaattgtccacgtcgcctttcaatagagtccattggatgtgcagggagtttgccacgtcacttctttcttctcagccgttggataccaaacggagtacacaaaattgtccacgtcgcctttcaatagagtccattggatgccttttaaacggtgcgtactctgccttcttttttttcctctcacatcctcccgtaagttccagagaaggctggacattggacactccggccaataagaaaacgggcaaaagaaagaaaaaaagaaggaaagcaacgggagaggcacgccctcgctcctggcagccgagaacgcgtctgctgctcctgatgactaggttttcatcctcctctcctcagtctctcgatcttgctcttctcaggtcctgtgacaacaaatctccctatccgcagcttccgcttctttgtgacagtaatcttcatatttttgcctgtcatccatgtcagcgaggtcctactttcatttacaatgtggagtagaactgtttgattgtttcttcatgccagttctgttttatagccatcaattcatgaagaccaatgtcatgacatgctttctcaatatctggcatctcaggaatttgtctgatcttttcccaattgatccatttattgtcagcacattacttcttgctatatatattgttgtatagattcatatgctcgttcgaccaaaaacggtcatcgcttgcagttctatcctgtagatacaaatttacgcataccttcccgacactttacagtgtacctaatgaggaccgcatgaagaagaaagttgagaatggaaaattgtcagaaatatttaaaagcaaaattgtttcttcaaaaaaatcaaaaacaaaagatgcaagacttgtgttttgcactccctataggtctagttggttggaaaatcagaaattccacatcttatttattgatgaggcagcatacttaaaagaatgtgaatcattgatccctcttgcaactagtgggataaaacatgtggtgcttgttggggatgacaaacaactacaatcagtggtaaagagcacgatatgtctttattataacttataagaccatttgaatatggtttcgaagaaaacaataaacagggcttaaaaatattgttgaagctgctgtggtagccaatattgttggcagatttgcggaagcatgcgccgagcagaagaagaaaaccaacgttggtatagtatctccatatgcagcccaagtaatttctttgcaagaaagagttcagatttataagaagcatgactttctttctattgaagtatgcattgttgattcatgtcaaagtgctgagaaagacattaatcctttcaacagttagacaaaataatggtgggaatataggctttgttgattgtgttatgagaactaatgtggctttgacaagagcaaagcactgcatgtggatccttggacatgaattcaacatggtgacagacaatgtttcacgatggaacattgaatgccagtgtgctccagatgcacaactcacatgtgacaaccatgctacaataccagacaaggctccagatgcacaactcacaggtgaacaactaacagacgaaaaggttgtagagcctgcacatgcaaagcaagtgcatcttgctcagctctcgcccagtccatcaagggagagggcccgtctcagtcagtttgctcaaggtgctcaactcacagatgaagaagcggctgcactagaggaagaagaccatcctcaaattgaccttctggatggtttgcggcgcggaggccggctgcggggttccggggcagcgcgtctcgcggaggtgcgtagacgacggcggagcggcgtcctcacctccatggcgtcgctgtcgagcaagcaccacgtcctaatccaggtgctgctcgcccgcggcccgctctctgagcgcgacttccacgctttcatcgatggcgcctttggcaagaacaccggaactaagcggttggcttcagaggacctggccaatgactgggataataaaaggctaaatccaggaaatgacaattatccactttcaacaggagctgcaaataatttatttttgggtattgagcaaggagctggaagcagcaatggccagtctgcctttcccaagtttgacaatgggagctcagtggcattaccatctgggcagggaatgtctggtcttatgggaaaaggggcaaaatggcgtgacggggactggttgtgcaacaactgcaacaatcacaactatgcatctcgtgcgttttgcaacaggtgcaaaactcagaaagaatctgcagttcaccctggtgtgttatagcttgctgttggattattttgttccaggatatgttgctgcctgttctagctccttcctcaaggctgcggtttgagttttttcgattctgcagtgtttttgctgctctaaaatgtttgtctcgatatttcattagtgcttgttgaagttccccatttgtttatggtataagcgcttgaataaaatgtttctggaaagtaccggcctacaatctggattttggcaaaataattgaattagttgttgtacaatgaggcaaattgtcttacgttgtacttgatgaactctggagtattatcactcgtcgggttgaaaaggggaactatacaatgtaatttcagtacagattattattttttcctgagaactccagttgtgctgttatgcgagttttgcccattcagaatacttttgatgcattcatcagaattcggctgttactttttc

SEQ ID NO: 13445 - DNA, 3710 bp, Zea Mays
gaggactcgcccttcatttgttgggggagagaatggaggttggagggaggggcagaacttcaatgcgggcagtgaaggccagaaggggcacgccggcggcgacggcggagaccgtggtgttctgtgcagtggctaaatttctatagtaaaagctgtgcaccatgctgtgcagggagtttgccacgtcacttctttcttctcagccgttggataccaaacggagtacacaaaattgtccacgtcgcctttcaatagagtccattggatgtgcagggagtttgccacgtcacttctttcttctcagccgttggataccaaacggagtacacaaaattgtccacgtcgcctttcaatagagtccattggatgccttttaaacggtgcgtactctgccttcttttttttcctctcacatcctcccgtaagttccagagaaggctggacattggacactccggccaataagaaaacgggcaaaagaaagaaaaaaagaaggaaagcaacgggagaggcacgccctcgctcctggcagccgagaacgcgtctgctgctcctgatgactaggttttcatcctcctctcctcagtctctcgatcttgctcttctcaggtcctgtgacaacaaatctccctatccgcagcttccgcttctttgtgacagtaatcttcatatttttgcctgtcatccatgtcagcgaggtcctactttcatttacaatgtggagtagaactgtttgattgtttcttcatgccagttctgttttatagccatcaattcatgaagaccaatgtcatgacatgctttctcaatatctggcatctcaggaatttgtctgatcttttcccaattgatccatttattgtcagcacattacttcttgctatatatattgttgtatagattcatatgctcgttcgaccaaaaacggtcatcgcttgcagttctatcctgtagatacaaatttacgcataccttcccgacactttacagtgtacctaatgaggaccgcatgaagaagaaagttgagaatggaaaattgtcagaaatatttaaaagcaaaattgtttcttcaaaaaaatcaaaaacaaaagatgcaagacttgtgttttgcactccctataggtctagttggttggaaaatcagaaattccacatcttatttattgatgaggcagcatacttaaaagaatgtgaatcattgatccctcttgcaactagtgggataaaacatgtggtgcttgttggggatgacaaacaactacaatcagtggtaaagagcacgatatgtctttattataacttataagaccatttgaatgtatccttgattccttgtgttaccaatgattatttctagactgctaatactttctccttactggtaagattgctaaagagaacaggtttgggcgaagcctctttgagagattaagtggacttgatttcccaaagcacatgctaaatattcaatatagaatgcaccctttcatcagcaagtttccaaatcaaaaattttatgaaggaaaaattatagatggtctgaacgttaaggactataacaatatttatctcgatgtgcatatatatggtccttattcattcatccatgttgaagatggtttcgaagaaaacaataaacagggcttaaaaatattgttgaagctgctgtggtagccaatattgttggcagatttgcggaaggtatgtctaacatttgagctgataaagaacatgtaagtttcattaaagctgatatgtttaagtgtcatccatgtttttttggtctataaccactacagcatgcgccgagcagaagaagaaaaccaacgttggtatagtatctccatatgcagcccaagtaatttctttgcaagaaagagttcagatttataagaagcatgactttctttctattgaagtatgcattgttgattcatgtcaaagtgctgagaaagacattaatcctttcaacagttagacaaaataatggtgggaatataggctttgttgattgtgttatgagaactaatgtggctttgacaagagcaaagtatgttaacttttgttcctttttgttggcttaattaaattttattttttttgttggcaaaggatcaacctttggatacttagttaattcaagatcccagtacatactcatctaaataattatttcttccacaggcactgcatgtggatccttggacatgaattcaacatggtatgatttagtcaaagacgcgaaggatcgtgaatgtttctttaaagctcgcgatgatgatttttttgctagaacaatggatcagtttagacttatgcaaaactcacaggtgacagacaatgtttcacgatggaacattgaatgccagtgtgctccagatgcacaactcacatgtgacaaccatgctacaataccagacaaggctccagatgcacaactcacaggtgacaaccgtgccacaataccagacaaggcacaggttgtagagcctgcacatgcagagcaggtgcctatgcagtcagaaagagctgcagaaaagacatggcagctgtgtcttaatcagctctcgcacattccttcttttgctccaggtgaacaactaacagacgaaaaggttgtagagcctgcacatgcaaagcaagtgcatcttgctcagctctcgcccagtccatcaagggagagggcccgtctcagtcagtttgctcaaggtgctcaactcacagatgaagaagcggctgcactagaggaagaagaccatcctcaaattgaccttctggatggtttgcggcgcggaggccggctgcggggttccggggcagcgcgtctcgcggaggtgcgtagacgacggcggagcggcgtcctcacctccatggcgtcgctgtcgagcaagcaccacgtcctaatccaggtgctgctcgcccgcggcccgctctctgagcgcgacttccacgctttcatcgatggcgcctttggcaagaacaccgcattaggaactaagcggttggcttcagaggacctggccaatgactgggataataaaaggctaaatccaggaaatgacaattatccactttcaacaggagctgcaaataatttatttttgggtattgagcaaggagctggaagcagcaatggccagtctgcctttcccaagtttgacaatgggagctcagtggcattaccatctgggcagggaatgtctggtcttatgggaaaagggtgcaaaactcagaaagaatctgcagttcaccctggtgtgttatagcttgctgttggattattttgttccaggatatgttgctgcctgttctagctccttcctcaaggctgcggtttgagttttttcgattctgcagtgtttttgctgctctaaaatgtttgtctcgatatttcattagtgcttgttgaagttccccatttgtttatggtataagcgcttgaataaaatgtttctggaaagtaccggcctacaatctggattttggcaaaataattgaattagttgttgtacaatgaggcaaattgtcttacgttgtacttgatgaactctggagtattatcactcgtcgggttgaaaaggggaactatacaatgtaatttcagtacagattattattttttcctgagaactccagttgtgctgttatgcgagttttgcccattcagaatacttttgatgcattcatcagaattcggctgttactttttc

SEQ ID NO: 13446 - DNA, 3355 bp, Zea Mays
gaggactcgcccttcatttgttgggggagagaatggaggttggagggaggggcagaacttcaatgcgggcagtgaaggccagaaggggcacgccggcggcgacggcggagaccgtggtgttctgtgcagtggctaaatttctatagtaaaagctgtgcaccatgctgtgcagggagtttgccacgtcacttctttcttctcagccgttggataccaaacggagtacacaaaattgtccacgtcgcctttcaatagagtccattggatgtgcagggagtttgccacgtcacttctttcttctcagccgttggataccaaacggagtacacaaaattgtccacgtcgcctttcaatagagtccattggatgccttttaaacggtgcgtactctgccttcttttttttcctctcacatcctcccgtaagttccagagaaggctggacattggacactccggccaataagaaaacgggcaaaagaaagaaaaaaagaaggaaagcaacgggagaggcacgccctcgctcctggcagccgagaacgcgtctgctgctcctgatgactaggttttcatcctcctctcctcagtctctcgatcttgctcttctcaggtcctgtgacaacaaatctccctatccgcagcttccgcttctttgtgacagtaatcttcatatttttgcctgtcatccatgtcagcgaggtcctactttcatttacaatgtggagtagaactgtttgattgtttcttcatgccagttctgttttatagccatcaattcatgaagaccaatgtcatgacatgctttctcaatatctggcatctcaggaatttgtctgatcttttcccaattgatccatttattgtcagcacattacttcttgctatatatattgttgtatagattcatatgctcgttcgaccaaaaacggtcatcgcttgcagttctatcctgtagatacaaatttacgcataccttcccgacactttacagtgtacctaatgaggaccgcatgaagaagaaagttgagaatggaaaattgtcagaaatatttaaaagcaaaattgtttcttcaaaaaaatcaaaaacaaaagatgcaagacttgtgttttgcactccctataggtctagttggttggaaaatcagaaattccacatcttatttattgatgaggcagcatacttaaaagaatgtgaatcattgatccctcttgcaactagtgggataaaacatgtggtgcttgttggggatgacaaacaactacaatcagtggtaaagagcacgatatgtctttattataacttataagaccatttgaatgtatccttgattccttgtgttaccaatgattatttctagactgctaatactttctccttactggtaagattgctaaagagaacaggtttgggcgaagcctctttgagagattaagtggacttgatttcccaaagcacatgctaaatattcaatatagaatgcaccctttcatcagcaagtttccaaatcaaaaattttatgaaggaaaaattatagatggtctgaacgttaaggactataacaatatttatctcgatgtgcatatatatggtccttattcattcatccatgttgaagatggtttcgaagaaaacaataaacagggcttaaaaatattgttgaagctgctgtggtagccaatattgttggcagatttgcggaagcatgcgccgagcagaagaagaaaaccaacgttggtatagtatctccatatgcagcccaattagacaaaataatggtgggaatataggctttgttgattgtgttatgagaactaatgtggctttgacaagagcaaagcactgcatgtggatccttggacatgaattcaacatggtatgatttagtcaaagacgcgaaggatcgtgaatgtttctttaaagctcgcgatgatgatttttttgctagaacaatggatcagtttagacttatgcaaaactcacaggtgacagacaatgtttcacgatggaacattgaatgccagtgtgctccagatgcacaactcacatgtgacaaccatgctacaataccagacaaggctccagatgcacaactcacaggtgacaaccgtgccacaataccagacaaggcacaggttgtagagcctgcacatgcagagcaggtgaacaactaacagacgaaaaggttgtagagcctgcacatgcaaagcaagtgcatcttgctcagctctcgcccagtccatcaagggagagggcccgtctcagtcagtttgctcaaggtgctcaactcacagatgaagaagcggctgcactagaggaagaagaccatcctcaaattgaccttctggatggtttgcggcgcggaggccggctgcggggttccggggcagcgcgtctcgcggaggtgcgtagacgacggcggagcggcgtcctcacctccatggcgtcgctgtcgagcaagcaccacgtcctaatccaggtgctgctcgcccgcggcccgctctctgagcgcgacttccacgctttcatcgatggcgcctttggcaagaacaccgcattaggaactaagcggttggcttcagaggacctggccaatgactgggataataaaaggctaaatccaggaaatgacaattatccactttcaacaggagctgcaaataatttatttttgggtattgagcaaggagctggaagcagcaatggccagtctgcctttcccaagtttgacaatgggagctcagtggcattaccatctgggcagggaatgtctggtcttatgggaaaaggggcaaaatggcgtgacggggactggttgtgcaacaactgcaacaatcacaactatgcatctcgtgcgttttgcaacaggtgcaaaactcagaaagaatctgcagttcaccctggtgtgttatagcttgctgttggattattttgttccaggatatgttgctgcctgttctagctccttcctcaaggctgcggtttgagttttttcgattctgcagtgtttttgctgctctaaaatgtttgtctcgatatttcattagtgcttgttgaagttccccatttgtttatggtataagcgcttgaataaaatgtttctggaaagtaccggcctacaatctggattttggcaaaataattgaattagttgttgtacaatgaggcaaattgtcttacgttgtacttgatgaactctggagtattatcactcgtcgggttgaaaaggggaactatacaatgtaatttcagtacagattattattttttcctgagaactccagttgtgctgttatgcgagttttgcccattcagaatacttttgatgcattcatcagaattcggctgttactttttc

SEQ ID NO: 13447 - DNA, 3184 bp, Zea Mays
gaggactcgcccttcatttgttgggggagagaatggaggttggagggaggggcagaacttcaatgcgggcagtgaaggccagaaggggcacgccggcggcgacggcggagaccgtggtgttctgtgcagtggctaaatttctatagtaaaagctgtgcaccatgctgtgcagggagtttgccacgtcacttctttcttctcagccgttggataccaaacggagtacacaaaattgtccacgtcgcctttcaatagagtccattggatgtgcagggagtttgccacgtcacttctttcttctcagccgttggataccaaacggagtacacaaaattgtccacgtcgcctttcaatagagtccattggatgccttttaaacggtgcgtactctgccttcttttttttcctctcacatcctcccgtaagttccagagaaggctggacattggacactccggccaataagaaaacgggcaaaagaaagaaaaaaagaaggaaagcaacgggagaggcacgccctcgctcctggcagccgagaacgcgtctgctgctcctgatgactaggttttcatcctcctctcctcagtctctcgatcttgctcttctcaggtcctgtgacaacaaatctccctatccgcagcttccgcttctttgtgacagtaatcttcatatttttgcctgtcatccatgtcagcgaggtcctactttcatttacaatgtggagtagaactgtttgattgtttcttcatgccagttctgttttatagccatcaattcatgaagaccaatgtcatgacatgctttctcaatatctggcatctcaggaatttgtctgatcttttcccaattgatccatttattgtcagcacattacttcttgctatatatattgttgtatagattcatatgctcgttcgaccaaaaacggtcatcgcttgcagttctatcctgtagatacaaatttacgcataccttcccgacactttacagtgtacctaatgaggaccgcatgaagaagaaagttgagaatggaaaattgtcagaaatatttaaaagcaaaattgtttcttcaaaaaaatcaaaaacaaaagatgcaagacttgtgttttgcactccctataggtctagttggttggaaaatcagaaattccacatcttatttattgatgaggcagcatacttaaaagaatgtgaatcattgatccctcttgcaactagtgggataaaacatgtggtgcttgttggggatgacaaacaactacaatcagtggtaaagagcacgatatgtctttattataacttataagaccatttgaatgtatccttgattccttgtgttaccaatgattatttctagactgctaatactttctccttactggtaagattgctaaagagaacaggtttgggcgaagcctctttgagagattaagtggacttgatttcccaaagcacatgctaaatattcaatatagaatgcaccctttcatcagcaagtttccaaatcaaaaattttatgaaggaaaaattatagatggtctgaacgttaaggactataacaatatttatctcgatgtgcatatatatggtccttattcattcatccatgttgaagatggtttcgaagaaaacaataaacagggcttaaaaatattgttgaagctgctgtggtagccaatattgttggcagatttgcggaagcatgcgccgagcagaagaagaaaaccaacgttggtatagtatctccatatgcagcccaattagacaaaataatggtgggaatataggctttgttgattgtgttatgagaactaatgtggctttgacaagagcaaagcactgcatgtggatccttggacatgaattcaacatggtgacagacaatgtttcacgatggaacattgaatgccagtgtgctccagatgcacaactcacatgtgacaaccatgctacaataccagacaaggctccagatgcacaactcacaggtgaacaactaacagacgaaaaggttgtagagcctgcacatgcaaagcaagtgcatcttgctcagctctcgcccagtccatcaagggagagggcccgtctcagtcagtttgctcaaggtgctcaactcacagatgaagaagcggctgcactagaggaagaagaccatcctcaaattgaccttctggatggtttgcggcgcggaggccggctgcggggttccggggcagcgcgtctcgcggaggtgcgtagacgacggcggagcggcgtcctcacctccatggcgtcgctgtcgagcaagcaccacgtcctaatccaggtgctgctcgcccgcggcccgctctctgagcgcgacttccacgctttcatcgatggcgcctttggcaagaacaccgcattaggaactaagcggttggcttcagaggacctggccaatgactgggataataaaaggctaaatccaggaaatgacaattatccactttcaacaggagctgcaaataatttatttttgggtattgagcaaggagctggaagcagcaatggccagtctgcctttcccaagtttgacaatgggagctcagtggcattaccatctgggcagggaatgtctggtcttatgggaaaaggggcaaaatggcgtgacggggactggttgtgcaacaactgcaacaatcacaactatgcatctcgtgcgttttgcaacaggtgcaaaactcagaaagaatctgcagttcaccctggtgtgttatagcttgctgttggattattttgttccaggatatgttgctgcctgttctagctccttcctcaaggctgcggtttgagttttttcgattctgcagtgtttttgctgctctaaaatgtttgtctcgatatttcattagtgcttgttgaagttccccatttgtttatggtataagcgcttgaataaaatgtttctggaaagtaccggcctacaatctggattttggcaaaataattgaattagttgttgtacaatgaggcaaattgtcttacgttgtacttgatgaactctggagtattatcactcgtcgggttgaaaaggggaactatacaatgtaatttcagtacagattattattttttcctgagaactccagttgtgctgttatgcgagttttgcccattcagaatacttttgatgcattcatcagaattcggctgttactttttc

SEQ ID NO: 13448 - DNA, 3380 bp, Zea Mays
gaggactcgcccttcatttgttgggggagagaatggaggttggagggaggggcagaacttcaatgcgggcagtgaaggccagaaggggcacgccggcggcgacggcggagaccgtggtgttctgtgcagtggctaaatttctatagtaaaagctgtgcaccatgctgtgcagggagtttgccacgtcacttctttcttctcagccgttggataccaaacggagtacacaaaattgtccacgtcgcctttcaatagagtccattggatgtgcagggagtttgccacgtcacttctttcttctcagccgttggataccaaacggagtacacaaaattgtccacgtcgcctttcaatagagtccattggatgccttttaaacggtgcgtactctgccttcttttttttcctctcacatcctcccgtaagttccagagaaggctggacattggacactccggccaataagaaaacgggcaaaagaaagaaaaaaagaaggaaagcaacgggagaggcacgccctcgctcctggcagccgagaacgcgtctgctgctcctgatgactaggttttcatcctcctctcctcagtctctcgatcttgctcttctcaggtcctgtgacaacaaatctccctatccgcagcttccgcttctttgtgacagtaatcttcatatttttgcctgtcatccatgtcagcgaggtcctactttcatttacaatgtggagtagaactgtttgattgtttcttcatgccagttctgttttatagccatcaattcatgaagaccaatgtcatgacatgctttctcaatatctggcatctcaggaatttgtctgatcttttcccaattgatccatttattgtcagcacattacttcttgctatatatattgttgtatagattcatatgctcgttcgaccaaaaacggtcatcgcttgcagttctatcctgtagatacaaatttacgcataccttcccgacactttacagtgtacctaatgaggaccgcatgaagaagaaagttgagaatggaaaattgtcagaaatatttaaaagcaaaattgtttcttcaaaaaaatcaaaaacaaaagatgcaagacttgtgttttgcactccctataggtctagttggttggaaaatcagaaattccacatcttatttattgatgaggcagcatacttaaaagaatgtgaatcattgatccctcttgcaactagtgggataaaacatgtggtgcttgttggggatgacaaacaactacaatcagtggtaaagagcacgatatgtctttattataacttataagaccatttgaatgtatccttgattccttgtgttaccaatgattatttctagactgctaatactttctccttactggtaagattgctaaagagaacaggtttgggcgaagcctctttgagagattaagtggacttgatttcccaaagcacatgctaaatattcaatatagaatgcaccctttcatcagcaagtttccaaatcaaaaattttatgaaggaaaaattatagatggtctgaacgttaaggactataacaatatttatctcgatgtgcatatatatggtccttattcattcatccatgttgaagatggtttcgaagaaaacaataaacagggcttaaaaatattgttgaagctgctgtggtagccaatattgttggcagatttgcggaaggtatgtctaacatttgagctgataaagaacatgtaagtttcattaaagctgatatgtttaagtgtcatccatgtttttttggtctataaccactacagcatgcgccgagcagaagaagaaaaccaacgttggtatagtatctccatatgcagcccaagtaatttctttgcaagaaagagttcagatttataagaagcatgactttctttctattgaagtatgcattgttgattcatgtcaaagtgctgagaaagacattaatcctttcaacagttagacaaaataatggtgggaatataggctttgttgattgtgttatgagaactaatgtggctttgacaagagcaaagtatgttaacttttgttcctttttgttggcttaattaaattttattttttttgttggcaaaggatcaacctttggatacttagttaattcaagatcccagtacatactcatctaaataattatttcttccacaggcactgcatgtggatccttggacatgaattcaacatggtatgatttagtcaaagacgcgaaggatcgtgaatgtttctttaaagctcgcgatgatgatttttttgctagaacaatggatcagtttagacttatgcaaaactcacaggtgacagacaatgtttcacgatggaacattgaatgccagtgtgctccagatgcacaactcacagatgaagaagcggctgcactagaggaagaagaccatcctcaaattgaccttctggatggtttgcggcgcggaggccggctgcggggttccggggcagcgcgtctcgcggaggtgcgtagacgacggcggagcggcgtcctcacctccatggcgtcgctgtcgagcaagcaccacgtcctaatccaggtgctgctcgcccgcggcccgctctctgagcgcgacttccacgctttcatcgatggcgcctttggcaagaacaccgcattaggaactaagcggttggcttcagaggacctggccaatgactgggataataaaaggctaaatccaggaaatgacaattatccactttcaacaggagctgcaaataatttatttttgggtattgagcaaggagctggaagcagcaatggccagtctgcctttcccaagtttgacaatgggagctcagtggcattaccatctgggcagggaatgtctggtcttatgggaaaagggtgcaaaactcagaaagaatctgcagttcaccctggtgtgttatagcttgctgttggattattttgttccaggatatgttgctgcctgttctagctccttcctcaaggctgcggtttgagttttttcgattctgcagtgtttttgctgctctaaaatgtttgtctcgatatttcattagtgcttgttgaagttccccatttgtttatggtataagcgcttgaataaaatgtttctggaaagtaccggcctacaatctggattttggcaaaataattgaattagttgttgtacaatgaggcaaattgtcttacgttgtacttgatgaactctggagtattatcactcgtcgggttgaaaaggggaactatacaatgtaatttcagtacagattattattttttcctgagaactccagttgtgctgttatgcgagttttgcccattcagaatacttttgatgcattcatcagaattcggctgttactttttc

SEQ ID NO: 13449 - DNA, 3024 bp, Zea Mays
gaggactcgcccttcatttgttgggggagagaatggaggttggagggaggggcagaacttcaatgcgggcagtgaaggccagaaggggcacgccggcggcgacggcggagaccgtggtgttctgtgcagtggctaaatttctatagtaaaagctgtgcaccatgctgtgcagggagtttgccacgtcacttctttcttctcagccgttggataccaaacggagtacacaaaattgtccacgtcgcctttcaatagagtccattggatgtgcagggagtttgccacgtcacttctttcttctcagccgttggataccaaacggagtacacaaaattgtccacgtcgcctttcaatagagtccattggatgccttttaaacggtgcgtactctgccttcttttttttcctctcacatcctcccgtaagttccagagaaggctggacattggacactccggccaataagaaaacgggcaaaagaaagaaaaaaagaaggaaagcaacgggagaggcacgccctcgctcctggcagccgagaacgcgtctgctgctcctgatgactaggttttcatcctcctctcctcagtctctcgatcttgctcttctcaggtcctgtgacaacaaatctccctatccgcagcttccgcttctttgtgacagtaatcttcatatttttgcctgtcatccatgtcagcgaggtcctactttcatttacaatgtggagtagaactgtttgattgtttcttcatgccagttctgttttatagccatcaattcatgaagaccaatgtcatgacatgctttctcaatatctggcatctcaggaatttgtctgatcttttcccaattgatccatttattgtcagcacattacttcttgctatatatattgttgtatagattcatatgctcgttcgaccaaaaacggtcatcgcttgcagttctatcctgtagatacaaatttacgcataccttcccgacactttacagtgtacctaatgaggaccgcatgaagaagaaagttgagaatggaaaattgtcagaaatatttaaaagcaaaattgtttcttcaaaaaaatcaaaaacaaaagatgcaagacttgtgttttgcactccctataggtctagttggttggaaaatcagaaattccacatcttatttattgatgaggcagcatacttaaaagaatgtgaatcattgatccctcttgcaactagtgggataaaacatgtggtgcttgttggggatgacaaacaactacaatcagtggtaaagagcacgatatgtctttattataacttataagaccatttgaatgtatccttgattccttgtgttaccaatgattatttctagactgctaatactttctccttactggtaagattgctaaagagaacaggtttgggcgaagcctctttgagagattaagtggacttgatttcccaaagcacatgctaaatattcaatatagaatgcaccctttcatcagcaagtttccaaatcaaaaattttatgaaggaaaaattatagatggtctgaacgttaaggactataacaatatttatctcgatgtgcatatatatggtccttattcattcatccatgttgaagatggtttcgaagaaaacaataaacagggcttaaaaatattgttgaagctgctgtggtagccaatattgttggcagatttgcggaaggtatgtctaacatttgagctgataaagaacatgtaagtttcattaaagctgatatgtttaagtgtcatccatgtttttttggtctataaccactacagcatgcgccgagcagaagaagaaaaccaacgttggtatagtatctccatatgcagcccaagtaatttctttgcaagaaagagttcagatttataagaagcatgactttctttctattgaagtatgcattgttgattcatgtcaaagtgctgagaaagacattaatcctttcaacagttagacaaaataatggtgggaatataggctttgttgattgtgttatgagaactaatgtggctttgacaagagcaaagtatgttaacttttgttcctttttgttggcttaattaaattttattttttttgttggcaaaggatcaacctttggatacttagttaattcaagatcccagtacatactcatctaaataattatttcttccacaggcactgcatgtggatccttggacatgaattcaacatgcattaggaactaagcggttggcttcagaggacctggccaatgactgggataataaaaggctaaatccaggaaatgacaattatccactttcaacaggagctgcaaataatttatttttgggtattgagcaaggagctggaagcagcaatggccagtctgcctttcccaagtttgacaatgggagctcagtggcattaccatctgggcagggaatgtctggtcttatgggaaaaggggcaaaatggcgtgacggggactggttgtgcaacaactgcaacaatcacaactatgcatctcgtgcgttttgcaacaggtgcaaaactcagaaagaatctgcagttcaccctggtgtgttatagcttgctgttggattattttgttccaggatatgttgctgcctgttctagctccttcctcaaggctgcggtttgagttttttcgattctgcagtgtttttgctgctctaaaatgtttgtctcgatatttcattagtgcttgttgaagttccccatttgtttatggtataagcgcttgaataaaatgtttctggaaagtaccggcctacaatctggattttggcaaaataattgaattagttgttgtacaatgaggcaaattgtcttacgttgtacttgatgaactctggagtattatcactcgtcgggttgaaaaggggaactatacaatgtaatttcagtacagattattattttttcctgagaactccagttgtgctgttatgcgagttttgcccattcagaatacttttgatgcattcatcagaattcggctgttactttttc

SEQ ID NO: 13450 - DNA, 3437 bp, Zea Mays
gaggactcgcccttcatttgttgggggagagaatggaggttggagggaggggcagaacttcaatgcgggcagtgaaggccagaaggggcacgccggcggcgacggcggagaccgtggtgttctgtgcagtggctaaatttctatagtaaaagctgtgcaccatgctgtgcagggagtttgccacgtcacttctttcttctcagccgttggataccaaacggagtacacaaaattgtccacgtcgcctttcaatagagtccattggatgtgcagggagtttgccacgtcacttctttcttctcagccgttggataccaaacggagtacacaaaattgtccacgtcgcctttcaatagagtccattggatgccttttaaacggtgcgtactctgccttcttttttttcctctcacatcctcccgtaagttccagagaaggctggacattggacactccggccaataagaaaacgggcaaaagaaagaaaaaaagaaggaaagcaacgggagaggcacgccctcgctcctggcagccgagaacgcgtctgctgctcctgatgactaggttttcatcctcctctcctcagtctctcgatcttgctcttctcaggtcctgtgacaacaaatctccctatccgcagcttccgcttctttgtgacagtaatcttcatatttttgcctgtcatccatgtcagcgaggtcctactttcatttacaatgtggagtagaactgtttgattgtttcttcatgccagttctgttttatagccatcaattcatgaagaccaatgtcatgacatgctttctcaatatctggcatctcaggaatttgtctgatcttttcccaattgatccatttattgtcagcacattacttcttgctatatatattgttgtatagattcatatgctcgttcgaccaaaaacggtcatcgcttgcagttctatcctgtagatacaaatttacgcataccttcccgacactttacagtgtacctaatgaggaccgcatgaagaagaaagttgagaatggaaaattgtcagaaatatttaaaagcaaaattgtttcttcaaaaaaatcaaaaacaaaagatgcaagacttgtgttttgcactccctataggtctagttggttggaaaatcagaaattccacatcttatttattgatgaggcagcatacttaaaagaatgtgaatcattgatccctcttgcaactagtgggataaaacatgtggtgcttgttggggatgacaaacaactacaatcagtggtaaagagcacgatatgtctttattataacttataagaccatttgaatgtatccttgattccttgtgttaccaatgattatttctagactgctaatactttctccttactggtaagattgctaaagagaacaggtttgggcgaagcctctttgagagattaagtggacttgatttcccaaagcacatgctaaatattcaatatagaatgcaccctttcatcagcaagtttccaaatcaaaaattttatgaaggaaaaattatagatggtctgaacgttaaggactataacaatatttatctcgatgtgcatatatatggtccttattcattcatccatgttgaagatggtttcgaagaaaacaataaacagggcttaaaaatattgttgaagctgctgtggtagccaatattgttggcagatttgcggaaggtatgtctaacatttgagctgataaagaacatgtaagtttcattaaagctgatatgtttaagtgtcatccatgtttttttggtctataaccactacagcatgcgccgagcagaagaagaaaaccaacgttggtatagtatctccatatgcagcccaagtaatttctttgcaagaaagagttcagatttataagaagcatgactttctttctattgaagtatgcattgttgattcatgtcaaagtgctgagaaagacattaatcctttcaacagttagacaaaataatggtgggaatataggctttgttgattgtgttatgagaactaatgtggctttgacaagagcaaagcactgcatgtggatccttggacatgaattcaacatggtatgatttagtcaaagacgcgaaggatcgtgaatgtttctttaaagctcgcgatgatgatttttttgctagaacaatggatcagtttagacttatgcaaaactcacaggtgacagacaatgtttcacgatggaacattgaatgccagtgtgctccagatgcacaactcacatgtgacaaccatgctacaataccagacaaggctccagatgcacaactcacaggtgacaaccgtgccacaataccagacaaggcacaggttgtagagcctgcacatgcagagcagatgaagaagcggctgcactagaggaagaagaccatcctcaaattgaccttctggatggtttgcggcgcggaggccggctgcggggttccggggcagcgcgtctcgcggaggtgcgtagacgacggcggagcggcgtcctcacctccatggcgtcgctgtcgagcaagcaccacgtcctaatccaggtgctgctcgcccgcggcccgctctctgagcgcgacttccacgctttcatcgatggcgcctttggcaagaacaccgcattaggaactaagcggttggcttcagaggacctggccaatgactgggataataaaaggctaaatccaggaaatgacaattatccactttcaacaggagctgcaaataatttatttttgggtattgagcaaggagctggaagcagcaatggccagtctgcctttcccaagtttgacaatgggagctcagtggcattaccatctgggcagggaatgtctggtcttatgggaaaaggggcaaaatggcgtgacggggactggttgtgcaacaactgcaacaatcacaactatgcatctcgtgcgttttgcaacaggtgcaaaactcagaaagaatctgcagttcaccctggtgtgttatagcttgctgttggattattttgttccaggatatgttgctgcctgttctagctccttcctcaaggctgcggtttgagttttttcgattctgcagtgtttttgctgctctaaaatgtttgtctcgatatttcattagtgcttgttgaagttccccatttgtttatggtataagcgcttgaataaaatgtttctggaaagtaccggcctacaatctggattttggcaaaataattgaattagttgttgtacaatgaggcaaattgtcttacgttgtacttgatgaactctggagtattatcactcgtcgggttgaaaaggggaactatacaatgtaatttcagtacagattattattttttcctgagaactccagttgtgctgttatgcgagttttgcccattcagaatacttttgatgcattcatcagaattcggctgttactttttc

SEQ ID NO: 13451 - DNA, 2809 bp, Zea Mays
gaggactcgcccttcatttgttgggggagagaatggaggttggagggaggggcagaacttcaatgcgggcagtgaaggccagaaggggcacgccggcggcgacggcggagaccgtggtgttctgtgcagtggctaaatttctatagtaaaagctgtgcaccatgctgtgcagggagtttgccacgtcacttctttcttctcagccgttggataccaaacggagtacacaaaattgtccacgtcgcctttcaatagagtccattggatgtgcagggagtttgccacgtcacttctttcttctcagccgttggataccaaacggagtacacaaaattgtccacgtcgcctttcaatagagtccattggatgccttttaaacggtgcgtactctgccttcttttttttcctctcacatcctcccgtaagttccagagaaggctggacattggacactccggccaataagaaaacgggcaaaagaaagaaaaaaagaaggaaagcaacgggagaggcacgccctcgctcctggcagccgagaacgcgtctgctgctcctgatgactaggttttcatcctcctctcctcagtctctcgatcttgctcttctcaggtcctgtgacaacaaatctccctatccgcagcttccgcttctttgtgacagtaatcttcatatttttgcctgtcatccatgtcagcgaggtcctactttcatttacaatgtggagtagaactgtttgattgtttcttcatgccagttctgttttatagccatcaattcatgaagaccaatgtcatgacatgctttctcaatatctggcatctcaggaatttgtctgatcttttcccaattgatccatttattgtcagcacattacttcttgctatatatattgttgtatagattcatatgctcgttcgaccaaaaacggtcatcgcttgcagttctatcctgtagatacaaatttacgcataccttcccgacactttacagtgtacctaatgaggaccgcatgaagaagaaagttgagaatggaaaattgtcagaaatatttaaaagcaaaattgtttcttcaaaaaaatcaaaaacaaaagatgcaagacttgtgttttgcactccctataggtctagttggttggaaaatcagaaattccacatcttatttattgatgaggcagcatacttaaaagaatgtgaatcattgatccctcttgcaactagtgggataaaacatgtggtgcttgttggggatgacaaacaactacaatcagtggtaaagagcacgatatgtctttattataacttataagaccatttgaatatggtttcgaagaaaacaataaacagggcttaaaaatattgttgaagctgctgtggtagccaatattgttggcagatttgcggaagcatgcgccgagcagaagaagaaaaccaacgttggtatagtatctccatatgcagcccaattagacaaaataatggtgggaatataggctttgttgattgtgttatgagaactaatgtggctttgacaagagcaaagcactgcatgtggatccttggacatgaattcaacatggtgacagacaatgtttcacgatggaacattgaatgccagtgtgctccagatgcacaactcacatgtgacaaccatgctacaataccagacaaggctccagatgcacaactcacaggtgaacaactaacagacgaaaaggttgtagagcctgcacatgcaaagcaagtgcatcttgctcagctctcgcccagtccatcaagggagagggcccgtctcagtcagtttgctcaaggtgctcaactcacagatgaagaagcggctgcactagaggaagaagaccatcctcaaattgaccttctggatggtttgcggcgcggaggccggctgcggggttccggggcagcgcgtctcgcggaggtgcgtagacgacggcggagcggcgtcctcacctccatggcgtcgctgtcgagcaagcaccacgtcctaatccaggtgctgctcgcccgcggcccgctctctgagcgcgacttccacgctttcatcgatggcgcctttggcaagaacaccgcattaggaactaagcggttggcttcagaggacctggccaatgactgggataataaaaggctaaatccaggaaatgacaattatccactttcaacaggagctgcaaataatttatttttgggtattgagcaaggagctggaagcagcaatggccagtctgcctttcccaagtttgacaatgggagctcagtggcattaccatctgggcagggaatgtctggtcttatgggaaaagggtgcaaaactcagaaagaatctgcagttcaccctggtgtgttatagcttgctgttggattattttgttccaggatatgttgctgcctgttctagctccttcctcaaggctgcggtttgagttttttcgattctgcagtgtttttgctgctctaaaatgtttgtctcgatatttcattagtgcttgttgaagttccccatttgtttatggtataagcgcttgaataaaatgtttctggaaagtaccggcctacaatctggattttggcaaaataattgaattagttgttgtacaatgaggcaaattgtcttacgttgtacttgatgaactctggagtattatcactcgtcgggttgaaaaggggaactatacaatgtaatttcagtacagattattattttttcctgagaactccagttgtgctgttatgcgagttttgcccattcagaatacttttgatgcattcatcagaattcggctgttactttttc

SEQ ID NO: 13452 - DNA, 3573 bp, Zea Mays
ggtcgtttgagttcaccgaaggtgggcaccaatattgttcgcttgttctcgaatgctgtgaatcaagtatatggcaacacaatagtcaaatattaaggaccttcgtccttcgaagcattatctcctctcggatataatgatcttcagacgaaggtcatgaagaacacgtctccatgattcataaggaataagagattatacacacaaggtgtattatccattcatatattcattctctaataaacatattaacattaacagaaattatattacattgataccttcggcttgtttcaaggtgatgatgcgagagcaattacaatccagcgtgaacagtacgagggtactattcatctatttataggcaaccgtaaggtttcatacgctattacatttatgccctcaataattacatataaagtttacaagatgtcgcaagggcaacatcgccatttgtatttaataacttgagaaacaccttctccttgcatcgtctcattatttcgtcatgacgaagcctgcttgatgaagcgtgcttcgttgtacttccttttcattatgccgaagccacgttgtcaacccatttcaccgtgatgaagcctgttggacgaagcttgcttcgctcctcttgtgttataccgaagcatttatggtgacgaagctcctgtaatattcagtagtatactgaaagcaaatggttagccgtatttttgagaaccttcggaagaggaaggccccaacatttccaaaactcaagttttacatgttagaaagagtaatatttattacaagtcctgatagaactcaaagtgcataacttacatacaaaactaggaaggtagaacccttccaaagctcacacataaacctaactaatccaccttcaagactggaagcatcttctagccacagggacacctagaatactcctgattaactgcaacaacatgggttcggaaaccctgagtacgaagtgtactttcgcaagtcttacccaactaaggaaaaatactctcaatgatatgctagatttgggaatcaaggtaaggtttagcaaaaatcaagcttactcatttgcagaaataagcatctaatagtggatccttactttcaacattttaattctgaaataagtattatttgactttattcgcatctagaccaacttcatcatcacattaatcagtactacatgatttttactcattatgattccatccatcacttagattgcagggtagtgatcaattctccattatccaaggatataacagtgattcaaatcgatttacctagctggggatctctaaccacatgacatatgtagcacttaacccttgcatatgccaacctgcaatctcaagatcatatcgggttcacgccaaccaagagcacagttactccaccgtccagtctcttgccacggagggtacacgctattctcgtcatctctccactttcattgtgtggtagcctttctagtattggtcaagctgaggttaggcttaccctatcccataccagggcatgtggctagttaaatagtcctcgatcatcaagcctacattcgctataatctttaatcaacctgggaagaacatcacttgttcctagaccaagtctcgaattaagtactttcatccttaggacttatttgtgtaccttaggatgattaaaacatcacagggaaccttgcattagatctccccatgatcctggtgaaaatattcttgtaggtagagtcatccttccttagaataaaccctgagctacacattagtgcaaaggacaaactctatctacaagacttatctctaggtagggctaagcaattttgtaaacaatatttgatacttgcaaagaagtatctataaaaggaatggatatcaaggtagtcaatgaatcaaatagtttccaagcaactcctataaacttagtgcacatttcactagacttaaagtgtataaaagtcttttaaaaatacaatgaatgggcaaatgcagtggggcatgcctttgttgtagtgaagaggttctagatccctctatcaaataccatttagatggttcctccacttgatcagctgaagtagggtcctccttcaaacaccacttcttctaggtgttctacaattcaattataattacatgaatgcttatgtaatgatgtgaaatgcaaactctcataaggagaggtgggaacataaacacatgaactgaagcatatgacaagtatacacatacttctctataatctaatacttgacaaaagtgactaatttgaatttacttagagatcaatattcttttggtttcttcatccacagaccaactttcactagataaacttatctcctttccaaagcattaacccacacttgattaggaattaccattctattttggggcttataaggtttctggagaaaaatgattccaaacagccccaaacttttaccaagtgtttaacatcagataacaagcttctccaaaaatgcccatgatttttggtgttcaactcttatttctaaaattccaatagtccttccatgagcacctttaattcacttaaaattttctaactgcttcaaaaattccaaaaatatttttaatagaaatattctgaatttatacacctaataaaattggtcccttaatttgttttcattttctacaatttcttgcgttatttggaaggtctcagctaaataataaaggaaaaacatctaaactctgggccgattctggcccacacggcccacgaccagacacaggcggcccgcgctcgagagcccgcgccgcacatcatgcagaaaggccccaactgcactgacaaactaaataaaagcccaatctactgttgtcacgctcactgtcaagcgcacatcggtccctgtccctcggctttatcactttcacaagaactcggacccgatgccccgctgcctccctgactccctccgacgagctgagaacctgacacagcggcgctgatcttcaacgcccaccaaccccccctagcacgtgttcacggccaaggcaaagggaacccacagcttcactaccactgtccagcaatctaatgcactaacacgacgccggcgagatgcacggcccggcgagcccgatcctgagacactagaatagtagagttccaatcaagggcgcagagagcaggagggattcaccatgacctcagtgcttgcgcgaaattgctcgaggaagacgcggttgaacgggtcgacggcaaggctgtcctcagcatcagtctgcggcggcacaaccgtgtcccaatcaaatgacagcggtgacgttcaaaataccaacaaggaaagctttactgatcttaactgagtatggaacaaacaccacatggtcgagcaaatctcccgaaattcctggctacgtgaggtgaagaaactggtggcaatggtcaccagtctgaaggggatggcacaaaactctggacagggctaaccctggaacagacccacttaggaactagggagggtattaatactagcaggagcacaaggaccacaacacctgtgtagctatccttggatagaactcg

SEQ ID NO: 13453 - DNA, 364 bp, Zea Mays
aaagaactctagatgcaggtaactttacttaacctgacaagtaaaactggatttttaaggatccactcatagtaagttttttgcaaaatagagtctttgattcttgataagccataccttgaatctctctagccagcatacccttgagagtcttttctttagtcgggtaagtcttgctgagtaatttcgtactcatggttttattccctgttgtttttcaggttatagttttgtgctgctgctgatggtgttaagtagccagtgggctcggccttcttataagtctaagagcaaagagttgttcaggaggtagcccaggatccagcactagagcctgccatcgaggacctgcctgccccaactt

SEQ ID NO: 13454 - DNA, 300 bp, Zea Mays
aaagaactctagatgcaggtaactttacttaacctgacaagtaaaactggatttttaaggatccactcatagtaagttttttgcaaaatagagtctttgattcttgataagccataccttgaatctctctagccagcatacccttgagagtcttttctttagtcgggtaagtcttgctgagtaatttcgtactcatggttttattccctgttgtttttcaggttatagttttgtgctgctgctgatggtgttaagtagccagtgggctcggccttcttataagtctaagttctctggagg

SEQ ID NO: 13455 - DNA, 979 bp, Zea Mays
acggcacgaccctcgctcatgttctcatcttcccactccttccatttgtcctcttcctctccctcccacgccaccgtcaacgagctccagagccccgcaccgcgccgcccgccagcaaccaccccctcctcacccagatgccgcggctgccgggatcgcagcctgcgccggagcggcgactcgccgtgctcctgtcccacttccacccgtgttgcgaacctccacgcaccatcgcctgcgtcgccagcgtggagtgcctccggaccgcagccgaggaggaggccgagatgcagttgagcctctccacgtcgccctgcgcaggaggtgagaaggggggatcctcgggtggcgggcactgcgtgttctgcaacatcgtcgcgggcaccgcgcaggccttcaagctctacgaggatgatatgtgcttgtgcatcctggatgctaaacctctaacaagcgggcattcccttatcattccaaaaagtcattatccatcagtgcaaacaacaccaccaactgtactagcagctatctgctctaaattgccactcctgggtactgcaatcatgaaggctactcaatgtgatgcattcaatgtgctaatcaacaatggagagaaggcagggcaagttatttttcatactcatgtgcacatcattccacgtagcaaagatgataacctgtggtcttcagaggaaactacgcatcttgttagcagcatcaaggaaataatctcttcttcccccgaagactacagtactgtaatgtcatccacgccaaaggaactctgaaacaaattgaaaagaatgtagacaaccgattaaaagggcatcttttacttttcctctcgttcagcttcaagagcattgctgcgagatgaattgatgtacagctttgtctcagtcatgccttgaaattttgatagatattgataaagtactggttttagagaaggcaaatgcggtagatcctaaggtcgtag

SEQ ID NO: 13456 - DNA, 1486 bp, Zea Mays
gtcagatgggcttacttgaattccacgcgattttctagagtgcgtacagtcgtcgccagtctccgggagcccaaagcaagtgcccccactgccccggcggctgccgaacctctgctccggcgactaggttcccgcctccccgactctgccccaagcgagcgcggcacgcgtgtcgccttggcttcctctcttctgcttcagtctcgcgccgccggtttctatcctgccgtcgcccggagctcatcgtgctgacctccagtgacgcgctgaagggatctgggaacttcgaggatgctttgctgtgctggccaccaggcgtcccttctcctcttcgctctgctctctgtctcctcccttctgctcgtcgacggatcccatcaggaccaggaattcggtgaagctgttggatccagaattcttcaaacaaatccagacgcacatgaggtgcattgctcaagggaaaggagccgtgcagcttgggaagctattgatgagtatttgatgcccttcgtggaaaaagaaaaatatgaactcccaagcaaatgtagacttcgtcctgataatgacatgtttcgggagcaagagcaacataagattcattttgatattaatgagtggcactgtggcttttgcaagaaagctttccgagcagagaagttcattgatcagcattttgaaaatcgccacaagaatcttgtggataatagtgaaggaagatgcatggcagatctatgcggcgcactacattgtgatctgatgatgcagttcaaaaaaccaaaaagtaaatgcaatgcagctgcagctacaaggaatcgtcatctttgtgagagccttgcagacagttgctttcctattaatcaaggtcttgctgccagccgtcttcatgaaacaaacaaacaggttatacctcgctctctccattttgacgctgatacttttgccgctgttctatctaattgtgttcctgcaccagagggaaatgaggaaaggtacccaagatctaaaacggttttcgaaaattgggcagaagaaaaagccatcctagtgtccaacagtcacaacgttctcgagctcatggagccaaggatgagctggataaggaacgtggtatgcagtgtgaaatgtttttatgggcagggaagaaatttccctcatttccaggacgggaacaatgtccgcaggtcgaggaatgctggcttcgaccttttcttttctttttctttcttttttgtttcgacatgtagatgcaaacttcgagaggcaagcatgtgtggtctttgtgagattacggcgatattctatatcgtcaaccataaccgaagtcctattgataatttaaggatttttgggaggcctcaggcttaaaaaccaatgtcagtgaatgtagtatgacttctatccaatgtaatgatcaatgtgttggtgaggcacaatctttattcccttgcaacattgttggatttccttgcaaatatttggagcttcc

SEQ ID NO: 13457 - DNA, 1191 bp, Zea Mays
gcgattttctagagtgcgtacagtcgtcgccagtctccgggagcccaaagcaagtgcccccactgccccggcggctgccgaacctctgctccggcgactaggttcccgcctccccgactctgccccaagcgagcgcggcacgcgtgtcgccttggcttcctctcttctgcttcagtctcgcgccgccggtttctatcctgccgtcgcccggagctcatcgtgctgacctccagtgacgcgctgaagggatctgggaacttcgaggatgctttgctgtgctggccaccaggcgtcccttctcctcttcgctctgctctctgtctcctcccttctgctcgtcgacggatcccatcaggaccaggaattcggtgaagctgttggatccagaattcttcaaacaaatccagacgcacatgaggtgcattgctcaagggaaaggagccgtgcagcttgggaagctattgatgagtatttgatgcccttcgtggaaaaagaaaaatatgaactcccaagcaaatgtagacttcgtcctgataatgacatgtttcgggagcaagagcaacataagattcattttgatattaatgagtggcactgtggcttttgcaagaaagctttccgagcagagaagttcattgatcagcattttgaaaatcgccacaagaatcttgtggataatagtgaaggaagatgcatggcagatctatgcggcgcactacattgtgatctgatgatgcagttcaaaaaaccaaaaagtaaatgcaatgcagctgcagctacaaggaatcgtcatctttagccttgcagacagttgctttcctattaatcaaggtcttgctgccagccgtcttcatgaatttttcttgcgccagttttgtgatgctcacacttgcagtaagggaacaaaacctttccccaaaggtggcagggtgagcaaatttctgccagtagatcttacagtttatgaatgcttaatttatttcaggttattcagctttgcattaaacaatgaagctacatcagatagatgccgcctttataagcagtagatagcatttctaatgagatggcatcatttggttccttttctggctagggttttagtttcttgataatgcactgcctttcattttagcatgcttcgggctgtaaaacctttttctttatcaatgaaattggtagtttcgttcc

SEQ ID NO: 13458 - DNA, 1196 bp, Zea Mays
gcgattttctagagtgcgtacagtcgtcgccagtctccgggagcccaaagcaagtgcccccactgccccggcggctgccgaacctctgctccggcgactaggttcccgcctccccgactctgccccaagcgagcgcggcacgcgtgtcgccttggcttcctctcttctgcttcagtctcgcgccgccggtttctatcctgccgtcgcccggagctcatcgtgctgacctccagtgacgcgctgaagggatctgggaacttcgaggatgctttgctgtgctggccaccaggcgtcccttctcctcttcgctctgctctctgtctcctcccttctgctcgtcgacggatcccatcaggaccaggaattcggtgaagctgttggatccagaattcttcaaacaaatccagacgcacatgaggtgcattgctcaagggaaaggagccgtgcagcttgggaagctattgatgagtatttgatgcccttcgtggaaaaagaaaaatatgaactcccaagcaaatgtagacttcgtcctgataatgacatgtttcgggagcaagagcaacataagattcattttgatattaatgagtggcactgtggcttttgcaagaaagctttccgagcagagaagttcattgatcagcattttgaaaatcgccacaagaatcttgtggataatagtgaaggaagatgcatggcagatctatgcggcgcactacattgtgatctgatgatgcagttcaaaaaaccaaaaagtaaatgcaatgcagctgcagctacaaggaatcgtcatctttgtgagagccttgcagacagttgctttcctattaatcaaggtcttgctgccagccgtcttcatgaatttttcttgcgccagttttgtgatgctcacacttgcagtaagggaacaaaacctttccccaaaggtggcagggtgagcaaatttctgccagtagatcttacagtttatgaatgcttaatttatttcaggttattcagctttgcattaaacaatgaagctacatcagatagatgccgcctttataagcagtagatagcatttctaatgagatggcatcatttggttccttttctggctagggttttagtttcttgataatgcactgcctttcattttagcatgcttcgggctgtaaaacctttttctttatcaatgaaattggtagtttcgttcc

SEQ ID NO: 13459 - DNA, 1621 bp, Zea Mays
gcgattttctagagtgcgtacagtcgtcgccagtctccgggagcccaaagcaagtgcccccactgccccggcggctgccgaacctctgctccggcgactaggttcccgcctccccgactctgccccaagcgagcgcggcacgcgtgtcgccttggcttcctctcttctgcttcagtctcgcgccgccggtttctatcctgccgtcgcccggagctcatcgtgctgacctccagtgacgcgctgaagggatctgggaacttcgaggatgctttgctgtgctggccaccaggcgtcccttctcctcttcgctctgctctctgtctcctcccttctgctcgtcgacggatcccatcaggaccaggaattcggtgaagctgttggatccagaattcttcaaacaaatccagacgcacatgaggtgcattgctcaagggaaaggagccgtgcagcttgggaagctattgatgagtatttgatgcccttcgtggaaaaagaaaaatatgaactcccaagcaaatgtagacttcgtcctgataatgacatgtttcgggagcaagagcaacataagattcattttgatattaatgagtggcactgtggcttttgcaagaaagctttccgagcagagaagttcattgatcagcattttgaaaatcgccacaagaatcttgtggataatctggtcacttgaaaaagaacacgaggattactggacagctcttttttcacactaatttgcactacagttttcaacatacgcgtgatgagtgaaggaagatgcatggcagatctatgcggcgcactacattgtgatctgatgatgcagttcaaaaaaccaaaaagtaaatgcaatgcagctgcagctacaaggaatcgtcatctttgtgagagccttgcagacagttgctttcctattaatcaaggtcttgctgccagccgtcttcatgaatttttcttgcgccagttttgtgatgctcacacttgcagtaagggaacaaaacctttccccaaaggtggcaggaaacaaacaaacaggttatacctcgctctctccattttgacgctgatacttttgccgctgttctatctaattgtgttcctgcaccagagggaaatgaggaaaggtacccaagatctaaaacggttttcgaaaattgggcagaagaaaaagccatcctagtgtccaacagtcacaacgttctcgagctcatggagccaaggatgagctggataaggaacgtggtatgcagtgtgaaatgtttttatgggcagggaagaaatttccctcatttccaggacgggaacaatgtccgcaggtcgaggaatgctggcttcgaccttttcttttctttttctttcttttttgtttcgacatgtagatgcaaacttcgagaggcaagcatgtgtggtctttgtgagattacggcgatattctatatcgtcaaccataaccgaagtcctattgataatttaaggatttttgggaggcctcaggcttaaaaaccaatgtcagtgaatgtagtatgacttctatccaatgtaatgatcaatgtgttggtgaggcacaatctttattcccttgcaacattgttggatttccttgcaaatatttggagcttcc

SEQ ID NO: 13460 - DNA, 1397 bp, Zea Mays
gcgattttctagagtgcgtacagtcgtcgccagtctccgggagcccaaagcaagtgcccccactgccccggcggctgccgaacctctgctccggcgactaggttcccgcctccccgactctgccccaagcgagcgcggcacgcgtgtcgccttggcttcctctcttctgcttcagtctcgcgccgccggtttctatcctgccgtcgcccggagctcatcgtgctgacctccagtgacgcgctgaagggatctgggaacttcgaggatgctttgctgtgctggccaccaggcgtcccttctcctcttcgctctgctctctgtctcctcccttctgctcgtcgacggatcccatcaggaccaggaattcggtgaagctgttggatccagaattcttcaaacaaatccagacgcacatgaggtgcattgctcaagggaaaggagccgtgcagcttgggaagctattgatgagtatttgatgcccttcgtggaaaaagaaaaatatgaactcccaagcaaatgtagacttcgtcctgataatgacatgtttcgggagcaagagcaacataagattcattttgatattaatgagtggcactgtggcttttgcaagaaagctttccgagcagagaagttcattgatcagcattttgaaaatcgccacaagaatcttgtggataatagtgaaggaagatgcatggcagatctatgcggcgcactacattgtgatctgatgatgcagttcaaaaaaccaaaaagtaaatgcaatgcagctgcagctacaaggaatcgtcatctttaaacaaacaaacaggttatacctcgctctctccattttgacgctgatacttttgccgctgttctatctaattgtgttcctgcaccagagggaaatgaggaaaggtacccaagatctaaaacggttttcgaaaattgggcagaagaaaaagccatcctagtgtccaacagtcacaacgttctcgagctcatggagccaaggatgagctggataaggaacgtggtatgcagtgtgaaatgtttttatgggcagggaagaaatttccctcatttccaggacgggaacaatgtccgcaggtcgaggaatgctggcttcgaccttttcttttctttttctttcttttttgtttcgacatgtagatgcaaacttcgagaggcaagcatgtgtggtctttgtgagattacggcgatattctatatcgtcaaccataaccgaagtcctattgataatttaaggatttttgggaggcctcaggcttaaaaaccaatgtcagtgaatgtagtatgacttctatccaatgtaatgatcaatgtgttggtgaggcacaatctttattcccttgcaacattgttggatttccttgcaaatatttggagcttcc

SEQ ID NO: 13461 - DNA, 1487 bp, Zea Mays
gcgattttctagagtgcgtacagtcgtcgccagtctccgggagcccaaagcaagtgcccccactgccccggcggctgccgaacctctgctccggcgactaggttcccgcctccccgactctgccccaagcgagcgcggcacgcgtgtcgccttggcttcctctcttctgcttcagtctcgcgccgccggtttctatcctgccgtcgcccggagctcatcgtgctgacctccagtgacgcgctgaagggatctgggaacttcgaggatgctttgctgtgctggccaccaggcgtcccttctcctcttcgctctgctctctgtctcctcccttctgctcgtcgacggatcccatcaggaccaggaattcggtgaagctgttggatccagaattcttcaaacaaatccagacgcacatgaggtgcattgctcaagggaaaggagccgtgcagcttgggaagctattgatgagtatttgatgcccttcgtggaaaaagaaaaatatgaactcccaagcaaatgtagacttcgtcctgataatgacatgtttcgggagcaagagcaacataagattcattttgatattaatgagtggcactgtggcttttgcaagaaagctttccgagcagagaagttcattgatcagcattttgaaaatcgccacaagaatcttgtggataatagtgaaggaagatgcatggcagatctatgcggcgcactacattgtgatctgatgatgcagttcaaaaaaccaaaaaagccttgcagacagttgctttcctattaatcaaggtcttgctgccagccgtcttcatgaatttttcttgcgccagttttgtgatgctcacacttgcagtaagggaacaaaacctttccccaaaggtggcaggaaacaaacaaacaggttatacctcgctctctccattttgacgctgatacttttgccgctgttctatctaattgtgttcctgcaccagagggaaatgaggaaaggtacccaagatctaaaacggttttcgaaaattgggcagaagaaaaagccatcctagtgtccaacagtcacaacgttctcgagctcatggagccaaggatgagctggataaggaacgtggtatgcagtgtgaaatgtttttatgggcagggaagaaatttccctcatttccaggacgggaacaatgtccgcaggtcgaggaatgctggcttcgaccttttcttttctttttctttcttttttgtttcgacatgtagatgcaaacttcgagaggcaagcatgtgtggtctttgtgagattacggcgatattctatatcgtcaaccataaccgaagtcctattgataatttaaggatttttgggaggcctcaggcttaaaaaccaatgtcagtgaatgtagtatgacttctatccaatgtaatgatcaatgtgttggtgaggcacaatctttattcccttgcaacattgttggatttccttgcaaatatttggagcttcc

SEQ ID NO: 13462 - DNA, 1508 bp, Zea Mays
gcgattttctagagtgcgtacagtcgtcgccagtctccgggagcccaaagcaagtgcccccactgccccggcggctgccgaacctctgctccggcgactaggttcccgcctccccgactctgccccaagcgagcgcggcacgcgtgtcgccttggcttcctctcttctgcttcagtctcgcgccgccggtttctatcctgccgtcgcccggagctcatcgtgctgacctccagtgacgcgctgaagggatctgggaacttcgaggatgctttgctgtgctggccaccaggcgtcccttctcctcttcgctctgctctctgtctcctcccttctgctcgtcgacggatcccatcaggaccagaattcttcaaacaaatccagacgcacatgaggtgcattgctcaagggaaaggagccgtgcagcttgggaagctattgatgagtatttgatgcccttcgtggaaaaagaaaaatatgaactcccaagcaaatgtagacttcgtcctgataatgacatgtttcgggagcaagagcaacataagattcattttgatattaatgagtggcactgtggcttttgcaagaaagctttccgagcagagaagttcattgatcagcattttgaaaatcgccacaagaatcttgtggataatagtgaaggaagatgcatggcagatctatgcggcgcactacattgtgatctgatgatgcagttcaaaaaaccaaaaagtaaatgcaatgcagctgcagctacaaggaatcgtcatctttgtgagagccttgcagacagttgctttcctattaatcaaggtcttgctgccagccgtcttcatgaatttttcttgcgccagttttgtgatgctcacacttgcagtaagggaacaaaacctttccccaaaggtggcaggaaacaaacaaacaggttatacctcgctctctccattttgacgctgatacttttgccgctgttctatctaattgtgttcctgcaccagagggaaatgaggaaaggtacccaagatctaaaacggttttcgaaaattgggcagaagaaaaagccatcctagtgtccaacagtcacaacgttctcgagctcatggagccaaggatgagctggataaggaacgtggtatgcagtgtgaaatgtttttatgggcagggaagaaatttccctcatttccaggacgggaacaatgtccgcaggtcgaggaatgctggcttcgaccttttcttttctttttctttcttttttgtttcgacatgtagatgcaaacttcgagaggcaagcatgtgtggtctttgtgagattacggcgatattctatatcgtcaaccataaccgaagtcctattgataatttaaggatttttgggaggcctcaggcttaaaaaccaatgtcagtgaatgtagtatgacttctatccaatgtaatgatcaatgtgttggtgaggcacaatctttattcccttgcaacattgttggatttccttgcaaatatttggagcttcc

SEQ ID NO: 13463 - DNA, 1616 bp, Zea Mays
gcgattttctagagtgcgtacagtcgtcgccagtctccgggagcccaaagcaagtgcccccactgccccggcggctgccgaacctctgctccggcgactaggttcccgcctccccgactctgccccaagcgagcgcggcacgcgtgtcgccttggcttcctctcttctgcttcagtctcgcgccgccggtttctatcctgccgtcgcccggagctcatcgtgctgacctccagtgacgcgctgaagggatctgggaacttcgaggatgctttgctgtgctggccaccaggcgtcccttctcctcttcgctctgctctctgtctcctcccttctgctcgtcgacggatcccatcaggaccaggaattcggtgaagctgttggatccagaattcttcaaacaaatccagacgcacatgaggtgcattgctcaagggaaaggagccgtgcagcttgggaagctattgatgagtatttgatgcccttcgtggaaaaagaaaaatatgaactcccaagcaaatgtagacttcgtcctgataatgacatgtttcgggagcaagagcaacataagattcattttgatattaatgagtggcactgtggcttttgcaagaaagctttccgagcagagaagttcattgatcagcattttgaaaatcgccacaagaatcttgtggataatctggtcacttgaaaaagaacacgaggattactggacagctcttttttcacactaatttgcactacagttttcaacatacgcgtgatgagtgaaggaagatgcatggcagatctatgcggcgcactacattgtgatctgatgatgcagttcaaaaaaccaaaaagtaaatgcaatgcagctgcagctacaaggaatcgtcatctttagccttgcagacagttgctttcctattaatcaaggtcttgctgccagccgtcttcatgaatttttcttgcgccagttttgtgatgctcacacttgcagtaagggaacaaaacctttccccaaaggtggcaggaaacaaacaaacaggttatacctcgctctctccattttgacgctgatacttttgccgctgttctatctaattgtgttcctgcaccagagggaaatgaggaaaggtacccaagatctaaaacggttttcgaaaattgggcagaagaaaaagccatcctagtgtccaacagtcacaacgttctcgagctcatggagccaaggatgagctggataaggaacgtggtatgcagtgtgaaatgtttttatgggcagggaagaaatttccctcatttccaggacgggaacaatgtccgcaggtcgaggaatgctggcttcgaccttttcttttctttttctttcttttttgtttcgacatgtagatgcaaacttcgagaggcaagcatgtgtggtctttgtgagattacggcgatattctatatcgtcaaccataaccgaagtcctattgataatttaaggatttttgggaggcctcaggcttaaaaaccaatgtcagtgaatgtagtatgacttctatccaatgtaatgatcaatgtgttggtgaggcacaatctttattcccttgcaacattgttggatttccttgcaaatatttggagcttcc

SEQ ID NO: 13464 - DNA, 1926 bp, Zea Mays
gtattcactactcaagccgctcaaaactctagctagctagcagggggggaaatggctccacttctcgccgcagccatgaaccacgctgcccatccagtccttagaagccatctaggacccaacaatgagagtttctcacgacaccacctatcttcttcaccgcaaagcagtaagcgaaggtttaaccttagctttacgccacgatctgcaagagtaggcaatcaaaatggagtccaattgttgagcccttcggaaatccctcgaagggactggttcccctccgacttcatctttggtgccgccacttcagcgtaccaaattgaaggtgcttggaacgaagatggaaagggggaaagcaattgggatcacttctgccacaattttccggaaaggataatggacgggagcaatgcagacattggagcgaattcgtaccatatgtacaaaacggatgtcagattgctgaaggaaatgggcatggacgcatatagagggaacggtcgaaggaggtattaaccaggatggcatcgattactacaaaaggctcatcaacttgttgctagagaatggcatagagccatatgtaacaattttccactgggatgtccctcaagcactagaagagaagtacggcggattcttagataagactcataagaggattgtaaatgattacaaaaacttcgctaaggtgtgcttcgacaactttggtgacaaggtgaagaattggttgacctttaatgagccccagacatttacttcattttcctatggaaccggggtctttgccccaggacgatgctcaccgggactagactgtgccatcccaactgggaattcactcgtcgaaccttacattgctggccacaacattcttctagcccacgctgaggctgttgatctttacaacaagtattacaagggcgagaacggccgcataggtcttgcatttgatgtaatgggtcgtgtgccatacggaacatcatttctagatgaacaggccaaagaaaggtccatggacattaacctaggatggttcttggagcctgtggttcgtggtgactaccccttctcaatgagatcgttagcgagggaacgactacccttcttcagtgacaaacagcaagagaagcttgtgggatcctataacatgttgggaataaactactacacctcaatattctccaaacatatcgacatctcaccaaaatactcgcctgttctcaacactgacgacgcctacgctagtcaagaaacgtatgggcctgacgggaaacccattggtcctcctatgggaaatccgtggatctacttatacccagaaggcctaaaggatatccttatgatcatgaagaacaaatatggaaacccacctatctacatcactgagaacggaatcggggatgttgatacaaaggagaaacctctacccatggaggctgccttaaatgactacaaaaggctagattacatccagcgccacatctcaactctcaaggagtcaatagacttgggagcaaatgtgcatggctacttcgcttggtctctgctggataactttgaatggtacgccggctacaccgaacgttatggcattgtctacgtcgaccgcaaaaataactacacgcgctacatgaaggagtcagccaagtggttaaaagagttcaatactgcgaagaagcctagcaagaagattattacgccagcttaaaaacatgggacctcgtgatgtgggtacggtgccacccatgaaataaaaacctagtgtgtggtttgaaacctaaatttttctttttcttttttgcaccatgagagaggtagtggagtcatattctccagcaccgtggctaataatgtattgttgcagtacaatctagcattgtcgtcatgcaataaataaagtgactggtttccctatttcaatta

SEQ ID NO: 13465 - DNA, 1558 bp, Zea Mays
cgcgtttgcatgcaggaaaaggaacaaaaaggaagttgaggagactgacggatgtcagattgctgaaggaaatgggcatggacgcatataggttctctatctcttggcctagaatactgcctaagggaacggtcgaaggaggtattaaccaggatggcatcgattactacaaaaggctcatcaacttgttgctagagaatggcatagagccatatgtaacaattttccactgggatgtccctcaagcactagaagagaagtacggcggattcttagataagactcataagaggattgtaaatgattacaaaaacttcgctaaggtgtgcttcgacaactttggtgacaaggtgaagaattggttgacctttaatgagccccagacatttacttcattttcctatggaaccggggtctttgccccaggacgatgctcaccgggactagactgtgccatcccaactgggaattcactcgtcgaaccttacattgctggccacaacattcttctagcccacgctgaggctgttgatctttacaacaagtattacaagggcgagaacggccgcataggtcttgcatttgatgtaatgggtcgtgtgccatacggaacatcatttctagatgaacaggccaaagaaaggtccatggacattaacctaggatggttcttggagcctgtggttcgtggtgactaccccttctcaatgagatcgttagcgagggaacgactacccttcttcagtgacaaacagcaagagaagcttgtgggatcctataacatgttgggaataaactactacacctcaatattctccaaacatatcgacatctcaccaaaatactcgcctgttctcaacactgacgacgcctacgctagtcaagaaacgtatgggcctgacgggaaacccattggtcctcctatgggaaatccgtggatctacttatacccagaaggcctaaaggatatccttatgatcatgaagaacaaatatggaaacccacctatctacatcactgagaacggaatcggggatgttgatacaaaggagaaacctctacccatggaggctgccttaaatgactacaaaaggctagattacatccagcgccacatctcaactctcaaggagtcaatagacttgggagcaaatgtgcatggctacttcgcttggtctctgctggataactttgaatggtacgccggctacaccgaacgttatggcattgtctacgtcgaccgcaaaaataactacacgcgctacatgaaggagtcagccaagtggttaaaagagttcaatactgcgaagaagcctagcaagaagattattacgccagcttaaaaacatgggacctcgtgatgtgggtacggtgccacccatgaaataaaaacctagtgtgtggtttgaaacctaaatttttctttttcttttttgcaccatgagagaggtagtggagtcatattctccagcaccgtggctaataatgtattgttgcagtacaatctagcattgtcgtcatgcaataaataaagtgactggtttccctatttcaatta

SEQ ID NO: 13466 - DNA, 1178 bp, Zea Mays
ttcaaaactaactcacccgtgaaatcagatgttcgggcaccagaaacgaacttgagtcccagggttcgaagcacgtttgtaaattatgttattttcaaccacctttcctttgtaaggatttgaaacttccacacatggtttctggcatcaacgttaagattcactgcacacttgatatgataatggttttgaaacttccacacattgtttgtggtatcaacgtgaagattcacctacagtgtataacccaaactctatcccccaaacagttattaagcagcaatgcctcaacatttgacgaagcacctgtaaggctgcaactgttaatatctgccgttaaacagttcaacagtccaagaatctgaagatcatacagctagttattgaagccatgaagctcattttctgcagccagcaccttaagatagagccgaactggtcgaagagtagacaaaaaagcctgtcactgtgctcagactgtaaacagtatccaggtagagggttttttctatatttttattttcataataagggtgtccatgtagtttaaacatgtgtgccgcctgcttacacaaagatggttagctgtggcattgccaccatggcataggagatgcagcgagtgcgctacttcaccttcgtcatgctcatcagaatggtgcaggagaagataccccgtaacaccaccttcctgatgcccagcgacaggctgctgtcacgtccatttctgagccaggtgctggagttcctatccaggcattccatcactgtgcccctcgtgttcaactacctcatcaggcttcccaatggaaccatagtccccagttcccacccaccacttgggtgacacgatcaccgtaaccaacatcaagcgtcaaaagttctacttcaccggcatcgagctcacaagtcctgatctctaccacttgggggagttattcaggtgccatggaataaaaggaatcataaagcaaacagcaacacagagtaaaagcggcaacatgcactcgctatgccgctccaacttctgcggcaccagagaagacattgaccaaaaaccaatcattggcacatcttctctaccacctcccaacacaggttcttccacgatccctgcttaagaacctgcagcagaaagccctcaaagttcagacactttgtcaaaaactggattggca

SEQ ID NO: 13467 - DNA, 467 bp, Zea Mays
caagctcgtagacctccacaaccccgtagcgccattgtactccctgtccacatcaaaccggtcgaaggtgaggaccgccgctcgcaccaccgcagatccacgcttttgttgtcaatccgtgccttggtgcgtgtcgtcgtcctgcgatgtgaggcggtgaagccatccaaggcgctaccgggcaggatcgccgaccatcccgcctccaatttctcgccgacgaccacgaaccgcagctcaccgaggccagtccagacgaccccacggttcacgaagagccagtggatgaggatcccggtgttcagcagatagaagttgctgagcagaagctcattgaaggcaagttgtgcccttgaccactttttacccaataatgttctttaataacacttattcatgcataggtttaattttgatgggacctaataggtcaccttagtctgattatcttttaccttgtttacccc

SEQ ID NO: 13468 - DNA, 1137 bp, Zea Mays
ctgctgtccactgtcctggatgggcgggcgcatgcatgcatgcaaggacggcctggtcaaactgtcctgtcgtggtcagcacggctgaagatcgccaagggcgcggcgcgcgggctggcgtatctccacgagtccagcccgcggcggttcgtccacggcgaggtgaagccatcgaacatcctcctcgacgccgacttcaccgcacacgtcgccgacttcggccttgcccgcctgctggccgtggccggctgcgcccccgacgggccgccctccacgggtggtgccgggctcctcggcggcgccatcccgtacgtcaagccaccggcgccgggtacgggtccggaccgtttcggcgccggcggcgggtaccgcgcgccggaagcgcgtgcgcccggtgcaaagccgacgcagaagtgggacgtgttctcgttcggtgtggtgctgctggagttgctgacgggccgaggcccggccgccgaccacgcgtcgccgtcgacgtcggcgtcgttctcggcgcccgtgtccgggtcgacggcgacggaccggtccgggagcggggagcacgggggtggcgcggtgccggaggtggtgcggtgggttcgccgtggcttcgaggaggacgttcgccccctggcggagatggtggacccggcgctgctacgaggccccgcgctgcccaagaaggaggtggtggcggcgttccacgtcgcgctccagtgcacggagagcgacccggagctccggccacggatgaaggccgttgccgacagcctcgaaaagatcggctaatgagtcacaaggtcatgctagcgtacacaacgccatgcatgctcatccaaggtcattgttatttttattaccttttccgtctcctccccgattttctctctcttgtaattcagtcttttttttaatttccttgctgtgctctcttgcaattggtcgtttgtaattgttggctattcttttgggtgcaattcatgttttccgtaattgatggctattacaaatggtacatagagaggtatgtaggagaaagggtatttccagcttaaattttcaggcctgttttagtacactggttttcaaaaccacaatttgtaatatcgcataactatagtatattttatattagtt

SEQ ID NO: 13469 - DNA, 1829 bp, Zea Mays
cagagaccggcgatcgaccgatcaacaggcgacggcttgccggcccagtccggccctacaatagcaccggcggctccgctgatcaaaaagccccgaactccatcggcagagcccagaattagtgtccgttctgacttcagttcagcctgccttattcacaaggctggagccccatcgaattctgtttctggcgtgatggctgttcaggttcaccgccaccgtaacaaggtccgcaatggccaagctatcaggtgtgcaatggcaactggaaaagagcagggtgcaatttccactgccagtagcggtgatcaaaccaagggcggtttgcgtggaaaattaaacaaagttgttttagcttatagtggtggtttggatacatccgttattgttccatggctcagggagaactatggttgtgaagtcgtttgtttcactgctgatgttggccagggtgccattgaattggaagggttggagaagaaggcaaaagccagtggtgcatgtcagcttgttgtgaaggacctcaaagaagaatttgttagtgaatatatatacccctgcctgcgtgcaggtgcagtttatgaaagaaagtatctgcttgggacttcgatggctaggcctgttattgctaaggcaatggttgatgttgccaaggaagttggtgcggatgcagttgcccatggttgcactggaaaaggcaatgatcaggttcgctttgagcttacattctatgctttaaatcctgaacttaaagtggtggcaccttggagggagtgggatatcacaggacgtgaagatgctattgaatatgcaaagaaacataatgtacctgttccagtttcaaagaaatcaatatacagccgagaccgaaacttgtggcaccttagccatgagggtgacatcctggaggacccagcaaatgagccaaaggaagatatgtatatgatgtcgattgctccagaaaatgcgccctcgaaacctgagtatttggagattggtatcattgctggtgttcctgtttcaatcaatggccgagacctctcaccagcatccctcctcgcggagctcaatgaaatcggtggaaagcatgggattgggcgtatcgacatggtggaaaacaggctggtcggcatgaagtcacgtggggtctatgagacccccggtggcaccatcatggcagccgcggtacgcgagttggagtccctgaccctggacagggagaccatgcagtggaaggacatcattgccctcaagtacgccgagctggtctatgctggccgctggtttgacccgctccggcagtcctttgatgccttcatggagaaggttaccgcgacgaccactggttcagtgaccctgaagctgtacaagggttccgtgaacgtcgcgtcccggaagagcccctacagcctgtacagggaagatatctcctcgtttgagaacggggagatctacaaccaagctgacgccgaggggttcatcaggctgtacggcctaccgacacgggtccgggcgatgctggagaagggtatctgagtagttgcctgcttgatttagaaataaaaacatctgtttcccagtgattgcagacagatgggtgtttggtggggagttcaccatgctgttttaccatccgtttacattgtccaaaccaaaatattatcattgctacatcagctgcttttctcattggtttatattgagcagaccattctggtcgattatcgtcatctattgatctgcgataacgttggagcgatgtctatctatgactttagataccttgacgattcgaactgatacaccgttcatgccattacacaaatttc

SEQ ID NO: 13470 - DNA, 842 bp, Zea Mays
ccagtaggtaaacctctccgtagtcctactcttgtccgacccgcgcggccgccgccagcccgcgccctcggagcccccttccgcttctcctctccgggaatggcgtcggcgcgaggaccttgcggtaagccgcggctcgcctgcttgcccgcttcactctgttctaacctgtgcacgactttccgtcgcgtcgctattggagtagcgaccaaacccaatccgccttgccgcgatggacgcggcgtgtcactccaatcccgtcgaggcgaccagggattcgtcttcttctgatttatgaattagtgtccgttctgacttcagttcagcctgccttattcacaaggctggagccccatcgaattctgtttctggcgtgatggctgttcaggttcaccgccaccgtaacaaggtccgcaatggccaagctatcaggtgtgcaatggcaactggaaaagagcagggtgcaatttccactgccagtagcggtgatcaaaccaagggcggtttgcgtggaaaattaaacaaagttgttttagcttatagtggtggtttggatacatccgttattgttccatggctcagggagaactatggttgtgaagtcgtttgtttcactgctgatgttggccagggtgccattgaattggaagggttggagaagaaggcaaaagccagtggtgcatgtcagcttgttgtgaaggacctcaaagaagaatttgttagtgaatatatatacccctgcctgcgtgcaggtgcagtttatgaaagaaagtatctgcttgggacttcgatggctaggcctgttattgctaagccctgtagagtaggtggctcagctgttg

SEQ ID NO: 13471 - DNA, 1867 bp, Zea Mays
ccagtaggtaaacctctccgtagtcctactcttgtccgacccgcgcggccgccgccagcccgcgccctcggagcccccttccgcttctcctctccgggaatggcgtcggcgcgaggaccttgcggaattagtgtccgttctgacttcagttcagcctgccttattcacaaggctggagccccatcgaattctgtttctggcgtgatggctgttcaggttcaccgccaccgtaacaaggtccgcaatggccaagctatcaggtgtgcaatggcaactggaaaagagcagggtgcaatttccactgccagtagcggtgatcaaaccaagggcggtttgcgtggaaaattaaacaaagttgttttagcttatagtggtggtttggatacatccgttattgttccatggctcagggagaactatggttgtgaagtcgtttgtttcactgctgatgttggccagggtgccattgaattggaagggttggagaagaaggcaaaagccagtggtgcatgtcagcttgttgtgaaggacctcaaagaagaatttgttagtgaatatatatacccctgcctgcgtgcaggtgcagtttatgaaagaaagtatctgcttgggacttcgatggctaggcctgttattgctaaggcaatggttgatgttgccaaggaagttggtgcggatgcagttgcccatggttgcactggaaaaggcaatgatcaggttcgctttgagcttacattctatgctttaaatcctgaacttaaagtggtggcaccttggagggagtgggatatcacaggacgtgaagatgctattgaatatgcaaagaaacataatgtacctgttccagtttcaaagaaatcaatatacagccgagaccgaaacttgtggcaccttagccatgagaatcttagttaccagaactttacaagatgggtgacatcctggaggacccagcaaatgagccaaaggaagatatgtatatgatgtcgattgctccagaaaatgcgccctcgaaacctgagtatttggagattggtatcattgctggtgttcctgtttcaatcaatggccgagacctctcaccagcatccctcctcgcggagctcaatgaaatcggtggaaagcatgggattgggcgtatcgacatggtggaaaacaggctggtcggcatgaagtcacgtggggtctatgagacccccggtggcaccatcatggcagccgcggtacgcgagttggagtccctgaccctggacagggagaccatgcagtggaaggacatcattgccctcaagtacgccgagctggtctatgctggccgctggtttgacccgctccggcagtcctttgatgccttcatggagaaggttaccgcgacgaccactggttcagtgaccctgaagctgtacaagggttccgtgaacgtcgcgtcccggaagagcccctacagcctgtacagggaagatatctcctcgtttgagaacggggagatctacaaccaagctgacgccgaggggttcatcaggctgtacggcctaccgacacgggtccgggcgatgctggagaagggtatctgagtagttgcctgcttgatttagaaataaaaacatctgtttcccagtgattgcagacagatgggtgtttggtggggagttcaccatgctgttttaccatccgtttacattgtccaaaccaaaatattatcattgctacatcagctgcttttctcattggtttatattgagcagaccattctggtcgattatcgtcatctattgatctgcgataacgttggagcgatgtctatctatgactttagataccttgacgattcgaactgatacaccgttcatgccattacacaaatttc

SEQ ID NO: 13472 - DNA, 1927 bp, Zea Mays
ccagtaggtaaacctctccgtagtcctactcttgtccgacccgcgcggccgccgccagcccgcgccctcggagcccccttccgcttctcctctccgggaatggcgtcggcgcgaggaccttgcggaattagtgtccgttctgacttcagttcagcctgccttattcacaaggctggagccccatcgaattctgtttctggcgtgatggctgttcaggttcaccgccaccgtaacaaggtccgcaatggccaagctatcaggtgtgcaatggcaactggaaaagagcagggtgcaatttccactgccagtagcggtgatcaaaccaagggcggtttgcgtggaaaattaaacaaagttgttttagcttatagtggtggtttggatacatccgttattgttccatggctcagggagaactatggttgtgaagtcgtttgtttcactgctgatgttggccagggtgccattgaattggaagggttggagaagaaggcaaaagccagtggtgcatgtcagcttgttgtgaaggacctcaaagaagaatttgttagtgaatatatatacccctgcctgcgtgcaggtgcagtttatgaaagaaagtatctgcttgggacttcgatggctaggcctgttattgctaaggcaatggttgatgttgccaaggaagttggtgcggatgcagttgcccatggttgcactggaaaaggcaatgatcaggttcgctttgagcttacattctatgctttaaatcctgaacttaaagtggtggcaccttggagggagtgggatatcacaggacgtgaagatgctattgaatatgcaaagaaacataatgtacctgttccagtttcaaagaaatcaatatacagccgagaccgaaacttgtggcaccttagccatgagaatcttagttaccagaactttacaagatggttacgttccaacttttaagccaatatatgcaaaatgccacattagtgttctgaattaatggtgacatcctggaggacccagcaaatgagccaaaggaagatatgtatatgatgtcgattgctccagaaaatgcgccctcgaaacctgagtatttggagattggtatcattgctggtgttcctgtttcaatcaatggccgagacctctcaccagcatccctcctcgcggagctcaatgaaatcggtggaaagcatgggattgggcgtatcgacatggtggaaaacaggctggtcggcatgaagtcacgtggggtctatgagacccccggtggcaccatcatggcagccgcggtacgcgagttggagtccctgaccctggacagggagaccatgcagtggaaggacatcattgccctcaagtacgccgagctggtctatgctggccgctggtttgacccgctccggcagtcctttgatgccttcatggagaaggttaccgcgacgaccactggttcagtgaccctgaagctgtacaagggttccgtgaacgtcgcgtcccggaagagcccctacagcctgtacagggaagatatctcctcgtttgagaacggggagatctacaaccaagctgacgccgaggggttcatcaggctgtacggcctaccgacacgggtccgggcgatgctggagaagggtatctgagtagttgcctgcttgatttagaaataaaaacatctgtttcccagtgattgcagacagatgggtgtttggtggggagttcaccatgctgttttaccatccgtttacattgtccaaaccaaaatattatcattgctacatcagctgcttttctcattggtttatattgagcagaccattctggtcgattatcgtcatctattgatctgcgataacgttggagcgatgtctatctatgactttagataccttgacgattcgaactgatacaccgttcatgccattacacaaatttc

SEQ ID NO: 13473 - DNA, 531 bp, Zea Mays
aacgggatatttgctgagtacgttgatgtgtactcacccttgctttaaaaaccaacccaccctaggttgtccctgtgatagccctcccaagttatcaggtccacatgcaccaatccttgccttactgacctcagatggctatgcacgtgtaccgggtaacttaacaaggctatcgagttcgccaactggaactcatcatcccaaggatctcccacataataggtatattacagtaatcacatttgatacacacacattggagatagagcggaagacttttacaaagtacagtttacattccagaactcaagttttacatggtagaatgagatgtatttattacaagtcttgatagtactcaaagtgcataacttattacaataattggaagggtgaagcctttccataagagatatataaaaaccttctaagcttcaagtcctccacatgaagtaacttacccaaagataagggaataaaacttctcctacaaaaacaacaagggataaaaccctgagtacgcaattactc

SEQ ID NO: 13474 - DNA, 1057 bp, Zea Mays
cgccactctccctggcagccgccgtcaggaagcctccactccttctccctcttctctctcttctctcctccccttgctcttctctggccgccgccacttgcccggacttcctgcagccgagcgcccctgcagctccctgcaccttcatcctgcgcgctccagtcgaccgcgcactgggaccagcgcagtgcccagccgagcagcgcgacgcccggtggcgttcatgtgcttctcgcgggctgattgcaaatttgttcccctaggactttggccgttggatggtgtactctgcgggatccgcaacctcctactgagctcccgcacagaggggcaggcatggaagtgcaggcagccggccgtcgacaccaagcaggccttgcgcttatggcagccgtggtgctcggtcttatcaccagtggtgtcgttagatgccaaatgcagtttgctctgcatggggattttgctttctggtgtctgtcccgttggaaatgggtagttcctgagtgacgaacagacttcccatggcagctattctgttgaggatgtgcgaaaggtgcactgcagagtctgagaagtgagagaaaaaaatgacaagtgctgtttaccgctcacccatttttaaccaatgccacggtgatacaattatctgtgctaaagggacaattgtttcaactaaaccaagcaccacagttggaggccagatccttggaaggcaatattgtgaaattattgtaacttgtgtgctaaaacgagatacaattttgcctcgccctggagtgatgtcgctggtggtgcttttgtgactgatcatctctggagcttttgtgaatgatctagatctagctatctatctgtaaatgatctagttgtgaatgatattataattgtgatgcttttgtgaatatataattgtggtgcttttgtgtttatgtgatggatctatgactatggtatactaattaactgtgtatgtctttatgattcgtgtataaaaatctgtgatttgtggtgcttaattaaatgtaaattattattaataacaactgtaaaaatggcg

SEQ ID NO: 13475 - DNA, 1046 bp, Zea Mays
caggaagcctccactccttctccctcttctctctcttctctcctccccttgctcttctctggccgccgccacttgcccggacttcctgcagccgagcgcccctgcagctccctgcaccttcatcctgcgcgctccagtcgaccgcgcactgggaccagcgcagtgcccagccgagcagcgcgacgcccggtggcgttcatgtgcttctcgcgggctgattgcaaatttgttcccctaggactttggccgttggatggtgtactctgcgggatccgcaacctcctactgagctcccgcacagaggggcaggcatgtgaggctttcgcaggaagtgcaggcagccggccgtcgacaccaagcaggccttgcgcttatggcagccgtggtgctcggtcttatcaccagtggtgtcgttagatgccaaatgcagtttgctctgcatggggattttgctttctggtgtctgtcccgttggaaatgggtagttcctgagtgacgaacagacttcccatggcagctattctgttgaggatgtgcgaaaggtgcactgcagagtctgagaagtgagagaaaaaaatgacaagtgctgtttaccgctcacccatttttaaccaatgccacggtgatacaattatctgtgctaaagggacaattgtttcaactaaaccaagcaccacagttggaggccagatccttggaaggcaatattgtgaaattattgtaacttgtgtgctaaaacgagatacaattttgcctcgccctggagtgatgtcgctggtggtgcttttgtgactgatcatctctggagcttttgtgaatgatctagatctagctatctatctgtaaatgatctagttgtgaatgatattataattgtgatgcttttgtgaatatataattgtggtgcttttgtgtttatgtgatggatctatgactatggtatactaattaactgtgtatgtctttatgattcgtgtataaaaatctgtgatttgtggtgcttaattaaatgtaaattattattaataacaactgtaaaaatggcg

SEQ ID NO: 13476 - DNA, 1004 bp, Zea Mays
caggaagcctccactccttctccctcttctctctcttctctcctccccttgctcttctctggccgccgccacttgcccggacttcctgcagccgagcgcccctgcagctccctgcaccttcatcctgcgcgctccagtcgaccgcgcactgggaccagcgcagtgcccagccgagcagcgcgacgcccggtggcgttcatgtgcttctcggactttggccgttggatggtgtactctgcgggatccgcaacctcctactgagctcccgcacagaggggcaggcatggaagtgcaggcagccggccgtcgacaccaagcaggccttgcgcttatggcagccgtggtgctcggtcttatcaccagtggtgtcgttagatgccaaatgcagtttgctctgcatggggattttgctttctggtgtctgtcccgttggaaatgggtagttcctgagtgacgaacagacttcccatggcagctattctgttgaggatgtgcgaaaggtgcactgcagagtctgagaagtgagagaaaaaaatgacaagtgctgtttaccgctcacccatttttaaccaatgccacggtgatacaattatctgtgctaaagggacaattgtttcaactaaaccaagcaccacagttggaggccagatccttggaaggcaatattgtgaaattattgtaacttgtgtgctaaaacgagatacaattttgcctcgccctggagtgatgtcgctggtggtgcttttgtgactgatcatctctggagcttttgtgaatgatctagatctagctatctatctgtaaatgatctagttgtgaatgatattataattgtgatgcttttgtgaatatataattgtggtgcttttgtgtttatgtgatggatctatgactatggtatactaattaactgtgtatgtctttatgattcgtgtataaaaatctgtgatttgtggtgcttaattaaatgtaaattattattaataacaactgtaaaaatggcg

SEQ ID NO: 13477 - DNA, 1079 bp, Zea Mays
cggatttccccctcctcgaccgtcgtcaatatcgcacggttcaccggccacgctctctcgctttccaaggaccgccgggtccgctccgtcccccgtctggcagtggcctcctcgccgccctcggcgccgcctggccacgccttatccagatccaggattcaaagaaaccattacttcaccaccatggttcttgattcattgtcatctccgcacaggaggtcccaaaacatattcttcgtgtcatcatcaaaaaagcctcagtcatctcgtgatgacagttggtctgcactggttgagcggcaccggttcctcctgacaacacttcttgtgcttgccttcctatgcagtatctatctgtactttgcagtgaccttgggggcatcagatgcgtgcagtggtttgacaggaggggcacagaagatcgagtgccaggcaagatcagtgctgcaacatggaaagttgaaattccgctgacttcggagtctcattgatgaagaccaaattattgagtttatttgcactctggtcacaggtcttattcttcataccatgaatctgtatattattggtggtggctggtttgtattcatgctgatgttattgggccacaacatttattgtactggtagagataaatctaatagtgatagcgttgagtttgtggaaagtggaaactggtataagggtaggtctatattgttcttttaacaatcatggtgcctataattcgtccaggagaccttggtattgtctcccgtgtgacatgtgacacagtcagattgatactgtgctacctgagcaccctttgatctttaagtactgattaatttcgttagtgttcatcttaatttattaacaatcagctgttcactgagaagtttgtcaattttagtgagtcattgatgtaaatacgacaacctggaacatgattgtttgtagttgtgttatcgtttccagcttgtttttgttttgtgttttggccggtagatcagagtggttggaacatattagtagacatctggtttcatcatgtaacataattcaatgaagtagtaaatgagttatatcctttcagagaa

SEQ ID NO: 13478 - DNA, 843 bp, Zea Mays
cggccacgctctctcgctttccaaggaccgccgggtccgctccgtcccccgtctggcagtggcctcctcgccgccctcggcgccgcctggccacgccttatccagatccagtatctatctgtactttgcagtgaccttgggggcatcagatgcgtgcagtggtttgacaggaggggcacagaagatcgagtgccaggcaagatcagtgctgcaacatggaaagttgaaattccgctgacttcggagtctcattgatgaagaccaaattattgagtttatttgcactctggtcacaggtcttattcttcataccatgaatctgtatattattggtggtggctggtttgtattcatgctgatgttattgggccacaacatttattgtactggtagagataaatctaatagtgatagcgttgagtttgtggaaagtggaaactggtataagggtaggtctatattgttcttttaacaatcatggtgcctataattcgtccaggagaccttggtattgtctcccgtgtgacatgtgacacagtcagattgatactgtgctacctgagcaccctttgatctttaagtactgattaatttcgttagtgttcatcttaatttattaacaatcagctgttcactgagaagtttgtcaattttagtgagtcattgatgtaaatacgacaacctggaacatgattgtttgtagttgtgttatcgtttccagcttgtttttgttttgtgttttggccggtagatcagagtggttggaacatattagtagacatctggtttcatcatgtaacataattcaatgaagtagtaaatgagttatatcctttcagagaa

SEQ ID NO: 13479 - DNA, 1508 bp, Zea Mays
atgccgagcgaccattttttgggaggtcgacactatgaccacgacaccgatctcctgccacgtagatgccagctcgacataccggagcaagatttcggcgccatttatattggcgtcgagacgtgtaatctcggcgtcaataataatggtgatgatatcttcttctcggcgctcaggaggaccactcaatccaccttcacttcaccgggcgggatctggtcgcaatcggatccacaccgccgccgcggccgcctcctcgggtggagtcccgggctcgacgagacggaggccagggtagacgacggaggcgacgaggacgacgaggctgaggaggggaagcccatgccggccgccggggcccgccgctccactcgcgtcttcatgcccaaggcggctaagccgccgcaatcccaggagcacgtcgatcccgccacccgggtcctccgctccggcaagcgcctcgccgccgaccggatccgctgggacgccaaggaggcggcagccttccacgtcgacatcaatcacggccacgaccagcagcaccaaaaggaagattaccccaaaccgggattgccagctctgacaaagtccttcgggctcgtgtacagaaggaaacgccgtcgccgccggaggcaccccgccgatgaggtcgtcgccgaggacgaggacggcagcaggaggtttgggatagtatacaccaggaggaagggcaagcgatcgaagggtgcacccataaggcgagggcatttatcacaaaagtctgccatgaagcgaaagagatctttcaagagacaaaaaagccaagctggtcgtggaaagcctgaagctttattgcaatacaatgctgaagaggacgcagctttgcacagagttgcccaagctgaacgtgcggcaaaacaggctgtagaaagagctattcgactgcgcaacagagcccagtctctcatgacaaacgcagagctcgcagcatacaaatccgtcatggctctcaggattgccgaggctgctaggatatctgactcgtcccgagatattgtttgtactatcctcgactaaagaaaaatatgggttgttcattgatttgtgtggagagcatggaaaatactcttcatcgcccatgatattggcttttcgacaagctgtggggttatatccccccccttctgttaactcactttgtcaagtcaattttgaggcgaatgcttgaactgaaaactgtaatttcttgtataaattgaagtagttagctagattttgtatcttatgggagctaatgttctgtagaaatgatgaaagttttttttttaaaaaatgcatgggctgaacggaaatcaagtatttgtttgcatcccattgtcttcagcgatatatgttgtctatgatgtgtcccttctgttttattagtgtgtagtgttgtgtgattgtcacttctccgaaactatttgctttatattttgtaaataatatttttgccatctactattgtaattggaccattgaaatttgtg

SEQ ID NO: 13480 - DNA, 2537 bp, Zea Mays
agctgaagactgaactcatggttcacaaaatggtatatgtgttacttaactcttacagggtgaactacactggaccagtttgtgccgttcttgataagtatggttttgactagaccagctttggtccagtccctatctcccagaagtatccacataaaaagaaaagctagtaatatctagcctgcatgttgcttttgtttgtttattcactatgccagccctgtattttatctctagagcagtctctaacatatcttctgtccctaaggagatttatgatgatttatctcagaaggatgtggaaagcctgagtgggaggacactatctagtgccaatactacagctattggtcccgcttctgcaggaggcgcaaaagccaactctagttggaagctaaagtctgttgttactcttgcattgacattgctaacaagttctcaggcaatattaattgtgtggtcaaaaagagctggaaaatatgaatatagtgtcacaacagctaatttttcggtggaggctttaaaatgccttctatcactagctgctctttttaggacgtggaactgccatggtgtcactgatgataatagattaaccacatcttttgatgaagttggtgtatatccgattcctgctgttctttacatggtaaagaacttattgcagtactatatctttgtctacgtggatgcaccagcttatcaaatcttgaagaacctaaatatcatcagcacaggtgttttgtaccgcatcattttgaagaaaaagctaagtgaaattcagtgggcagcatttgttcttctatgtgctggttgcacaacagctcaacttaatccttcgtctgaccatgtgcttcaaactcctattcaaggttggatgatggcaattgtgatggctcttttgagtggttttgctggggtgtatacagaagctatcattaaaaaacggccatcaagaaacatcaacgtgcagaacttttggctatacatatttggggtgatcttcaatctagttgcaatttgtgttcaggattatgatgcagtcatgaataaaggctttttccatgggtattcattcatcacagttttgatgattctgaaccacgcactgagtggaattgctgtttcaatggtgatgaaatatgctgataacatagtcaaggcatgtggcactagcatgtaaatttatgcatgagcatgatagatgatgctactgttgattcagttgtatatgtgctgtccactagagcctgactacggtttatatgtggcattgtagccaataaatggctaagcagtaactcgtgagtatggtgactgcgttagttaggattaggttggatatgtttgttagcttccaaattagataatttgttttgtttagttgctgtcattaaggtgttctcttttgaatatttcatgagttagacctagtccctagcacctacacgtgaggtcactgtcatcatttgaattaagcaaatagaaatgtgaaagaagtctagtctaagccccgttttgtttccctcactaaattttagtctctgtcacatcggatgtttgtgttagcatgggctacagtaggcaggacccttgggttttaggtagtgcggctgcacaggcatgttgccttgtgcgctctctcctagtttggttatttggttgtaataggcaaggatcttcctgattggattgtctaggattgtttcctgttgtctaggattgttcccattgtctaggatagtttcctattcctgtgaacatccttgcctatatgtattcgagcctttgctcccattaatcattcaacattttcccaatacagagtctttcgtggtatcaagagtccgggttccacctcagatttttttcatttctgccccactaagcgcgtcggcctctctgccttatagcgccaccacctccttgccatgcagctctcgcgcaccggcctccctcctgtgaggcaccatgtccgctactgcgcctccatcgcccaagggcgccaccgcccaggacaaggtggttgctaccgccgtcgaccttgttgacttgtccgcctcggccaccctcacccgcgttcaacaagatgagctacccgccaagccacggaaacgaccagtgctgtcgccctggaacaccagagggcctacgatgcggatgttgcctgcctcgccgcggccgaggaggaggctcgtgccgcggccgaggagggggtcagtcagtgggcttcgccagggttctatcaccccatggccagcctaccctcttgggtcagtcgttggcctctgcgttcagcacggagacgctgcagcaacccccgtccactgagtggtacttcgacttaggtgctagttcccacatgacgtcttctagcaatctttcacacactttttcgccacggtatcctactccatctattgttgtcggtaatggctccctgcttcctgtggtcagcactggctctactgaattaccccactctttttttctcgaaagcgcaagagaactgcgcgaaatatattaaggagaaaaag

SEQ ID NO: 13481 - DNA, 2291 bp, Zea Mays
gctgaagactgaactcatggttcacaaaatgatttatgatgatttatctcagaaggatgtggaaagcctgagtgggaggacactatctagtgccaatactattggtcccgcttctgcaggaggcgcaaaagccaactctagttggaagctaaagtctgttgttactcttgcattgacattgctaacaagttctcaggcaatattaattgtgtggtcaaaaagagctggaaaatatgaatatagtgtcacaacagctaatttttcggtggaggctttaaaatgccttctatcactagctgctctttttaggacgtggaactgccatggtgtcactgatgataatagattaaccacatcttttgatgaagttggtgtatatccgattcctgctgttctttacatggtaaagaacttattgcagtactatatctttgtctacgtggatgcaccagcttatcaaatcttgaagaacctaaatatcatcagcacaggtgttttgtaccgcatcattttgaagaaaaagctaagtgaaattcagtgggcagcatttgttcttctatgtgctggttgcacaacagctcaacttaatccttcgtctgaccatgtgcttcaaactcctattcaaggttggatgatggcaattgtgatggctcttttgagtggttttgctggggtgtatacagaagctatcattaaaaaacggccatcaagaaacatcaacgtgcagaacttttggctatacatatttggggtgatcttcaatctagttgcaatttgtgttcaggattatgatgcagtcatgaataaaggctttttccatgggtattcattcatcacagttttgatgattctgaaccacgcactgagtggaattgctgtttcaatggtgatgaaatatgctgataacatagtcaaggcatgtggcactagcatgtaaatttatgcatgagcatgatagatgatgctactgttgattcagttgtatatgtgctgtccactagagcctgactacggtttatatgtggcattgtagccaataaatggctaagcagtaactcgtgagtatggtgactgcgttagttaggattaggttggatatgtttgttagcttccaaattagataatttgttttgtttagttgctgtcattaaggtgttctcttttgaatatttcatgagttagacctagtccctagcacctacacgtgaggtcactgtcatcatttgaattaagcaaatagaaatgtgaaagaagtctagtctaagccccgttttgtttccctcactaaattttagtctctgtcacatcggatgtttgtgttagcatgggctacagtaggcaggacccttgggttttaggtagtgcggctgcacaggcatgttgccttgtgcgctctctcctagtttggttatttggttgtaataggcaaggatcttcctgattggattgtctaggattgtttcctgttgtctaggattgttcccattgtctaggatagtttcctattcctgtgaacatccttgcctatatgtattcgagcctttgctcccattaatcattcaacattttcccaatacagagtctttcgtggtatcaagagtccgggttccacctcagatttttttcatttctgccccactaagcgcgtcggcctctctgccttatagcgccaccacctccttgccatgcagctctcgcgcaccggcctccctcctgtgaggcaccatgtccgctactgcgcctccatcgcccaagggcgccaccgcccaggacaaggtggttgctaccgccgtcgaccttgttgacttgtccgcctcggccaccctcacccgcgttcaacaagatgagctacccgccaagccacggaaacgaccagtgctgtcgccctggaacaccagagggcctacgatgcggatgttgcctgcctcgccgcggccgaggaggaggctcgtgccgcggccgaggagggggtcagtcagtgggcttcgccagggttctatcaccccatggccagcctaccctcttgggtcagtcgttggcctctgcgttcagcacggagacgctgcagcaacccccgtccactgagtggtacttcgacttaggtgctagttcccacatgacgtcttctagcaatctttcacacactttttcgccacggtatcctactccatctattgttgtcggtaatggctccctgcttcctgtggtcagcactggctctactgaattaccccactctttttttctcgaaagcgcaagagaactgcgcgaaatatattaaggagaaaaag

SEQ ID NO: 13482 - DNA, 2871 bp, Zea Mays
tgaagactgaactcatggttcacaaaatggtatatgtgttacttaactcttacagggtgaactacactggaccagtttgtgccgttcttgataagtatggttttgactagaccagctttggtccagtccctatctcccagaagtatccacataaaaagaaaagctagtaatatctagcctgcatgttgcttttgtttgtttattcactatgccagccctgtattttatctctagagcagtctctaacatatcttctgtccctaaggagatttatgatgatttatctcagaaggatgtggaaagcctgagtgggaggacactatctagtgccaatactacagctattggtcccgcttctgcaggaggcgcaaaagccaactctagttggaagctaaagtctgttgttactcttgcattgacattgctaacaagttctcaggcaatattaattgtgtggtcaaaaagagctggaaaatatgaatatagtgtcacaacagctaatttttcggtggaggctttaaaatgccttctatcactagctgctctttttaggacgtggaactgccatggtgtcactgatgataatagattaaccacatcttttgatgaagttggtgtatatccgattcctgctgttctttacatggtaaagaacttattgcagtactatatctttgtctacgtggatgcaccagcttatcaaatcttgaagaacctaaatatcatcagcacaggtgttttgtaccgcatcattttgaagaaaaagttagtatcttttgagcaattggaaattatctttacagatttactttactctaagagtggaactccaaggatcatggtcacaatttattttgttgattattgtttgacttggatagaagcagaatcggaatttcaagtcttttaggccatgagtctgacagataccagacctgacagaaaaagaactatagctctgtgtgactggccttctagtggaccacaagttttgtttccttcctaggatgtcttacaatctttatttcatcagtacctgttcgctgttctgcagtctttcactctgtgtatgtatattcagtttcccccctgtcccttttaggctaagtgaaattcagtgggcagcatttgttcttctatgtgctggttgcacaacagctcaacttaatccttcgtctgaccatgtgcttcaaactcctattcaaggttggatgatggcaattgtgatggctcttttgagtggttttgctggggtgtatacagaagctatcattaaaaaacggccatcaagaaacatcaacgtgcagaacttttggctatacatatttggggtgatcttcaatctagttgcaatttgtgttcaggattatgatgcagtcatgaataaaggctttttccatgggtattcattcatcacagttttgatgattctgaaccacgcactgagtggaattgctgtttcaatggtgatgaaatatgctgataacatagtcaaggcatgtggcactagcatgtaaatttatgcatgagcatgatagatgatgctactgttgattcagttgtatatgtgctgtccactagagcctgactacggtttatatgtggcattgtagccaataaatggctaagcagtaactcgtgagtatggtgactgcgttagttaggattaggttggatatgtttgttagcttccaaattagataatttgttttgtttagttgctgtcattaaggtgttctcttttgaatatttcatgagttagacctagtccctagcacctacacgtgaggtcactgtcatcatttgaattaagcaaatagaaatgtgaaagaagtctagtctaagccccgttttgtttccctcactaaattttagtctctgtcacatcggatgtttgtgttagcatgggctacagtaggcaggacccttgggttttaggtagtgcggctgcacaggcatgttgccttgtgcgctctctcctagtttggttatttggttgtaataggcaaggatcttcctgattggattgtctaggattgtttcctgttgtctaggattgttcccattgtctaggatagtttcctattcctgtgaacatccttgcctatatgtattcgagcctttgctcccattaatcattcaacattttcccaatacagagtctttcgtggtatcaagagtccgggttccacctcagatttttttcatttctgccccactaagcgcgtcggcctctctgccttatagcgccaccacctccttgccatgcagctctcgcgcaccggcctccctcctgtgaggcaccatgtccgctactgcgcctccatcgcccaagggcgccaccgcccaggacaaggtggttgctaccgccgtcgaccttgttgacttgtccgcctcggccaccctcacccgcgttcaacaagatgagctacccgccaagccacggaaacgaccagtgctgtcgccctggaacaccagagggcctacgatgcggatgttgcctgcctcgccgcggccgaggaggaggctcgtgccgcggccgaggagggggtcagtcagtgggcttcgccagggttctatcaccccatggccagcctaccctcttgggtcagtcgttggcctctgcgttcagcacggagacgctgcagcaacccccgtccactgagtggtacttcgacttaggtgctagttcccacatgacgtcttctagcaatctttcacacactttttcgccacggtatcctactccatctattgttgtcggtaatggctccctgcttcctgtggtcagcactggctctactgaattaccccactctttttttctcgaaagcgcaagagaactgcgcgaaatatattaaggagaaaaag

SEQ ID NO: 13483 - DNA, 844 bp, Zea Mays
cagctttggtccagtccctatctcccagaagtatccacataaaaagaaaagctagtaatatctagcctgcatgttgcttttgtttgtttattcactatgccagccctgtattttatctctagagcagtctctaacatatcttctgtccctaaggagatttatgatgatttatctcagaaggatgtggaaagcctgagtgggaggacactatctagtgccaatactattggtcccgcttctgcaggaggcgcaaaagccaactctagttggaagctaaagtctgttgttactcttgcattgacattgctaacaagttctcaggcaatattaattgtgtggtcaaaaagagctggaaaatatgaatatagtgtcacaacagctaatttttcggtggaggctttaaaatgccttctatcactagctgctctttttaggacgtggaactgccatggtgtcactgatgataatagattaaccacatcttttgatgaagttggtgtatatccgattcctgctgttctttacatggtaaagaacttattgcagtactatatctttgtctacgtggatgcaccagcttatcaaatcttgaagaacctaaatatcatcagcacaggtgttttgtaccgcatcattttgaagaaaaagctaagtgaaattcagtgggcagcatttgttcttctatgtgctggttgcacaacagctcaacttaatccttcgtctgaccatgtgcttcaaactcctattcaaggttggatgatggcaattgtgatggctcttttgagtggttttgctggggtgtatacagaattggaatgtttttatttatctttgaacactgcag

SEQ ID NO: 13484 - DNA, 2310 bp, Zea Mays
cagctttggtccagtccctatctcccagaagtatccacataaaaagaaaagctagtaatatctagcctgcatgttgcttttgtttgtttattcactatgccagccctgtattttatctctagagcagtctctaacatatcttctgtccctaaggagatttatgatgatttatctcagaaggatgtggaaagcctgagtgggaggacactatctagtgccaatactacagctattggtcccgcttctgcaggaggcgcaaaagccaactctagttggaagctaaagtggaggctttaaaatgccttctatcactagctgctctttttaggacgtggaactgccatggtgtcactgatgataatagattaaccacatcttttgatgaagttggtgtatatccgattcctgctgttctttacatggtaaagaacttattgcagtactatatctttgtctacgtggatgcaccagcttatcaaatcttgaagaacctaaatatcatcagcacaggtgttttgtaccgcatcattttgaagaaaaagctaagtgaaattcagtgggcagcatttgttcttctatgtgctggttgcacaacagctcaacttaatccttcgtctgaccatgtgcttcaaactcctattcaaggttggatgatggcaattgtgatggctcttttgagtggttttgctggggtgtatacagaagctatcattaaaaaacggccatcaagaaacatcaacgtgcagaacttttggctatacatatttggggtgatcttcaatctagttgcaatttgtgttcaggattatgatgcagtcatgaataaaggctttttccatgggtattcattcatcacagttttgatgattctgaaccacgcactgagtggaattgctgtttcaatggtgatgaaatatgctgataacatagtcaaggcatgtggcactagcatgtaaatttatgcatgagcatgatagatgatgctactgttgattcagttgtatatgtgctgtccactagagcctgactacggtttatatgtggcattgtagccaataaatggctaagcagtaactcgtgagtatggtgactgcgttagttaggattaggttggatatgtttgttagcttccaaattagataatttgttttgtttagttgctgtcattaaggtgttctcttttgaatatttcatgagttagacctagtccctagcacctacacgtgaggtcactgtcatcatttgaattaagcaaatagaaatgtgaaagaagtctagtctaagccccgttttgtttccctcactaaattttagtctctgtcacatcggatgtttgtgttagcatgggctacagtaggcaggacccttgggttttaggtagtgcggctgcacaggcatgttgccttgtgcgctctctcctagtttggttatttggttgtaataggcaaggatcttcctgattggattgtctaggattgtttcctgttgtctaggattgttcccattgtctaggatagtttcctattcctgtgaacatccttgcctatatgtattcgagcctttgctcccattaatcattcaacattttcccaatacagagtctttcgtggtatcaagagtccgggttccacctcagatttttttcatttctgccccactaagcgcgtcggcctctctgccttatagcgccaccacctccttgccatgcagctctcgcgcaccggcctccctcctgtgaggcaccatgtccgctactgcgcctccatcgcccaagggcgccaccgcccaggacaaggtggttgctaccgccgtcgaccttgttgacttgtccgcctcggccaccctcacccgcgttcaacaagatgagctacccgccaagccacggaaacgaccagtgctgtcgccctggaacaccagagggcctacgatgcggatgttgcctgcctcgccgcggccgaggaggaggctcgtgccgcggccgaggagggggtcagtcagtgggcttcgccagggttctatcaccccatggccagcctaccctcttgggtcagtcgttggcctctgcgttcagcacggagacgctgcagcaacccccgtccactgagtggtacttcgacttaggtgctagttcccacatgacgtcttctagcaatctttcacacactttttcgccacggtatcctactccatctattgttgtcggtaatggctccctgcttcctgtggtcagcactggctctactgaattaccccactctttttttctcgaaagcgcaagagaactgcgcgaaatatattaaggagaaaaag

SEQ ID NO: 13485 - DNA, 1301 bp, Zea Mays
  misc_feature (1)..(2): n is a, c, g, or t
nncgccttaagaaccatgcttcagcttatgcttgaagcagtttggatacaagttcccataaacgatgtacaccacagaacagcattcgagagcaagatgaaggaaaaaggatgttatttaaactgcagatgttccatgttggttgagtcatcaataacatgagtcagtcgaacaaccaagctgaatcacaatgtgtttaaatttggagtgtgtttggacagttttgattgtgcaagcagcagccaattatcagatagcaaattatttttttactctctacagcagctgtgccggaagcaccaaactgaacttggttgcacaggatgacaggaagcttcaccctaggcccaaaacagcattctacgaccaaaacaagcctctgcagttcaaactgtctcccaagttaaccaatatatgccacaatctgggtccattgagctaaaaccaaaacgagtgctgacgttgtcgacagcatgatcaatctgagtaaacaacagtcataaacttcgatgtccttgccaataccaactagccagcatatgaaacatggtcagtcccccaaaacagatgcaagcatgtcaatctcacacacattcaacatggcactcactgcggcgaccagattagcaaccctattcatctgatatctacaaacagagaaaaggtgtgatttcaacgtatggccatctgcatcatgtggaatttgtggaaggaacaaaaccacagaattttttacaagaaattatccacacccacccaggtagcaggcctaactaatgaagatctggagcaatacagagggctcaaatacatatgcagagttagcgcaccactcaatgtccctttgggctatcagaccgtgtaattacctccgagaccgagaagcattcttgtatagaaaacttcctttcctacttttaattgaaaggcacagctcctgtcattgcgttcaaaatacttacaaacaacgacagatacagtacagatagattgtacgaaccctaggtaaagacaatgccgcaggaactttgggtgatagttccggaaagggagagattcttcctagatcgaagaggcagccgaccgcgacctaaatctgatccttcaccctcctgtactccatagccacctcaccgctccgccttggaatcgcttaatcgagtggcggctcgactttgagagacgaggaggagctgccgctcgctgcgtgttgggagactggtgagtgggccccggcggtcgatgacacgagcacgggaaccgaggagcgtggagcaggacggtagtgagccggtgagcgg

SEQ ID NO: 13486 - DNA, 3177 bp, Zea Mays
cggcccccaggcccggggcatcgagctcataacgtcggagaacttcgtttgccgcgcggtgctcgtcgtgcttggctgccacctcaccaagaagtactctgagggcccccgggtgctcgctactacggcgggaatcagcacatcaatgccatcgtgcggctctgccatgtgcgcgcccgcaacattgcaacagaaaagagaggagagagaattggtgtgcgcggggtaggatctgggtctcgacgtggctttctcggcgagcagttgttgcgggtcgtgcagagaaggcacggttcgagcaaaggctcatcaggttctgcccagcatcaccaggtcgtaccgtggacatctctgtcctcatctttgtcggtagataggtactttaactcgagttcgttcttacttccgctttaatttcaacccggttgcttttggattaatttgctagggggcggcgacacggccgtcgccggcatgcccgccatcgcggttgcactgggcggcgcagcctggtcactagcaggaggtaggtgaaggggtgatggctgttgatcgcttgctaaacggtgaggattagatctcctgttgtcacattgaagccgagatctaagccattcatttggagttcaacggatatgattagaccgtaggtgagttgttcggttaaatagatccgggcctttggatttcgatccaacagttggcgctgcataccagtttagagttatgaagatttaatctgggccattgaatcagatccaacagccagaattcgtggataccccttcggctctacgatttgcatataagcccctatatttctaataaaccaacccgccgtcctcgcgggagtagtctgagtctggtagagttttgcaaatttaaccctagtctctctgatattagtgtcctcggtccagaacacttaggatattcagaaattaataaagaaataggtttttagtataaaaataaatccataaacttgtttaatccatatttaactccgaattgacccattctagtttctataattttgtattaatattgtttatcacctagtacctttgtttaatcatgaaactcgaattaaaatttctcaattgaattaatctattctaggtgctaaataatttcagaaattcataactcaataatcgtaacttcattatgatccattctagttgcatgagtctcacaataatatttattatcatctgataactttgttttgtcatgaaatatgggttaaaatgttgcacttagtctattctatatttaaccacgtggatcttcgaaaaaccataactcgataactgtagctctgattttagtggttctcgaacccacgatctcgtagcagcgagtagattactattacgcagtttattcttatgtttggtgtgatgttaattttgtccataccatgtttgtttgtattgctacgtttagcagtgaggacacgagtcacctgaagagcaagttggtacctagaatctcaagtgccaggcaagttgtgtccttgatcacttcctttttacccagtcatgttcttattaatcataatgatctgcatagattaattttgatgggacccaatagattaccctagatttgactatctttataccttgattaccactgaacttttgggtagtacatgctattgctttatgtggttttgggtatggagatacacattgttcacgattatatttttattatctatttattatttactgttcatgttaagatcattatgttaatgggaacatggagaaccactcgggaaaacagtgctaccacaagggtttaatggacgcccttggctgattaactaggaaagctagtggatgactaccttacccgaaaggggcaagggcagtaggggagtggtcagtgtagggaggtccttggttgattttgctgcgatggcggtcaggcgagggattcctgcattggagcttcctataaactgtagcgggttttctgaagctagtagaactttgtaaaggcctcgtagtgttaccctgcctcgcctcctcggtagaggtgtatgggattggccgtctcttggcaaatgggtaacatgacttgtgggtaaagatgtgcaacctctgtagagtgtaaaactggtatactagccgtgctcacggtcatgagcagcttggacactcacatgattaaattatagaacttaaactcaatttgtcatatgcattgcatcgcaggtgaggttgttacttttgttctactacttaattgggttggtatttacttatacttaataattgctaataaaattttgaccaactttaaaagcaatgctcagctctaaccatcctctttggtaagccttacacttcacgtgagctcccacctttggcgagttcatgcacattattccccacaacttgttgagctatgaacgtatgtgagctcacccttgctgtctcacacccccacaggtcaagaataggtaccacatgatgaggcgcatggaggatgttgtgacgagttcgtgagaggtctaggtcgtcgtctcccagtcaactttgggttgctggaccgttgtctccttatattgtaattatttatttattttgtacagaactcctattatatagtaaagatgtgacattcgatcatgtgccatgattcatcatatgcgtgagagttggtcccagcacacctagtgattatgttcgcgcccgggtcttggtgctccgaaacccgggtgtgacagtactttaatgcaatatgttcaaaggagctgagtgctgaagatttagtgcagttgagcacctcgattcctgaaaccctttgtcggcttgagatgattttcccaccagccttttttgatataatgatccatttgccgattcatctagctaaagaggctaaacttggtggactagtgtgctatagatggatgtatccaattgagagatatctacgtactcttaaagcctatgttcggaacaaagcgcaccctgaaggctcgatggctgagggatatatattagacgagtgcatgacattttgcagtcgcttcttgcaagacgtggaaaccaagcttaatcatgcagaccgtcatgaagctgatgctgtgaatgaaccaccatctggcctaagcatatttgccaacattgactacactaagaaagaattcattgt

SEQ ID NO: 13487 - DNA, 2258 bp, Zea Mays
aaaaacaagttcgcaaacccagcacctcgtatcctcccgtcgccgcctcgccttcccctgcgctaccaccgccgctatctgaaccccagcgcctatccggtgagccggaggggaccgccgaggatgttttactcgcacacgatcctcgcgcggaagagcccgctgggcaccgtgtggatcgccgcccacctcgagcgcaagatcaagaagccgcagatcgatggcatcgacatccccacctacgcagaaagtataatgttccctgaagttccaattgctctaagattatcagggcatcttcttctaggtctagttcgcatttattcatggaagactgtgctccatttgagtccattacactaccatcaacactaaatcttgacgccttgaacttggatgacgcaatttctctgatggatacgccagataatcatcagaagactcttgatcagattaccttgcctgaaggagaatatgtgatgatagaacttgatgaggatgccagagtagagcaatcaggtcctgctccatcattacacatgggacctacagcaatcgaggatgagacgtcccctccatttcatgatggttttggagctaataacgatcctaatgaagaagctcccatagatcgtcccataggcaattcaccagtgaattccaacatagcaaatctgacagatggagcactagatccacctgaaaaaatgcgtgaagctccacatgagtttcctcacctgaaattaacagagtccatccttggaaatgatgaccccatggatttggaccatgattcttcaccttttgtgcaaaacaaggctatcacccctccagttattgatgaaacaacttctgctggtcgacaagtacctgggagatccatttccaatttacgtgcaccaaacacctttgatgcttttgcagatgatgcacccctaaattttgacattcagttacctgaatttcggcttgagccatctccacgtccagtacaagagaacaaggataatagaagaccaaaagcacaagttagcaatagaaataggaagagagggatgaaatttgattacaaaattgtgctctccaatgactgtatgagaaagcaaattgatggtgctgaactagatgagttgatctgcaagaggagaaaattaccccagacagcccttgatgtgtggagattcagcagaactaacagacagggcagcttcttgcttgaacctctgctgcatgggacgtgcagtgatcttcaagaaacctatgagagaaacttcccttgtgtcagtggccttgatgctgagtgtagcaatgtggctggtgtagcaaatgatgatccggatgcatcacttgaacggcagctaagcccaaatgttcctagaactgcggagctgtcttaccatgagctcaccccaacgtctccaggaaatgcagaggcacagcctgaaccacctctgccaaccctaaagtcaccaggagctgcaggtgcagtgccagacgatgatatgttgcctgagttgccccggttctcaccaatagatgtgccatcttcaataagaggaaatgatactccttacaaaactcctggcggaactccatcttggctcggaggatctgctgtttctgaaataccatcatctgatgggaactattcattacctggacaaagtactcgtgactctgataacatgtcattcctttttccaatcaatgaagatgatgaacacccagagatccctggtctcatgagtacacctggaggggtatctagtgtagctactggaactaccggattaggaagcatgtcggctaggacaagggctgttgcacttttctttaaggatcatgcgtcttcaccctcagatgatcagcctggaaaattcagtttgaacaaaattttggaagggaaaacaaggaaacaggctgcaaggatgttctttgagacaacggacctcttgtccatctgcaaaaagatagaatccccaaaggctacctgaatattgtttccgggtgatcctggagaaggggtcaaatgggcgtaaacttctgttaaatgtcggctagggactaagttagcttagtgaatatcagtgcgaatactagtgtgacatcttatacatgtttatgtctattacttttccttttcgtccattaagaaggttttcatgatattctgtaatatgacctgtttggtcgctgcctagcttgccacattttacctaacttttctgcttaatgttagttctttaattcgaacgact

SEQ ID NO: 13488 - DNA, 2381 bp, Zea Mays
aaaaacaagttcgcaaacccagcacctcgtatcctcccgtcgccgcctcgccttcccctgcgctaccaccgccgctatctgaaccccagcgcctatccggtgagccggaggggaccgccgaggatgttttactcgcacacgatcctcgcgcggaagagcccgctgggcaccgtgtggatcgccgcccacctcgagcgcaagatcaagaagccgcagatcgatggcatcgacatccccacctacgcagaaagtataatgttccctgaagttccaattgctctaagattatcagggcatcttcttctaggtctagttcgcatttattcatggaagactgtgctccatttgagtccattacactaccatcaacactaaatcttgacgccttgaacttggatgacgcaatttctctgatggatacgccagataatcatcagaagactcttgatcagattaccttgcctgaaggagaatatgtgatgatagaacttgatgaggatgccagagtagagcaatcaggtcctgctccatcattacacatgggacctacagcaatcgaggatgagacgtcccctccatttcatgatggttttggagctaataacgatcctaatgaagaagctcccatagatcgtcccataggcaattcaccagtgaattccaacatagcaaatctgacagatggagcactagatccacctgaaaaaatgcgtgaagctccacatgagtttcctcacctgaaattaacagagtccatccttggaaatgatgaccccatggatttggaccatgattcttcaccttttgtgcaaaacaaggctatcacccctccagttattgatgaaacaacttctgctggtcgacaagtacctgggagatccatttccaatttacgtgcaccaaacacctttgatgcttttgcagatgatgcacccctaaattttgacattcagttacctgaatttcggcttgagccatctccacgtccagtacaagagaacaaggataatagaagaccaaaagcacaagttagcaatagaaataggaagagagggatgaaatttgattacaaaattgtgctctccaatgactgtatgagaaagcaaattgatggtgctgaactagatgagttgatctgcaagaggagaaaattaccccagacagcccttgatgtgtggagattcagcagaactaacagacagggcagcttcttgcttgaacctctgctgcatgggacgtgcagtgatcttcaagaaacctatgagagaaacttcccttgtgtcagtggccttgatgctgagtgtagcaatgtggctggtgtagcaaatgatgatccggatgcatcacttgaacggcagctaagcccaaatgttcctagaactgcggagctgtcttaccatgagctcaccccaacgtctccaggaaatgcagaggcacagcctgaaccacctctgccaaccctaaagtcaccaggagctgcaggtgcagtgccagacgatgatatgttgcctgagttgccccggttctcaccaatagatgtgccatcttcaataagaggaaatgatactccttacaaaactcctggcggaactccatcttggctcggaggatctgctgtttctgaaataccatcatctgatgggaactattcattacctggacaaagtactcgtgactctgataacatgtcattcctttttccaatcaatgaagatgatgaacacccagagatccctggtctcatgagtacacctggaggggtatctagtgtagctactggaactaccggattaggaagcatgtcggctaggacaagggctgttgcacttttctttaaggatcatgcgtcttcaccctcagatgatcagcctggaaaattcagtttgaacaaaattttggaagggaaaacaaggaaacaggctgcaaggatgttctttgagacaacggttctgaagagttataattacattgatgtgcaacaagaggatccatatggagccattgaaattttagttaaacccttgctgtcagctgccaaactgacataagttacttggaatcatctgcaggacctcttgtccatctgcaaaaagatagaatccccaaaggctacctgaatattgtttccgggtgatcctggagaaggggtcaaatgggcgtaaacttctgttaaatgtcggctagggactaagttagcttagtgaatatcagtgcgaatactagtgtgacatcttatacatgtttatgtctattacttttccttttcgtccattaagaaggttttcatgatattctgtaatatgacctgtttggtcgctgcctagcttgccacattttacctaacttttctgcttaatgttagttctttaattcgaacgact

SEQ ID NO: 13489 - DNA, 2526 bp, Zea Mays
ctcgtatcctcccgtcgccgcctcgccttcccctgcgctaccaccgccgctatctgaaccccagcgcctatccggtgagccggaggggaccgccgaggatgttttactcgcacacgatcctcgcgcggaagagcccgctgggcaccgtgtggatcgccgcccacctcgagcgcaagatcaagaagccgcagatcgatggcatcgacatccccacctacgcaggtccgtcggctccgccctcgcttgcccaaaggcgcgttttttcttctctctgtcgtccgccggtagaaaaaactggatctttttctcctcccattcttttttttttggcgagggatttttggaagcatctggtggagggttaaaggtgcggtgttccctgtggcgcattcggtgcaaatgtgatggaatcatgcgacagaagaaagtataatgttccctgaagttccaattgctctaagattatcagggcatcttcttctaggtctagttcgcatttattcatggaaggtgcaatatctgtttcaagattgtaatcgaatgctaactacaatgagaacttcattcgcttctgtccaagtcgatcttccaattgatgcagactgtgctccatttgagtccattacactaccatcaacactaaatcttgacgccttgaacttggatgacgcaatttctctgatggatacgccagataatcatcagaagactcttgatcagattaccttgcctgaaggagaatatgtgatgatagaacttgatgaggatgccagagtagagcaatcaggtcctgctccatcattacacatgggacctacagcaatcgaggatgagacgtcccctccatttcatgatggttttggagctaataacgatcctaatgaagaagctcccatagatcgtcccataggcaattcaccagtgaattccaacatagcaaatctgacagatggagcactagatccacctgaaaaaatgcgtgaagctccacatgagtttcctcacctgaaattaacagagtccatccttggaaatgatgaccccatggatttggaccatgattcttcaccttttgtgcaaaacaaggctatcacccctccagttattgatgaaacaacttctgctggtcgacaagtacctgggagatccatttccaatttacgtgcaccaaacacctttgatgcttttgcagatgatgcacccctaaattttgacattcagttacctgaatttcggcttgagccatctccacgtccagtacaagagaacaaggataatagaagaccaaaagcacaagttagcaatagaaataggaagagagggatgaaatttgattacaaaattgtgctctccaatgactgtatgagaaagcaaattgatggtgctgaactagatgagttgatctgcaagaggagaaaattaccccagacagcccttgatgtgtggagattcagcagaactaacagacagggcagcttcttgcttgaacctctgctgcatgggacgtgcagtgatcttcaagaaacctatgagagaaacttcccttgtgtcagtggccttgatgctgagtgtagcaatgtggctggtgtagcaaatgatgatccggatgcatcacttgaacggcagctaagcccaaatgttcctagaactgcggagctgtcttaccatgagctcaccccaacgtctccaggaaatgcagaggcacagcctgaaccacctctgccaaccctaaagtcaccaggagctgcaggtgcagtgccagacgatgatatgttgcctgagttgccccggttctcaccaatagatgtgccatcttcaataagaggaaatgatactccttacaaaactcctggcggaactccatcttggctcggaggatctgctgtttctgaaataccatcatctgatgggaactattcattacctggacaaagtactcgtgactctgataacatgtcattcctttttccaatcaatgaagatgatgaacacccagagatccctggtctcatgagtacacctggaggggtatctagtgtagctactggaactaccggattaggaagcatgtcggctaggacaagggctgttgcacttttctttaaggatcatgcgtcttcaccctcagatgatcagcctggaaaattcagtttgaacaaaattttggaagggaaaacaaggaaacaggctgcaaggatgttctttgagacaacggacctcttgtccatctgcaaaaagatagaatccccaaaggctacctgaatattgtttccgggtgatcctggagaaggggtcaaatgggcgtaaacttctgttaaatgtcggctagggactaagttagcttagtgaatatcagtgcgaatactagtgtgacatcttatacatgtttatgtctattacttttccttttcgtccattaagaaggttttcatgatattctgtaatatgacctgtttggtcgctgcctagcttgccacattttacctaacttttctgcttaatgttagttctttaattcgaacgact

SEQ ID NO: 13490 - DNA, 2264 bp, Zea Mays
ctcgtatcctcccgtcgccgcctcgccttcccctgcgctaccaccgccgctatctgaaccccagcgcctatccggtgagccggaggggaccgccgaggatgttttactcgcacacgatcctcgcgcggaagagcccgctgggcaccgtgtggatcgccgcccacctcgagcgcaagatcaagaagccgcagatcgatggcatcgacatccccacctacgcaggtctagttcgcatttattcatggaaggtgcaatatctgtttcaagattgtaatcgaatgctaactacaatgagaacttcattcgcttctgtccaagtcgatcttccaattgatgcagactgtgctccatttgagtccattacactaccatcaacactaaatcttgacgccttgaacttggatgacgcaatttctctgatggatacgccagataatcatcagaagactcttgatcagattaccttgcctgaaggagaatatgtgatgatagaacttgatgaggatgccagagtagagcaatcaggtcctgctccatcattacacatgggacctacagcaatcgaggatgagacgtcccctccatttcatgatggttttggagctaataacgatcctaatgaagaagctcccatagatcgtcccataggcaattcaccagtgaattccaacatagcaaatctgacagatggagcactagatccacctgaaaaaatgcgtgaagctccacatgagtttcctcacctgaaattaacagagtccatccttggaaatgatgaccccatggatttggaccatgattcttcaccttttgtgcaaaacaaggctatcacccctccagttattgatgaaacaacttctgctggtcgacaagtacctgggagatccatttccaatttacgtgcaccaaacacctttgatgcttttgcagatgatgcacccctaaattttgacattcagttacctgaatttcggcttgagccatctccacgtccagtacaagagaacaaggataatagaagaccaaaagcacaagttagcaatagaaataggaagagagggatgaaatttgattacaaaattgtgctctccaatgactgtatgagaaagcaaattgatggtgctgaactagatgagttgatctgcaagaggagaaaattaccccagacagcccttgatgtgtggagattcagcagaactaacagacagggcagcttcttgcttgaacctctgctgcatgggacgtgcagtgatcttcaagaaacctatgagagaaacttcccttgtgtcagtggccttgatgctgagtgtagcaatgtggctggtgtagcaaatgatgatccggatgcatcacttgaacggcagctaagcccaaatgttcctagaactgcggagctgtcttaccatgagctcaccccaacgtctccaggaaatgcagaggcacagcctgaaccacctctgccaaccctaaagtcaccaggagctgcaggtgcagtgccagacgatgatatgttgcctgagttgccccggttctcaccaatagatgtgccatcttcaataagaggaaatgatactccttacaaaactcctggcggaactccatcttggctcggaggatctgctgtttctgaaataccatcatctgatgggaactattcattacctggacaaagtactcgtgactctgataacatgtcattcctttttccaatcaatgaagatgatgaacacccagagatccctggtctcatgagtacacctggaggggtatctagtgtagctactggaactaccggattaggaagcatgtcggctaggacaagggctgttgcacttttctttaaggatcatgcgtcttcaccctcagatgatcagcctggaaaattcagtttgaacaaaattttggaagggaaaacaaggaaacaggctgcaaggatgttctttgagacaacggacctcttgtccatctgcaaaaagatagaatccccaaaggctacctgaatattgtttccgggtgatcctggagaaggggtcaaatgggcgtaaacttctgttaaatgtcggctagggactaagttagcttagtgaatatcagtgcgaatactagtgtgacatcttatacatgtttatgtctattacttttccttttcgtccattaagaaggttttcatgatattctgtaatatgacctgtttggtcgctgcctagcttgccacattttacctaacttttctgcttaatgttagttctttaattcgaacgact

SEQ ID NO: 13491 - DNA, 1340 bp, Zea Mays
actaaacccgcaaatcactaccaggagcctacgctaacgaacaatcaaaccatcgccacaaacactagtcataccacggtacacactaagacatttcgtcgtgtgataaatataactacgacacgtagacttacaacgggataatcatcgcgaccaacctaggtagccaatccatttagctaatccattaattaaacccactagcaaaaattataaatcagcttaccaattcaggaatgcttgcgacataacagaaaaagtgtgacgacgatgctgaagagcaggagcacggtgtggcggagatcgacaagtgggtgtcgacgagcacacggagtctagcagagctgtgttgctgaagataacgtggtgacatgcaaacatgttgccgagtgacaacgttgatgtccgagcgctgcgaggcaatggcagggtcgacagtcagtagcgcgatcctatttggaaattagtgcgcacaagaccactgaggaggactggggaggtacggccgagcacagtaatgcagagtctcgtgacggtgatgagctcggcaaggcacaaggaccggcgacggcatccgcgaccaagcacagggaagccggtgagctgtggaccgggagcggcgtcacgggatgagcaggaagacaacaacgtgagcgcaccgagcagggagaaaaccaggatgcaaacgaccgcacgggcgggctttcaccggcgatgtccgatcgcaggaggaagaggaaaaacaggaagctgggcgcgcgagctggtgacgaggaagagacaccaggcctaggcggcgcacgacggtttggggtcagactcggcgagttggagatgaacgatgcgtggctgggcgtcaatggctggatccgagcgcgagtgaggagctcgaccagcgaactgtagatggcgtaggatctcggtgccctgaccgagcgacgcgagcagctgagccaccatggcgtccgcgaccggagcgagctgggggaacgacgcgaggactgaagacgagctcatgcgtcgagcggggtccgacgatggagagcacaaatggagaggaaaggcaggagcttggcgcgtccttggagatgagagcaggggcgcgacggacagccggggcgagcacacccccgacggctgggcaaaagctgtgagggagataggagatgggagatttgcaagcacgagcttggagggacacggtggagcagggaattggggaagatgcagcccggcgaggatgaagaagaggagcacgatctggagcggctcgatgtgctctgcgtaggagaagaaacgtgagcgagaaagatattgtgaacaacggcgcctggagattt

SEQ ID NO: 13492 - DNA, 539 bp, Zea Mays
cccctatccaaactgaagcgcgcacgcagggaatcgcaacaacctccgaaccgcgtgctgacaccttggactcgggcgttagccccctgtcagctacctccttggccgtccacccgtgctcggctgttgcaacggctcgccggaatactcgccaccagctcggaaccacctcggccgagtcttcgaggatcggtccacgcttcgacctggggatataggctgcgcccaagctgctagttaattcctatctcgtccaactcgcgaccgagagaagagagggcaagggagaagattgccgccgctaccgagctggtggttggtcaccgctgggacctcggctggctgctcgtgtgtgcgctggggtggagtcgtcagcgttcgcttcatctattgacggtgtgcggtccctgggccatcgcgattgctcgccgtcgtgccatctccgccgtggactgcatctcgccgtagccggggcctcttcgccaccaaatccgtgaggtcacgaggaatgaagaatcaccctggctactggaatctca

SEQ ID NO: 13493 - DNA, 752 bp, Zea Mays
attcatggcaccggaactctatgacgaggaatataatgagcttggtgaaaagccaggttcactggctaagattggtgatcctgaagtaaaattatttatagagaaatgcattgctaaagtcactgaaagactttcggcaaatgaactcttaatggatccttttctcctagatgttagtgatgaaaaaatattctatccagtgcatccaaatattaatacaacagatactggttgtccaaaaccaagctctagtttcagatatgacggagtagcatcatctgccggtcgccatgatcgctcaggtagcatgtcagattcacatccttctgataactatgtacgagacactgtggatccacatgctgcaattggtcgaagtatcacagtctcacacttattctctatccatttctttgtaccaatgcataggtcatgcccaaaacatccacttcccctttgatattgaagcggacactttaatcagtgttgcaatggcgatggttgtgcagctcgatctcacagatcaagatgtaacgacgattgcagaaatgatagatgctgaaatacgttcgcatattcctgattgggcagcagaggagtcaattgacaaccaaggggatgaagctgcttactctgagacccatagttcagaaggtgatgagggaacttctgaactgcgtgatgagatcggttgccgctacacccacatcggcgacatgcactggatcttcgcccgccatcagcgctcgtga

SEQ ID NO: 13494 - DNA, 1267 bp, Zea Mays
cctatattgtggttgagatctggcaagtagagagcaaaggccatggtccatggagcaccaagcaaaaatctgcacccaccacatgcaacaaagccaccaaatcttttccctagcaccacatttgctggcattgaaacaaaagaaaaaacataagtgccagaatcagcaacctttgctgggatttaggtcccattagacttggacagtccctaatgaccctaattttatttttttaatactatatataacccattggtgtgtaacaagaacaaaagaacggatcgattcacgtggttttctgatcttttttcagaatgtctgccgtcgagaataaaaggtacaacggaatcaggtgccgtgttgccaaataagttgcttgccttatcttggcagctgcagctactactctgcagactgcaggagttataagaagagtctccggccacactccgcgtcagagattcagagctgatgaactgcttctggtgtcctgtacatctcaagatgaaaaaaagcaccaccgtcctcgccatctccatcttggtcctctcccttgcctcccagttctcatggtgtgcagaagcagctgagggaagcgccggaatttccacagagcctgatctccaggtgcaagaacaagtgcacgggtcgcaaccggaagcttggccatgaggtgaccacagtggagttgaagcatcacaggaggattaccagtgggcacaagggtggcagcgcgggtggaggcgccggcgccggtgccgcgggcgcaggcacgggtgggcataacgtgggcggcgggggcgccgtgacgaggccgcacagctccaagaacggcgcggcggcgctcccagtgccggtgtcgtccgtcctgacgctggccttggcctgcggagttgttctgtcagtcatgagctactgatgagatgaaactctcgtcttcccggagccgatcggtatctccgagccgattttacgggtattggtgcgatagtttctcgatttgttcgttgtaacttgtatatcatatcatcatgcagtggtgaaaaccggacggatgctgacggatgtagctgtcattatatatctatcgtaatgtatttctcgcgaatacagaatcaatacagttatttaaaattggaacacatgataagaccggttaataattcaagcggatatataaagaatatttgtcggataatccatactaaccatccaacaaacaagtaaaataataatcatatacatgatagtttaaacatagaaaaat

SEQ ID NO: 13495 - DNA, 1255 bp, Zea Mays
attggtaccgttatactcgtcggatattaagttgttggtggtttattgcgtcgttggaaggtggtggtgccggtgcatccgctgatcagccactgggtctcagtactccgcgatcgctccaccccttcccacgccttcaggagtgcaatgggggagctagggagattgctaatctatgaggcaacacgagattggttggtatgttcataaattttcttacctaaaactagataggaatactgcatttggtggtgccggtgcaagtattcgatgttaaaataaatatctggtacatgtggaaaataatgatcaacgcaatgcgaaaaggaagcatgtaaagtattttttccctggcggacagtaatgatggattttattttgttgagtatgttatcattgagatagttctccgctttcttatggtagccgacagtaacacggcagatccagtcacctgtgggcactgaggttgttgaatctgtcagtgagatggagccaataatgattgtacctattcttagagcagggcttgcacttgcagatctcgcaacatcaattttgccttcaactagaactttccatttaggtatggcccgggatgagacaacactgatggcctctgtttacttaaataagctacctgatagattcccgaaaggatgtaaaatcctcattgtggatcctatgctagcaactggtggaacagtcactgcagcagttgatctggttatggaacgtggagctgaaatcagtcagataaaaattatatcagctgttgctgcccctcctgccctcaagaagctcaatcaaagattcccaaggatttgtgtgtatacaggagccatggatcaaattgtaaacgagaaaggtttcataatcccaggccttggggatgctggagatcgcagctatggaacatgactccggcccttcggtgatggccatcgttaggaatttcagcaaaacccagatttagttgatgcctgcttattttcgtagatgagatttgtggttccactgaacacaaatctgtagttttgagggtctggacataatattttgacaatgtgatgtcaaatttcgcccttctattgtggcgatgtcctgataatggttatgagcttcatggagtgtttattttgagaagtgggatagcctgcaatcaccgtagctctaaacataacctatttgccttagctctgaacataacctatttgcttggtttcaagaatgatgggagtgctttgtttgaaaa

SEQ ID NO: 13496 - DNA, 1216 bp, Zea Mays
ttggaaggtggtggtgccggtgcatccgctgatcagccactgggtctcagtactccgcgatcgctccaccccttcccacgccttcaggagtgcaatgggggagctagggagattgctaatctatgaggcaacacgagattggttggtatgttcataaattttcttacctaaaactagataggaatactgcatttggtggtgccggtgcaagtattcgatgttaaaataaatatctggtacatgtggaaaataatgatcaacgcaatgcgaaaaggaagcatgtaaagtattttttccctggcggacagtaatgatggattttattttgttgagtatgttatcattgagatagttctccgctttcttatggtagccgacagtaacacggcagatccagtcacctgtgggcactgaggttgttgaatctgtcagtgagatggagccaataatgattgtacctattcttagagcagggcttgcacttgcagatctcgcaacatcaattttgccttcaactagaactttccatttaggtatggcccgggatgagacaacactgatggcctctgtttacttaaataagctacctgatagattcccgaaaggatgtaaaatcctcattgtggatcctatgctagcaactggtggaacagtcactgcagcagttgatctggttatggaacgtggagctgaaatcagtcagataaaaatttcattggtatgcagatatcagctgttgctgcccctcctgccctcaagaagctcaatcaaagattcccaaggatttgtgtgtatacaggagccatggatcaaattgtaaacgagaaaggtttcataatcccaggccttggggatgctggagatcgcagctatggaacatgactccggcccttcggtgatggccatcgttaggaatttcagcaaaacccagatttagttgatgcctgcttattttcgtagatgagatttgtggttccactgaacacaaatctgtagttttgagggtctggacataatattttgacaatgtgatgtcaaatttcgcccttctattgtggcgatgtcctgataatggttatgagcttcatggagtgtttattttgagaagtgggatagcctgcaatcaccgtagctctaaacataacctatttgccttagctctgaacataacctatttgcttggtttcaagaatgatgggagtgctttgtttgaaaa

SEQ ID NO: 13497 - DNA, 1195 bp, Zea Mays
ttggaaggtggtggtgccggtgcatccgctgatcagccactgggtctcagtactccgcgatcgctccaccccttcccacgccttcaggagtgcaatgggggagctagggagattgctaatctatgaggcaacacgagattggttggtatgttcataaattttcttacctaaaactagataggaatactgcatttggtggtgccggtgcaagtattcgatgttaaaataaatatctggtacatgtggaaaataatgatcaacgcaatgcgaaaaggaagcatgtaaagtattttttccctggcggacagtaatgatggattttattttgttgagtatgttatcattgagatagttctccgctttcttatggtagccgacagtaacacggcagatccagtcacctgtgggcactgaggttgttgaatctgtcagtgagatggagccaataatgattgtacctattcttagagcagggcttgcacttgcagatctcgcaacatcaattttgccttcaactagaactttccatttaggtatggcccgggatgagacaacactgatggcctctgtttacttaaataagctacctgatagattcccgaaaggatgtaaaatcctcattgtggatcctatgctagcaactggtggaacagtcactgcagcagttgatctggttatggaacgtggagctgaaatcagtcagataaaaattctgttgctgcccctcctgccctcaagaagctcaatcaaagattcccaaggatttgtgtgtatacaggagccatggatcaaattgtaaacgagaaaggtttcataatcccaggccttggggatgctggagatcgcagctatggaacatgactccggcccttcggtgatggccatcgttaggaatttcagcaaaacccagatttagttgatgcctgcttattttcgtagatgagatttgtggttccactgaacacaaatctgtagttttgagggtctggacataatattttgacaatgtgatgtcaaatttcgcccttctattgtggcgatgtcctgataatggttatgagcttcatggagtgtttattttgagaagtgggatagcctgcaatcaccgtagctctaaacataacctatttgccttagctctgaacataacctatttgcttggtttcaagaatgatgggagtgctttgtttgaaaa

SEQ ID NO: 13498 - DNA, 1058 bp, Zea Mays
caacttcgtgtccgaagtctcactcgtgccaaagtaagagggacaaagaaaattgtgctcatggaggcctcctcaagattggagcttcaacaagcgcacactgagctttggaacctcacctttagctaccttaagtccatggcacttgagtgtgttgttcaactaaacatacccaatgttattcacaactttggtggcaatgccactctacccagtattctctctgccatccaagttcctgaacataggaagccctaccttccacgcctcatgaggtttcttgtcgtatcagactttgttgtggccgaatatggtgatgtgtttgatggcgtaagctcactgcttgatgttggaggaggggatggtagcacagcgaggacaattagaaaagctttcccacatatcaagtgctcggtgttggatctcccaaatgttatcattgacatacaaccaggtgatggcatggttgactatattgcgggtgatatgtttagctcaatcccaccaactgatgctattatgctcaagtatgtgctgcatgactggaacgatgatgattgtgtcaagatcctacaacaatgcaaaaaggctatatgttcctgcaaaccagccggaggaaaagttttaatcatagatgtagtcgttggatctccattgaaagagatgttcgaagcgcaagtcacatctgatttgttgatgatggtgatagctgggggtaaggagcgtgataagaaagagtggcacaagatattcgtggagtccggattcaaggactacaagataagtccagttctggggtacctctcaatcatcgagctctactcgtagaaaattaaaaaaagtgttattagctggtgagaaacatgtctcgaacaagagggcgctgtgatccatttgccttggtggctttttgccaaataataagtgtccagctgtatggtcatatattcgagaaaataagagcatctccaaggtcattcacgcataaccatatttatgagctagctgtaattgcttttataaattattaccacatttatcaattcattcatgcataa

SEQ ID NO: 13499 - DNA, 309 bp, Zea Mays
aaacatctaacacgaacacgacgcatctgctaaacacaataattattacaactagcaagtcaagttaatccaattcgattagctgaaataataaattggcataccaagaccgaatggattcgatatccacgagggcgatgacggttttccaatttagacatttggtcgagtcccaagagagcgcttataggcctcgcttctctcgaacatcagggatttctcatccaaagtaagtccgactcaaagcttgcgagagcatcgacagtctccgaataaaatcttcgatcgaacacctggcgagcattgaac

SEQ ID NO: 13500 - DNA, 246 bp, Zea Mays
aaaccggcggtgggcatggtagggagaactggagggagcaggggatgggcgccgccatgggagctcggcgggaagggtattccggccatgggtggagccaagcgggagcacggagaagacgccgagaggagggagatgaaggagctccggccatggagatgggcggctgagctaggagggaggctgcgcgcggaccgaacactggcgaattcccgcgcgtggggaaacggcaagcgcgatggccag

SEQ ID NO: 13501 - DNA, 1059 bp, Zea Mays
cacgcgtaggcttcttctgcagccgcctgctcccttgcgccactgctcaggtcggcgttcctctccctctcctcatctccatggccggagctccctcctctccctcttccatggccggcgtccccttcagctccaactcggcctccatcccatggcgcccggccgcctcttctcccccatggcgctcctcccctgctcctccgacgcggcggcttccggctcgctcgaccggccatggtggccgcgcaagcctcctggccgcgggcggctctagcccaggccaccttcgcgcccggggttatggcgcgcgtccctacgcctagctaggcgcctagcctttgtctccgtcgcgccgatccgcgctcgccaaggtcacccgccatcgcccagctcagcggcttcccctgctacaaagttcgtcgtctgtccgtacgtcgcctgctgcttatatcctagccaggtcaaccttgtcatggtgctggagctctcgtggatccggcatgtcgtctacttgcagctccggcaggccgcgtcgtcacactgtttactcctttgatgccgtcaagctacatcgctgcatcggctcgatggcaaggctcgcctgacaccatgttgtccctgttgccacgttcctcgttgtgttcggttccggttgcgccgtcggatgcacacctccggagctcgccggtgtcatgttctagtcagcatcatgtcctgcgcgacacgctctagtgtcgtttgtcgcgtattgcacgtcctcaccatctccaactttcaacgttcactgttgtccgctacgcgcaaccatgcgacaaccacgccatccacgacatatgttcgcgccaaaaatccgagaaaattagacataaaaggaaacaaatcagcatgtagccagaaaatttttgatgtgaatggagaaggcagtaaagtccgcgtggtgctcaccacgtgctcgacgtaatgatagaattggaactcgtagctgtgctcgtggccttcaagacggattaaattattggtatgttaagtgatcacgtgatgtggaggactagagctgag

SEQ ID NO: 13502 - DNA, 2507 bp, Zea Mays
cccagatctgcgaacgcgcgggtcggccgcatcgagatctggctgcgcgtgttcgcgacgattctcgctctccgcgcaatcagtggcgctcagaatgtttcggtcctatgagccgtgcaaaaagcttcatatgtgcttcccccgtcacgttctcgtcgtgagattcatcgcgggtggatgcgtgatggagactgaaacaacggagatgtgctttcaccgggaaatgcccagaggccagagtgtgcacctaggagaatgtggagctgcaaaactttacatttacgagtgtctgagtcctccggcgataaaattcagagaaggatcatattagaaagatccacttcctgtgaaagtcaacaagctgacctcaatcaagacacaacttccctactcctactattctctcccattctgcaagccggataccatagttgacagtgcagaaaatctcggtgaagttcttcgtggagatcgcattgaaaactctccctatacgtttgaaatgagggagcctcagatgtgtcaagtagtctgcaagatatctgttggggagaaagaagcaaagcttctcaaggagaagattgaagatgaataccgtgttaacatgattcttgacaacctacctttagtcgttcctattcaaagagtggatcaagaaggtgcatatttctatcaacatggattccatgttggggccaaaggaaaatattcagggagcaaagatgaaaaatacttcatccacaaccatctatcttttacggtgaaatatcacagggatgagcaaagggatgtttccaggattgtggcctttgaagtgaaaccatacagcgttaagcatgaatatgaagggcaatggaatgataagaagacccgcctgacaacgtgtgaccctcatgctcaacgtatcattacttcgtccgagtctcctcaggaggtcgaagttggcaaggatatcatatttacttacgatgtggatttcaaggagagcgacatcaagtgggcatctcggtgggacagctatctattgatgacagatgatcagatccactggttctctattgtgaattctctcatgattgttctcttcctttctggaatggttgcaatgatcatgcttcgtaccctttaccgggatatctctaagtataaccaacttgagactcaggaagaggcccaggaggagactggatggaagcttgttcacggcgatgttttcaggcctccgtcaaactcagactggctctgtgtttatgttggcaccggtgtgcaattctttggcatgctgcttgtcactatggtatttgcggttcttggcttcctttctccatcgaacaggggtggactgatgacagccatgctcctgctctgggtgttcatggggttgcttgctggctactcttcttcacgtctttacaaactgttcaagggctcagaatggaagaacatcgccttgaggacagccttcactttccctggcagtgtgtttgctatttttttcttcttgaatgctcttatctgggggcaaaagtcctcaggtgctgttccattcaccaccatgtttgctcttgtcctcctttggttcggtatttcagtacctttggtttttgttggaagcttccttggcttcaagaaacctaccattgaagatccagtgaagacaaacaagataccaaggcagatccctgagcaggcctggtacatgaacccaatcttctcgattctaatcggagggatccttccatttggtgctgtcttcatcgaactcttctttatccttacttccatctggctgcaccagttctactacatctttgggttcctcttccttgtgttcctgattctcatcgtgacatgtgctgagatctcgattgtcctatgttacttccagctctgcagcgaagattacctgtggtggtggaggtcgtacttgacttctggttcctctgcactctacctcttcttgtatgcaaccttctacttcttcacaaagcttgagatcaccaagtttgtctcagctgttatgtacttcggttacatgctcattgcctcgtacgccttcttcgccttgaccggcacaatcggattctatgcttgcttcctgttcacaaggctgatttactcatcggtcaagatcgagtaaggactgctgagtttagctgcaagtgggctcgttttgagttttcaaagctggtagttatgatgaagatgcgattcattaccgtatgattccggtattatagctagctcagtatgtttctgtttttcttttgtttttttttgttttcgggctgtgcccgaccgtgaggatatatgcttatcaagagcttgacgctgaaagaattgtatacgggtgctgagtaatctatctcttgttcctctcagaatttatgtacttgttgatgtgcactgtgacgtacatgatatacatttatagctaccggctcggcggctcctgtttcttttgtacctgagtccagataaatggattcttatacatgtttttctaa

SEQ ID NO: 13503 - DNA, 503 bp, Zea Mays
ttgtgttggcgttcccagaactcctctccattgtgaactaaaggaactcagtgaccaccccctgcatatatatgcagtacttaaaggctttgagtagtggagtttcttccctgccttaagttctacctgaagtccacagcgtggatgtggtgatccttatgttcctgctggtgctaaactcctccccagtctccagagtaatatgttccagagctatacacactgtcttccttggtctggtgaccgcaccccatagattctcttacctcaccatggccaagtcatctggagcagttgtgcatctgggtaaggcttgttctatgatcaccatgtgacactgaagctcaccgagttgatgctcctaacgctatgctgaccagaacagggccatgccaccgtggtctggcgctacggacagcctccacgccggccgagcgactcacgctttctccggccgtcttcacgcgagcaccaaagtcttgcaagaaaaggcgggaagcaat

SEQ ID NO: 13504 - DNA, 1795 bp, Zea Mays
gtccacacatccagcaccaaatccaaaaaccccatctcccacctctccttccttaccggaagagaaaaaaagatgaaaaccaaacgaacatacacagatacaagcacagcagcaacgatatccaaagctagcagctcatcagataggcaaacaccaagaagctaagctagcgcgccatgcagacgccgaccatgtcgacgtccatggccaccacggcgccagcgaagccccccgcgccgccgcggcaatgctgcaggtacctcctcctcccctccaccggccaccgccggagcgtggcggcatggtctgccaaaaagaagaacccgtggctggacccgttcgacgatgggcccgacgaggagttcgattaccagggcatgttctccggcgggaagcaggaggaagacccgcggccgcccgaggaccctgagaacccgtacgggttcctgaggttcccgcagggctacaacccggagctggacagcctcgcctccaagatgctcaaggaccggtaccccggcgtgctggtggacgtggtggcgtcggccaggggcaagcaggtgtacgagatgtgcaagaacgtcaggtacgctaacgtctatgaccccgacgacgactggccggagcccgccgaatacacgcacatgctcggcgtcctaaagaataggtactatgatctgatcatctccacgaggctggcggggatcgggcacgcgctcttccttttcatgtcgtcggcgcgcgacaaggtcggctacgtttaccccaacgtcaacagcgtcggcgcgggcctcttcctcaacgagatgttcaaggcgccgactaacaacctcgccgacggcgggtaccacatgtataaagacatgctggagtggatcggccggccggcgaagaacgttccccagcagccgacacagccgctgcgggtgtccatctccaagaagctacgggcgtacgtggaggacaagtatagccgcgccggcgtggagaagggcaagtacgtcgtcatccacggcatcgcctctgactccgtcgccaacatgaagtccagaggcgacgacgactgccttcttcccctcgggcactgggctcagatagccaaggaaatcagctccggcgacagggggctcaagcctctgttcgtgatccctcatgagaagcacagagatgaaatcgaggaggaggtgggggacgacacaagcatcctgttcatcaccaccccaggccagctcacctgcctcatcaacgactctgccggcgtcgtcgcgaccaataccgctgccgtgcagctcgccaacgcccgcgacaagccatgtgtggcgttgttctcgtcggcagagaaggcaaggctgttcctgccatacgtggagggcaagagcagctgcaccgtcatatcttcggcgacggggaacctgatcgacatcgacctcaacgcggtgaagaatgtggtgaaggacttggagcccgctcccagcttcgcattggcacagaagtagcagctgcgttccaacatcacccccattgctttgtacatagttcaaacagcagcaacgctagagagaatggtgcagtattacaaactacaaacagcacacatgccgtgtattccgatgttataaataacatctcatatcagctatgcaacgaataaaacttagaacaagaaaccaaaaacaagataacataaatgaattaatctttacatcttccattaataaatcctgtttttgagagatttatcaaaggaagaatgttaaagatataaagaatatctagaaatgttcagacataaaag

SEQ ID NO: 13505 - DNA, 1786 bp, Zea Mays
gtccacacatccagcaccaaatccaaaaaccccatctcccacctctccttccttaccggaagagaaaaaaagatgaaaaccaaacgaacatacacagatacaagcacagcagcaacgatatccaaagctagcagctcatcagataggcaaacaccaagaagctaagctagcgcgccatgcagacgccgaccatgtcgacgtccatggccaccacggcgccagcgaagccccccgcgccgccgcggcaatgctgcaggtacctcctcctcccctccaccggccaccgccggagcgtggcggcatggtctgccaaaaagaagaacccgtggctggacccgttcgacgatgggcccgacgaggagttcgattaccagggcatgttctccggcgggaagcaggaggaagacccgcggccgcccgaggaccctgagaacccgtacgggttcctgaggttcccgcagggctacaacccggagctggacagcctcgcctccaagatgctcaaggaccggtaccccggcgtgctggtggacgtggtggcgtcggccaggggcaagcaggtgtacgagatgtgcaagaacgtcaggtacgctaacgtctatgaccccgacgacgactggccggagcccgccgaatacacgcacatgctcggcgtcctaaagaataggtactatgatctgatcatctccacgaggctggcggggatcgggcacgcgctcttccttttcatgtcgtcggcgcgcgacaaggtcggctacgtttaccccaacgtcaacagcgtcggcgcgggcctcttcctcaacgagatgttcaaggcgccgactaacaacctcgccgacggcgggtataaagacatgctggagtggatcggccggccggcgaagaacgttccccagcagccgacacagccgctgcgggtgtccatctccaagaagctacgggcgtacgtggaggacaagtatagccgcgccggcgtggagaagggcaagtacgtcgtcatccacggcatcgcctctgactccgtcgccaacatgaagtccagaggcgacgacgactgccttcttcccctcgggcactgggctcagatagccaaggaaatcagctccggcgacagggggctcaagcctctgttcgtgatccctcatgagaagcacagagatgaaatcgaggaggaggtgggggacgacacaagcatcctgttcatcaccaccccaggccagctcacctgcctcatcaacgactctgccggcgtcgtcgcgaccaataccgctgccgtgcagctcgccaacgcccgcgacaagccatgtgtggcgttgttctcgtcggcagagaaggcaaggctgttcctgccatacgtggagggcaagagcagctgcaccgtcatatcttcggcgacggggaacctgatcgacatcgacctcaacgcggtgaagaatgtggtgaaggacttggagcccgctcccagcttcgcattggcacagaagtagcagctgcgttccaacatcacccccattgctttgtacatagttcaaacagcagcaacgctagagagaatggtgcagtattacaaactacaaacagcacacatgccgtgtattccgatgttataaataacatctcatatcagctatgcaacgaataaaacttagaacaagaaaccaaaaacaagataacataaatgaattaatctttacatcttccattaataaatcctgtttttgagagatttatcaaaggaagaatgttaaagatataaagaatatctagaaatgttcagacataaaag

SEQ ID NO: 13506 - DNA, 1841 bp, Zea Mays
cccatctcccacctctccttccttaccggaagagaaaaaaagatgaaaaccaaacgaacatacacagatacaagcacagcagcaacgatatccaaagctagcagctcatcagataggcaaacaccaagaagctaagctagcgcgccatgcagacgccgaccatgtcgacgtccatggccaccacggcgccagcgaagccccccgcgccgccgcggcaatgctgcaggtacctcctcctcccctccaccggccaccgccggagcgtggcggcatggtctgccaaaaagaagaacccgtggctggacccgttcgacgatgggcccgacgaggagttcgattaccagggcatgttctccggcgggaagcaggaggaagacccgcggccgcccgaggaccctgagaacccgtacgggttcctgaggttcccgcagggctacaacccggagctggacagcctcgcctccaaggtccgcggcgacgtgcggcgcgcgtgctgcgtcgtgtcgggcggcgtgtacgaaaacgtgcttttcttccccgtcgtgcagatgctcaaggaccggtaccccggcgtgctggtggacgtggtggcgtcggccaggggcaagcaggtgtacgagatgtgcaagaacgtcaggtacgctaacgtctatgaccccgacgacgactggccggagcccgccgaatacacgcacatgctcggcgtcctaaaggtactatgatctgatcatctccacgaggctggcggggatcgggcacgcgctcttccttttcatgtcgtcggcgcgcgacaaggtcggctacgtttaccccaacgtcaacagcgtcggcgcgggcctcttcctcaacgagatgttcaaggcgccgactaacaacctcgccgacggcgggtaccacatgtataaagacatgctggagtggatcggccggccggcgaagaacgttccccagcagccgacacagccgctgcgggtgtccatctccaagaagctacgggcgtacgtggaggacaagtatagccgcgccggcgtggagaagggcaagtacgtcgtcatccacggcatcgcctctgactccgtcgccaacatgaagtccagaggcgacgacgactgccttcttcccctcgggcactgggctcagatagccaaggaaatcagctccggcgacagggggctcaagcctctgttcgtgatccctcatgagaagcacagagatgaaatcgaggaggaggtgggggacgacacaagcatcctgttcatcaccaccccaggccagctcacctgcctcatcaacgactctgccggcgtcgtcgcgaccaataccgctgccgtgcagctcgccaacgcccgcgacaagccatgtgtggcgttgttctcgtcggcagagaaggcaaggctgttcctgccatacgtggagggcaagagcagctgcaccgtcatatcttcggcgacggggaacctgatcgacatcgacctcaacgcggtgaagaatgtggtgaaggacttggagcccgctcccagcttcgcattggcacagaagtagcagctgcgttccaacatcacccccattgctttgtacatagttcaaacagcagcaacgctagagagaatggtgcagtattacaaactacaaacagcacacatgccgtgtattccgatgttataaataacatctcatatcagctatgcaacgaataaaacttagaacaagaaaccaaaaacaagataacataaatgaattaatctttacatcttccattaataaatcctgtttttgagagatttatcaaaggaagaatgttaaagatataaagaatatctagaaatgttcagacataaaag

SEQ ID NO: 13507 - DNA, 1864 bp, Zea Mays
cccatctcccacctctccttccttaccggaagagaaaaaaagatgaaaaccaaacgaacatacacagatacaagcacagcagcaacgatatccaaagctagcagctcatcagataggcaaacaccaagaagctaagctagcgcgccatgcagacgccgaccatgtcgacgtccatggccaccacggcgccagcgaagccccccgcgccgccgcggcaatgctgcaggtacctcctcctcccctccaccggccaccgccggagcgtggcggcatggtctgccaaaaagaagaacccgtggctggacccgttcgacgatgggcccgacgaggagttcgattaccagggcatgttctccggcgggaagcaggaggaagacccgcggccgcccgaggaccctgagaacccgtacgggttcctgaggttcccgcagggctacaacccggagctggacagcctcgcctccaaggtccgcggcgacgtgcggcgcgcgtgctgcgtcgtgtcgggcggcgtgtacgaaaacgtgcttttcttccccgtcgtgcagatgctcaaggaccggtaccccggcgtgctggtggacgtggtggcgtcggccaggggcaagcaggtgtacgagatgtgcaagaacgtcaggtacgctaacgtctatgaccccgacgacgactggccggagcccgccgaatacacgcacatgctcggcgtcctaaagaataggtactatgatctgatcatctccacgaggctggcggggatcgggcacgcgctcttccttttcatgtcgtcggcgcgcgacaaggtcggctacgtttaccccaacgtcaacagcgtcggcgcgggcctcttcctcaacgagatgttcaaggcgccgactaacaacctcgccgacggcgggtaccacatgtgagagccctccatttgcacaacgatttgcttgctagtttttcaattgcgttgcgtgcgagtatgcaactgtgccaggtataaagacatgctggagtggatcggccggccggcgaagaacgttccccagcagccgacacagccgctgcgggtgtccatctccaagaagctacgggcgtacgtggaggacaagtatagccgcgccggcgtggagaagggcaagtacgtcgtcatccacggcatcgcctctgactccgtcgccaacatgaagtccagaggcgacgacgactgccttcttcccctcgggcactgggctcagatagccaaggaaatcagctccggcgacagggggctcaagcctctgttcgtgatccctcatgagaagcacagagatgaaatcgaggaggaggtgggggacgacacaagcatcctgttcatcaccaccccaggccagctcgccaacgcccgcgacaagccatgtgtggcgttgttctcgtcggcagagaaggcaaggctgttcctgccatacgtggagggcaagagcagctgcaccgtcatatcttcggcgacggggaacctgatcgacatcgacctcaacgcggtgaagaatgtggtgaaggacttggagcccgctcccagcttcgcattggcacagaagtagcagctgcgttccaacatcacccccattgctttgtacatagttcaaacagcagcaacgctagagagaatggtgcagtattacaaactacaaacagcacacatgccgtgtattccgatgttataaataacatctcatatcagctatgcaacgaataaaacttagaacaagaaaccaaaaacaagataacataaatgaattaatctttacatcttccattaataaatcctgtttttgagagatttatcaaaggaagaatgttaaagatataaagaatatctagaaatgttcagacataaaag

SEQ ID NO: 13508 - DNA, 1692 bp, Zea Mays
cccatctcccacctctccttccttaccggaagagaaaaaaagatgaaaaccaaacgaacatacacagatacaagcacagcagcaacgatatccaaagctagcagctcatcagataggcaaacaccaagaagctaagctagcgcgccatgcagacgccgaccatgtcgacgtccatggccaccacggcgccagcgaagccccccgcgccgccgcggcaatgctgcagatgctcaaggaccggtaccccggcgtgctggtggacgtggtggcgtcggccaggggcaagcaggtgtacgagatgtgcaagaacgtcaggtacgctaacgtctatgaccccgacgacgactggccggagcccgccgaatacacgcacatgctcggcgtcctaaaggtacgtacgtacttgtgctgctattccatatggaacatttcctctgttttatgagctaaatctcgtcatgcatgttattgcaaccgacagaataggtactatgatctgatcatctccacgaggctggcggggatcgggcacgcgctcttccttttcatgtcgtcggcgcgcgacaaggtcggctacgtttaccccaacgtcaacagcgtcggcgcgggcctcttcctcaacgagatgttcaaggcgccgactaacaacctcgccgacggcgggtaccacatgtgagagccctccatttgcacaacgatttgcttgctagtttttcaattgcgttgcgtgcgagtatgcaactgtgccaggtataaagacatgctggagtggatcggccggccggcgaagaacgttccccagcagccgacacagccgctgcgggtgtccatctccaagaagctacgggcgtacgtggaggacaagtatagccgcgccggcgtggagaagggcaagtacgtcgtcatccacggcatcgcctctgactccgtcgccaacatgaagtccagaggcgacgacgactgccttcttcccctcgggcactgggctcagatagccaaggaaatcagctccggcgacagggggctcaagcctctgttcgtgatccctcatgagaagcacagagatgaaatcgaggaggaggtgggggacgacacaagcatcctgttcatcaccaccccaggccagctcacctgcctcatcaacgactctgccggcgtcgtcgcgaccaataccgctgccgtgcagctcgccaacgcccgcgacaagccatgtgtggcgttgttctcgtcggcagagaaggcaaggctgttcctgccatacgtggagggcaagagcagctgcaccgtcatatcttcggcgacggggaacctgatcgacatcgacctcaacgcggtgaagaatgtggtgaaggacttggagcccgctcccagcttcgcattggcacagaagtagcagctgcgttccaacatcacccccattgctttgtacatagttcaaacagcagcaacgctagagagaatggtgcagtattacaaactacaaacagcacacatgccgtgtattccgatgttataaataacatctcatatcagctatgcaacgaataaaacttagaacaagaaaccaaaaacaagataacataaatgaattaatctttacatcttccattaataaatcctgtttttgagagatttatcaaaggaagaatgttaaagatataaagaatatctagaaatgttcagacataaaag

SEQ ID NO: 13509 - DNA, 1744 bp, Zea Mays
cccatctcccacctctccttccttaccggaagagaaaaaaagatgaaaaccaaacgaacatacacagatacaagcacagcagcaacgatatccaaagctagcagctcatcagataggcaaacaccaagaagctaagctagcgcgccatgcagacgccgaccatgtcgacgtccatggccaccacggcgccagcgaagccccccgcgccgccgcggcaatgctgcaggtacctcctcctcccctccaccggccaccgccggagcgtggcggcatggtctgccaaaaagaagaacccgtggctggacccgttcgacgatgggcccgacgaggagttcgattaccagggcatgttctccggcgggaagcaggaggaagacccgcggccgcccgaggaccctgagaacccgtacgggttcctgaggttcccgcagggctacaacccggagctggacagcctcgcctccaagatgctcaaggaccggtaccccggcgtgctggtggacgtggtggcgtcggccaggggcaagcaggtgtacgagatgtgcaagaacgtcaggtacgctaacgtctatgaccccgacgacgactggccggagcccgccgaatacacgcacatgctcggcgtcctaaagaataggtactatgatctgatcatctccacgaggctggcggggatcgggcacgcgctcttccttttcatgtcgtcggcgcgcgacaaggtcggctacgtttaccccaacgtcaacagcgtcggcgcgggcctcttcctcaacgagatgttcaaggcgccgactaacaacctcgccgacggcgggtataaagacatgctggagtggatcggccggccggcgaagaacgttccccagcagccgacacagccgctgcgggtgtccatctccaagaagctacgggcgtacgtggaggacaagtatagccgcgccggcgtggagaagggcaagtacgtcgtcatccacggcatcgcctctgactccgtcgccaacatgaagtccagaggcgacgacgactgccttcttcccctcgggcactgggctcagatagccaaggaaatcagggggctcaagcctctgttcgtgatccctcatgagaagcacagagatgaaatcgaggaggaggtgggggacgacacaagcatcctgttcatcaccaccccaggccagctcacctgcctcatcaacgactctgccggcgtcgtcgcgaccaataccgctgccgtgcagctcgccaacgcccgcgacaagccatgtgtggcgttgttctcgtcggcagagaaggcaaggctgttcctgccatacgtggagggcaagagcagctgcaccgtcatatcttcggcgacggggaacctgatcgacatcgacctcaacgcggtgaagaatgtggtgaaggacttggagcccgctcccagcttcgcattggcacagaagtagcagctgcgttccaacatcacccccattgctttgtacatagttcaaacagcagcaacgctagagagaatggtgcagtattacaaactacaaacagcacacatgccgtgtattccgatgttataaataacatctcatatcagctatgcaacgaataaaacttagaacaagaaaccaaaaacaagataacataaatgaattaatctttacatcttccattaataaatcctgtttttgagagatttatcaaaggaagaatgttaaagatataaagaatatctagaaatgttcagacataaaag

SEQ ID NO: 13510 - DNA, 246 bp, Zea Mays
gcagcggaaaatcttattaccaaattttacaagttacaacaagtttacattgtatttatcgtagtgattacaaaagtggttcaaaggaataactttgagatgttataaattatttgtaagtttgaaatatatgctagctcaagtgaccatcctcaataagaagataaagatggggtatacttatataagaaggccgagcccaccgacacttaacaccatcaacaacagcacaaaactataacctga

SEQ ID NO: 13511 - DNA, 1921 bp, Zea Mays
tttagatttgcctaatctagagcatccacttgtcctggtctagctttcttttagccaattcatatttcacttgtcaactacgatgagtggtcggagggtagagtctccatgaccgaggagcaacgacgattcgaaccgattatacccagctggggatccctaaccacacgacatatgtagcacttaaaccttgcatatgtcaaccgttcccacagatcctccacaacatgaaccggtccgtgctacccgggagcacagtactcctccatccaccctctagccaggagggtacacgctactcccaccatctcccacacccagtgcacggttgtcttttcacgtatggaatagcctggttcaggcttaccgaagcatgtggatagttgaaaggtctccaccacaacaggcctacatcgaatggtccttaatcgacacagacgggcgaccttgtccactcagcgtctggtctagatgtattcaaaccattttcccatttttggtacccgacaggggtactcttttccaaatgatgaacccactctggccgaagtggaatcatcaccataagtctgctttgatttttgaaacgaaaggcccataaccaatgttccacgatcattctttttgaaaacaaatgatttttcagtttctaagcagggctaagcattatcagttctttttataaaaccgggattaaggagtttccaaggaatggtaatgcatcaattgtttatcacacaactcctatcacctaatgcatcaaataaggtgaaaagcatttaaaacacaaggaaggggcgaatgcaccggggcttgcctggaataacactacgttagtgtttgttagacgatgtccgcttgacgagtatctctcgaccgagcacttgcttaatttaaccatcttcaggttggtccatcaacttcatcctgcggattcagcccgtgcttggggtcgacttggctcgtcttccgcatcacgtgattatttatcgtacctcatgagatgcacgatgcacatgtatgagcacaagtagaacgagtataagatagatactctatactaaaaaggatgaaacacttaaaatcaagcattaagcaccatggatatcatagcagagcatcgactacattcattaaccaaattgacctaataacactagaaaatctatttttattcctagctttttattatctctctaaactgtgtaacttaattacttgatttagcgagctatctaaattgatcatcacaatatacgcatgctaaattaataatatttactgggaccaacaattatatttaatctatttatagacctagttaacgggaatacgaatcaacttacccctaactaattcgacgcgatagtcgcaagcacgacgatgatttccggttgacgtctttgatcacacatgtctggcgagtgatgtacacaactttacttctcgatcagacacccatgggatttattttgtcgagctggtgacgcgtgaccaacaccagagtgtcttcacggcttgggggcttggcgtagacgaggatgatactcgatgacttgttcgagcacttggtgaataccatgctgctagcttcgtcttcaccccacgcttgggatttcatgacgatgcacggaacgatgacgggattatgtctagagcgagctgacgaggtggggttgagcaggggataacggattcgacgactcgacaacaaacgtgagcacgcgcgcgcacgaatgggtcggactgggaccaaaggacgatgaacgtgcagagcttcaaactcacgcgcgcgagataaacagacgcgcgaccagaaacttaagcatccgcgaccgacgaacggcgccgcaaggagcaagacgagctctacagcattggcaacggcacatcatcgacaagaacactgtgcgcagccaag

SEQ ID NO: 13512 - DNA, 748 bp, Zea Mays
atggggaggaagaagcacacgcggagtggctgtcgccctggccccactggtcagacgactaggagcggcgcacgcgattgcgaagctgccacggtgggcccactcgtctgtcagcgaccagacatagatggtgctctcaaagacatcgaaggtcttcctttaccgtttcgtcatctgcaatgtgcttatacttgtagcttcatattacatcagttaccacacatgttgccatctgaaaaggcatttttagttgttgtatctgctcttggcatctacaacaaagacgagatagtagtttatgatggaaaggggttgttcagtgatgctcgtgtttggtggatcccacactcagatggacagccgcaaagaaaaggaagagagtggctcttcactcccatcggattgacaaaaaaaaaaagaagttcgaaaactgagaggaaggataaggacgcaaagaaaagaagtaaaaagaggagaaagttcatcaaagtcaagttccagctcatcttcagaatcttcaagcagcgacgatgaggataggggttcaaggaagtccagatcacagtcgagatcaaagagaacaaggaaggaaaagaagagccagtcaaggtccaagcacagaggcagtgaaagcgaggaggaaggcccggttgagcgagccgtttaccatggtgttctcaatatgatgctcagctgttaagagggtctggtcaagttgtgtggcttccaaaaactttgtaagcaactg

SEQ ID NO: 13513 - DNA, 759 bp, Zea Mays
atggggaggaagaagcacacgcggagtggctgtcgccctggccccactggtcagacgactaggagcggcgcacgcgattgcgaagctgccacggtgggcccactcgtctgtcagcgaccagacatagatggtgctctcaaagacatcgaaggtcttcctttaccgtttcgtcatctgcaatgtgcttatacttgtagcttcatattacatcagttaccacacatgttgccatctgaaaaggcatttttagttgttgtatctgctcttggcatctacaacaaagacgagatagtagtttatgatggaaaggggttgttcagtgatgctcgtgtttggtggatcccacactcagatggacagccgcaaagaaaaggaagagagtggctcttcactcccatcggattgacaaaaaaaaaaagaagttcgaaaactgagaggaaggataaggacgcaaagaaaagaagtaaaaagaggagaaagcataaaagttcatcaaagtcaagttccagctcatcttcagaatcttcaagcagcgacgatgaggataggggttcaaggaagtccagatcacagtcgagatcaaagagaacaaggaaggaaaagaagagccagtcaaggtccaagcacagaggcagtgaaagcgaggaggaaggcccggttgagcgagccgtttaccatggtgttctcaatatgatgctcagctgttaagagggtctggtcaagttgtgtggcttccaaaaactttgatttcggctctca

SEQ ID NO: 13514 - DNA, 536 bp, Zea Mays
aagttcatcagagtcaagttccagctcatcttcagaatcttcaagcagcgacgatgaggataggggttcaaggaagtcaagatcacagtcgagatcaaagagaacaaggaaggaaaagaagagcctgtcaaggtccaagcgcagaggcggtgaaagcgaggaggaaggcccagttgagcgagccgtttaccatggtgttctcaatatgatgctcagctgttaagagggtctggtcaagttgtgtggcttccaaaaactttgtaagcaactggattccagctctcatcaagtgactcctccccctcacgttgactttgcggacagatgtctcaattctaatggtggagctatgaacaacaattcgatgtcctgatcgagagcgatggagttaatgtttgaacttgtgtgtttgaacttgtgaactaaaaatgtgaactatggatgtgaacttgtgtgaatttgtgaacttatgtatttggacttatgtgaatttgtgaacttatatatttggacttgtgtgaatttgtgatatgaac

SEQ ID NO: 13515 - DNA, 496 bp, Zea Mays
gatcgacggaggcggaaccgatagccgaacaggagttgcgcagatcgacgacgcgaggcccgatctagcgagcacgacgcagaggagggcgtcgcacagggagcagggcacagagggagggcgagtagggaagacaaccttcatcagaactggggcgcggccggagttggtgcagggcaagccccgcggccggtgttgaaggaggagctcggctccagagcgcatgagaggagggaggccgtgctccctggaggagctgctcgtaggggaagccgacaaccatggggagcagggagcccgcgcagggagggatccagggggagccaccatggggagaggaggagatgggggcgagctgcaggtggaggagagcgcggctgtgagggagagcgcttgggaggtggagcttgggcgagctccatgcccgggagctaagggcgagtgcaagccggcaaggagagagagcgatgtgagggagtttggcttcttcacgtag

SEQ ID NO: 13516 - DNA, 890 bp, Zea Mays
gtttgaaataattctgcctctggatgcattttttgctcattattagtgatccaagttctccagctcggctctagcaccggcacctgccaatccaccgcctgtttggtcacgagaggcacgtccactctgtccttggtggcggcaagcataagccccctcccccagatttgtatacccgatccgctcctttttttatctagatccgatctagctatatttgtgcttgatcgtgctaccttgtcttgctgcagaatagtttgttaccttgttaataacttgcttcatggtttgaaactgaaaagtggaaaggcaccgacgaccagcagacagttgcggcacaccgactggatcaggagcatgatagtccttttgatccgattcgtggagggctcggcgcctcggtcggatctgacccagggggcgccgccggtccgtccggttgcagccgcgtctgagtttttaagatttggaatttaccatattaaaggaggccgaggatgattgactgaagtctgaatctggatgatctatatattaaatcatactcacgctgaattactgcacgaaaagaacttgggaagcttaaggaggatttatattttgtatagtttttctttactttatgaatattgatatgtattgtacaccaattatatgtatagatgttgaatttcccaccagtcttgatccaaacaatcgagagctagggatcgttctgagataaaagctttgcacaaggaggtgaagaaactctgcttcaaatgtttcaccttacatattagatttttaccaatttactactctttggttataagttatacattgctcatttgactgtaataatgacaaaacatgggcttttgagatggcatgacttatgtgtgattcgg

SEQ ID NO: 13517 - DNA, 1104 bp, Zea Mays
gctaaaaataattttggcgatgttaacatttgggagaacgaaaaaaaaactatcgcatttaagttaattggcatgatccaaaataaacaaatgtgtttatatatataagtttatatctgtgtatatgtatatatgaaaaaaaagaaaaagaaaaatgaatctctctcgtcactcgtccggtagacaacctggcctagcgatcgtgcgggcgtttgcgcccggtcactacttcacctgcgggccccgctcgtcatgtttatcttctctgaaccgtctccctgcccaagtcgcccacgacgcgtgaggattggcaacaacttccaccggccacccctattcaaatgcacaacccttgtctacccctacttctctgtaccgcagccgctcttcatctcgctcttgccgtcgcatggtgcctcggcctcgtagccgtccatcacgcctcgccgtcgtcgcacccgtgtctcgccgactggcaaccgtctatgctcagagcctcgttgtcgtccatactacaccagcaccgtcgccctagcagattgcgatctgttcctgagcttcaaggaaccgacgatcaagatttggtgaaccactcgtccccgagatcaagttcttcgagtcctacgaagttgaagaccctgaacatctgtttggtgaaggcaagtgtcctctgacctattatgtcccatttactttataattcatcaacccgcataccatgctcaacctaaggatttactagctttgtatttaccttgtccttgattaccttttgggttattgtggttagcttcatgctattgctttactgtaatcaatgaacatgatgtgaacacttatgatatgatgttgtcattatgattatgatgttggactggtgacactttagaggctcgagtggtttctcgagtgtctctccgtaaggacctgttcgttggatgaccgcccgggaaaacagtgcaaccatgagggtggtatgggacacccttagctaattaattagaggaactaaggtttagtttgcttcgccgtcgtgccgtcaatggggctcggtgtatgcggctcgttctgccgagcgtggattgccccttggtgaggagtgcg

SEQ ID NO: 13518 - DNA, 845 bp, Zea Mays
tggagcaaacgacatggagttttaatagataagatgttataaaaaatgtctcaatctctccagcttgtaaatatgggatgtaactattgggaaattgaacaagtccaatagaaatagagatcataccagtcaccatgggtctagaaaaaacacaatgtcggctgaagtaggcatacacagacaatatcaaatatggaattaactaacctcaatacaagagatagcggcatcttgaacacttcggttcaaatcattcattaattgtagaacttgcataagacaaaaaaatcttagagcttttggacttatcataccatacaaaaggatacaaatttggatatgataccgacagtgacataagacaactgctaaagatatgaaataggtgctttatcgagcaaaggagtagaacacatatagccgacactacaagagatgacagtgtctcacattggaatcctagcatctccaagaactatggttaaattatttcaagaagcaaaaagaataatatgccatatcatgagtaataatagactaagatagcaaagaataatatgctatattgggtaatgtagataaatataaaaggcacacatcataattggtatacattctctggattgtctcatcatgcaaagcaaaaatctagatttactcaacccacaggaaaaatgctcttgctcgatctcattttaggacataacaaaaaaggtttgttccaaaataaataatataggggttctttagtgaatacaacatggagacaacttcaacaatgagaaagtagcaaagcaaaacacctaccaccatcagcttgaagaacttggacatgatatcaatcg

SEQ ID NO: 13519 - DNA, 2241 bp, Zea Mays
ccctccctacctatctttgtaccctgcacgcatcttctgtcctaagcaacaaccccatttttgtagtgccgccatggcagggccactgcgtgcgccactgccatacctatcagcatgcatgcagagcttccacccgtcacctacaaatccctgtcgctgtcctcgccatcgccgtcgctcgtcgtcgttgtcatcgccaagggtgtcggtgtggctgtgtcggccacggccagctagagctgtgacctgggagtgggagggttggtgcctataggatcgtcatggacaccatcgaggagtgcggcgacggaggccgccacctgctgctgggcctcggcaccaggatactcgtcggcgtgccggacaactcccgcggctgctccgagctgctgtcgtgggcgatcggcgccgtcgccaagcccagcgactccgtcgtcgccgtgcacgtcctcggagggagggggaggaagcggaggctgcagaaggccaacgccttcgtcatctacatgctcggcgaattcgtcaaagcttgtgaggccaagcagattaatttggaggccaaggtgatatgcagctcaaacattgggagagccctgacccaagaagctgcactgactgatgggaacatcctcattgttgggaggtcaagaaatgcgtaccataggagccatttcgagattgcaaactactgcttcatgcatgctccaaaaaactgctcggtgatcgctgttggaaggcaaggcgtagcacagagtagtactcggttgagacctcggtcatttgatgcagatagcaccatctcctcaagctcaacatggagcaggagattcccgccgcttcagaagctgctcagaacaaactcgacacggaagctggctcagtccgacgacaagagctcgccgagagcagttctggacggcccagagggagagggaggggagaaccaagagtgctacagcacgtctagccatgaggtgagccggcgcggccacaacggcctgtggaggcggctgtcagacatgaagctctggctcccgttcctgaggaacatcggcgatgacagcaccaggggcagcgacgtcggttcggccttcgctgaagatcacaagcctgcctggaggtgcttcagcttccaggagatttcagtggccactaatgacttccacccagacaacatggctggaagaggaggctatgcagaagtatacaagggcaccctagctgacggccatcttgtagccgtgaagaggctagcaaaaggcaccccgagcgagcagaaggaaaaggagttcctggcagagctagggatccaggggcatgtatgccatccaaacacatcctaccttcttggatgctgcgtggagaatgggctgtacctgatattcgagttctgcacgaatggcaccctagcatcggcactgcatgggaagggtgggagaacccttgaatggcctctgaggtacaagatcgcggtgggcgttgcgaggggcctgcagtacctgcacatgttctgcaggcaccggatcatccaccgcgacatcaaggcgtccaatgtgcttctcggccatgacttcgaacctcagatttcggacttcggattggccaagtggctcccaaagcagtggactcaccattctgtcgtacccatagaaggcacattcgggtacttagcaccagaatacttcatgcacggcattgtcgacgaaaagacggacatcttcgcctttggcgtgctgctgctggagatcgtcaccggaaggagacccattgactgctccaagcaaagccttctacaatgggcaaagccactgctggaagctgggcaggtgactgagcttgcagacccaagcctcggggacgactacgacaaagatcagctgaacaggatggtcgcggtcgcgtcccgctgcatcatgcgaccggcgatgtggcggccttcgatggccgaggttctgcatttcctgtctactactgatgagtgtctgaacgagcccgagaaatggaacattcccgacgacgaggtggacgacatggatgattgtacactgttctctgaatccttttccatgtaattgtagcctcatttttttcccatttccttttagtgtgtgctatgttggcatgccgttcttggcatggggatggaggcattgagctatgttttctggtctttttgtagtcttagaagactggtatttaatcatgtgttatatatataacggggattttgggatgtattca

SEQ ID NO: 13520 - DNA, 1449 bp, Zea Mays
ccttactcagcatggaacaggttctctgtcctcataactccaaccaaacaacggcagctagcgagctcccgcggtcccgccgccgccccctggtcctccaaaaaacggctgaaccctaaaccctccctagctcccgccgcctcgcttaaccgcgcccatggccgccgccgctcgcgccgccctcccgcggccccacctctctcttttttcgtcctcccaccgcagcccccatctgtccctcacgccctcctccgcccctcgcctgcgcagcggcgctgccacctcccctgcgctgcagcagcaccaccaggtcaccacgcgcctgggcgacgtgatcgaggcgcagcagttcgaccgggacgcgctgaacgagatcttcgaggtggcgcgggagatggaggccgtggagaggggttcccacggcgcccccagccgcgtcctcgaggggtacctcatggccacgcttttctacgagccctccacgcgcacgcgcctctccttcgaggctgctatgcggaggctcggcggggaggtcgtcaccaccgagaatgcgcgcgagttctcttccgccgccaagggggagacactcgaagataccataagaaccgttgagggttattccgatattattgtactgagacattttgaaagtggagctgcaaggaaagcagcagatactgcaaatattcctgttattaatgcaggtgatggaccagggcaacatccaacccaggctttgttggatgtgtacacaataaagagagaaattggcacactagatggaattaaacttggtttggttggtgaccttgctaatgggaggacagttcgttctctggcttacttgattgctaagtaccagaacattaagatatactttgtatctcctgatgttgttaaaatgaaggatgatatcaagaactacttaaattccaaaggtgttgaatgggaagaaagttcagatttgttggaggtggcatccaagtgtgatgttatttatcaaacacgtattcaaaaagaaagatttggtgagaggattgacctttatgaagctgctcgtggcaagtacatcgtggataaaaaggtcttagatgtgctgccaaaacatgctgtcatcatgcatccccttccaaggcttgatgagatcacagtagaagttgatagtgatcaaagagctgcatattttaggcaggctaagaatggcctctacataaggatggcattgctcaaacttctgcttgttggtcactgacatttcggctagtgctttagcttgtgctgcgtcaagggattagaagctgtgaggtcacgagaatctgaagatcattttggtgcctggaatgtggtctcagacaagttgtgcccttgttcactcctttttatctaataatgttcgccgttaatcactgtgacatgctcaggttaatttgatgggacctaataggtttc

SEQ ID NO: 13521 - DNA, 1192 bp, Zea Mays
ccttactcagcatggaacaggttctctgtcctcataactccaaccaaacaacggcagctagcgagctcccgcggtcccgccgccgccccctggtcctccaaaaaacggctgaaccctaaaccctccctagctcccgccgcctcgcttaaccgcgcccatggccgccgccgctcgcgccgccctcccgcggccccacctctctcttttttcgtcctcccaccgcagcccccatctgtccctcacgccctcctccgcccctcgcctgcgcagcggcgctgccacctcccctgcgctgcagcagcaccaccaggtcaccacgcgcctgggcgacgtgatcgaggcgcagcagttcgaccgggacgcgctgaacgagatcttcgaggtggcgcgggagatggaggccgtggagaggggttcccacggcgcccccagccgcgtcctcgaggggtacctcatggccacgcttttctacgagccctccacgcgcacgcgcctctccttcgaggctgctatgcggaggctcggcggggaggtcgtcaccaccgagaatgcgcgcgagttctcttccgccgccaagggggagacactcgaagataccataagaaccgttgagggttattccgatattattgtactgagacattttgaaagtggagctgcaaggaaagcagcagatactgcaaatattcctgttattaatgcaggtgatggaccagggcaacatccaacccaggctttgttggatgtgtacacaataaagagagaaattggcacactagatggaattaaacttggtttggttggtgaccttgctaatgggaggacagttcgttctctggcttacttgattgctaagtaccagaacattaagatatactttgtatctcctgatgttgttaaaatgaaggatgatatcaagaactacttaaattccaaaggtgttgaatgggaagaaagttcagatttgttggaggtggcatccaagtgtgatgttatttatcaaacacgtattcaaaaagaaagatttggtgagaggattgacctttatgaagctgctcgtggcaagtacatcgtggataaaaaggtcttagatgtgctgccaaaacatgctgtcatcatgcatccccttccaaggcttgatgagctgtgaggtcacgagaaactgaagatcatcttggtgcctggaatctgg

SEQ ID NO: 13522 - DNA, 1884 bp, Zea Mays
ccttactcagcatggaacaggttctctgtcctcataactccaaccaaacaacggcagctagcgagctcccgcggtcccgccgccgccccctggtcctccaaaaaacggctgaaccctaaaccctccctagctcccgccgcctcgcttaaccgcgcccatggccgccgccgctcgcgccgccctcccgcggccccacctctctcttttttcgtcctcccaccgcagcccccatctgtccctcacgccctcctccgcccctcgcctgcgcagcggcgctgccacctcccctgcgctgcagcagcaccaccaggtcaccacgcgcctgggcgacgtgatcgaggcgcagcagttcgaccgggacgcgctgaacgagatcttcgaggtggcgcgggagatggaggccgtggagaggggttcccacggcgcccccagccgcgtcctcgaggggtacctcatggccacgcttttctacgagccctccacgcgcacgcgcctctccttcgaggctgctatgcggaggctcggcggggaggtcgtcaccaccgagaatgcgcgcgagttctcttccgccgccaagggggagacactcgaagataccataagaaccgttgagggttattccgatattattgtactgagacattttgaaagtggagctgcaaggaaagcagcagatactgcaaatattcctgttattaatgcaggtgatggaccagggcaacatccaacccaggctttgttggatgtgtacacaataaagagagaaattggcacactagatggaattaaacttggtttggttggtgaccttgctaatgggaggacagttcgttctctggcttacttgattgctaagtaccagaacattaagatatactttgtatctcctgatgttgttaaaatgaaggatgatatcaagaactacttaaattccaaaggtgttgaatgggaagaaagttcagatttgttggaggtggcatccaagtgtgatgttatttatcaaacacgtattcaaaaagaaagatttggtgagaggattgacctttatgaagctgctcgtggcaagtacatcgtggataaaaaggtcttagatgtgctgccaaaacatgctgtcatcatgcatccccttccaaggcttgatgagatcacagtagaagttgatagtgatcaaagagctgcatattttaggcaggctaagaatggcctctacataaggatggcattgctcaaacttctgcttgttggtcactgacatttcggctagtgctttagcttgtgctgcgtcaagggattagaagctgtgaggtcacgagaaactgaagatcatcttggtgcctggaatctggagtctcaggtcaaggacagttaccacaggatgaggcgcatgaaggaaaagactagctaatccctaatgatttaggctacgattatgaacatgtactaaggtcataaatgtatttttatccgtgttgcatctcgtgcctataaataggtgatcagtacccctgtattgttcacgctagattgtaattgctctcgcgtcaacaccttcgaacaagccgaagatatcaatgtaatataaattctgttagtgttcatgtatatatcatgaaatacatatatgaaggaatgaattacatatattatctctatgtattcttattttcataaataatgacgacgtctccttcatgaccttcgtctgaagttcattatatccaaaaagagataatgcttcgaggacaaaggtccttaatgtttaataattgtgttaccttgtttttgatttacaacatttaagaacaagtgaacaatagtagaagttcacatcgcgcccgaattagactcgcggggccttcggaattgctcgccggtgttgtgttc

SEQ ID NO: 13523 - DNA, 1828 bp, Zea Mays
ccttactcagcatggaacaggttctctgtcctcataactccaaccaaacaacggcagctagcgagctcccgcggtcccgccgccgccccctggtcctccaaaaaacggctgaaccctaaaccctccctagctcccgccgcctcgcttaaccgcgcccatggccgccgccgctcgcgccgccctcccgcggccccacctctctcttttttcgtcctcccaccgcagcccccatctgtccctcacgccctcctccgcccctcgcctgcgcagcggcgctgccacctcccctgcgctgcagcagcaccaccaggtcaccacgcgcctgggcgacgtgatcgaggcgcagcagttcgaccgggacgcgctgaacgagatcttcgaggtggcgcgggagatggaggccgtggagaggggttcccacggcgcccccagccgcgtcctcgaggggtacctcatggccacgcttttctacgagccctccacgcgcacgcgcctctccttcgaggctgctatgcggaggctcggcggggaggtcgtcaccaccgagaatgcgcgcgagttctcttccgccgccaagggggagacactcgaagataccataagaaccgttgagggttattccgatattattgtactgagacattttgaaagtggagctgcaaggaaagcagcagatactgcaaatattcctgttattaatgcaggtgatggaccagggcaacatccaacccaggctttgttggatgtgtacacaataaagagagaaattggcacactagatggaattaaacttggtttggttggtgaccttgctaatgggaggacagttcgttctctggcttacttgattgctaagtaccagaacattaagatatactttgtatctcctgatgttgttaaaatgaaggatgatatcaagaactacttaaattccaaaggtgttgaatgggaagaaagttcagatttgttggaggtggcatccaagtgtgatgttatttatcaaacacgtattcaaaaagaaagatttggtgagaggattgacctttatgaagctgctcgtggcaagtacatcgtggataaaaaggtcttagatgtgctgccaaaacatgctgtcatcatgcatccccttccaaggcttgatgagatcacagtagaagttgatagtgatcaaagagctgcatattttaggcaggctaagaatggcctctacataaggatggcattgctcaaacttctgcttgttggtcactgacatttcggctagtgctttagcttgtgctgcgtcaagggattagaaggtcaaggacagttaccacaggatgaggcgcatgaaggaaaagactagctaatccctaatgatttaggctacgattatgaacatgtactaaggtcataaatgtatttttatccgtgttgcatctcgtgcctataaataggtgatcagtacccctgtattgttcacgctagattgtaattgctctcgcgtcaacaccttcgaacaagccgaagatatcaatgtaatataaattctgttagtgttcatgtatatatcatgaaatacatatatgaaggaatgaattacatatattatctctatgtattcttattttcataaataatgacgacgtctccttcatgaccttcgtctgaagttcattatatccaaaaagagataatgcttcgaggacaaaggtccttaatgtttaataattgtgttaccttgtttttgatttacaacatttaagaacaagtgaacaatagtagaagttcacatcgcgcccgaattagactcgcggggccttcggaattgctcgccggtgttgtgttc

SEQ ID NO: 13524 - DNA, 1325 bp, Zea Mays
ccttactcagcatggaacaggttctctgtcctcataactccaaccaaacaacggcagctagcgagctcccgcggtcccgccgccgccccctggtcctccaaaaaacggctgaaccctaaaccctccctagctcccgccgcctcgcttaaccgcgcccatggccgccgccgctcgcgccgccctcccgcggccccacctctctcttttttcgtcctcccaccgcagcccccatctgtccctcacgccctcctccgcccctcgcctgcgcagcggcgctgccacctcccctgcgctgcagcagcaccaccaggtcaccacgcgcctgggcgacgtgatcgaggcgcagcagttcgaccgggacgcgctgaacgagatcttcgaggtggcgcgggagatggaggccgtggagaggggttcccacggcgcccccagccgcgtcctcgaggggtacctcatggccacgcttttctacgagccctccacgcgcacgcgcctctccttcgaggctgctatgcggaggctcggcggggaggtcgtcaccaccgagaatgcgcgcgagttctcttccgccgccaagggggagacactcgaagataccataagaaccgttgagggttattccgatattattgtactgagacattttgaaagtggagctgcaaggaaagcagcagatactgcaaatattcctgttattaatgcaggtgatggaccagggcaacatccaacccaggctttgttggatgtgtacacaataaagagagaaattggcacactagatggaattaaacttggtttggttggtgaccttgctaatgggaggacagttcgttctctggcttacttgattgctaagtaccagaacattaagatatactttgtatctcctgatgttgttaaaatgaaggatgatatcaagaactacttaaattccaaaggtgttgaatgggaagaaagttcagatttgttggaggtggcatccaagtgtgatgttatttatcaaacacgtattcaaaaagaaagatttggtgagaggattgacctttatgaagctgctcgtggcaagtacatcgtggataaaaaggtcttagatgtgctgccaaaacatgctgtcatcatgcatccccttccaaggcttgatgagatcacagtagaagttgatagtgatcaaagagctgcatattttaggcaggctaagaatggcctctacataaggatggcattgctcaaacttctgcttgttggtcactgacatttcggctagtgctttagcttgtgctgcgtcaagggattagaagtgaggttatgaggacctgaagaatcat

SEQ ID NO: 13525 - DNA, 989 bp, Zea Mays
attctacacctgcaagaatttcttctgacaaatcagcaaaaatattcacagaacatgctacagattgcttttagtcatttacccaatggttcatatggaatacccaagtatctgctgcttcttgatgataactaaagctttgttggatgtgtacacaataaagagagaaattggcacactagatggaattaaacttggtttggttggtgaccttgctaatgggaggacagttcgttctctggcttacttgattgctaagtaccagaacattaagatatactttgtatctcctgatgttgttaaaatgaaggatgatatcaagaactacttaaattccaaaggtgttgaatgggaagaaagttcagatttgttggaggtggcatccaagtgtgatgttatttatcaaacacgtattcaaaaagaaagatttggtgagaggattgacctttatgaagctgctcgtggcaagtacatcgtggataaaaaggtcttagatgtgctgccaaaacatgctgtcatcatgcatccccttccaaggcttgatgagatcacagtagaagttgatagtgatcaaagagctgcatattttaggcaggctaagaatggcctctacataaggatggcattgctcaaacttctgcttgttggtcactgacatttcggctagtgctttagcttgtgctgcgtcaagggattagaaggtaataaaagtctgcatccatgcgaatgtgcagcgatgtttggcagagtttggtgttctcatgtgctgtgagaacatggaacataattaattttgcctgcacaaaaatcatttgcccgattcagttgtgatgatgctctaatacatttttagcaagcgtgagccgtacatatttagtattggcagtaaaaaaaccctgcatgactatttggtaggataatatcgccgagtaggagtgtttgaattagggctacaaaaaaagctcgagctcaacgagctggctcgggcc

SEQ ID NO: 13526 - DNA, 528 bp, Zea Mays
cttttagtcatttacccaatggttcatatggaatacccaagtatctgctgcttcttgatgataactaaagctttgttggatgtgtacacaataaagagagaaattggcacactagatggaattaaacttggtttggttggtgaccttgctaatgggaggacagttcgttctctggcttacttgattgctaagtaccagaacattaagatatactttgtatctcctgatgttgttaaaatgaaggatgatatcaagaactacttaaattccaaaggtgttgaatgggaagaaagttcagatttgttggaggtggcatccaagtgtgatgttatttatcaaacacgtattcaaaaagaaagatttggtgagaggattgacctttatgaagctgctcgtggcaagtacatcgtggataaaaaggtcttagatgtgctgccaaaacatgctgtcatcatgcatccccttccaaggcttgatgagctgtgaggtcacgagaaactgaagatcatcttggtgcctggaatctgg

SEQ ID NO: 13527 - DNA, 516 bp, Zea Mays
cttttagtcatttacccaatggttcatatggaatacccaagtatctgctgcttcttgatgataactaaagctttgttggatgtgtacacaataaagagagaaattggcacactagatggaattaaacttggtttggttggtgaccttgctaatgggaggacagttcgttctctggcttacttgattgctaagtaccagaacattaagatatactttgtatctcctgatgttgttaaaatgaaggatgatatcaagaactacttaaattccaaaggtgttgaatgggaagaaagttcagatttgttggaggtggcatccaagtgtgatgttatttatcaaacacgtattcaaaaagaaagatttggtgagaggattgacctttatgaagctgctcgtggcaagtacatcgtggataaaaaggtcttagatgtgctgccaaaacatgctgtcatcatgcatccccttccaaggcttgatgagatgagcaagtaaatgtggagctcggtactcagtagg

SEQ ID NO: 13528 - DNA, 489 bp, Zea Mays
atggttcatatggaatacccaagtatctgctgcttcttgatgataactaaagctttgttggatgtgtacacaataaagagagaaattggcacactagatggaattaaacttggtttggttggtgaccttgctaatgggaggacagttcgttctctggcttacttgattgctaagtaccagaacattaagatatactttgtatctcctgatgttgttaaaatgaaggatgatatcaagaactacttaaattccaaaggtgttgaatgggaagaaagttcagatttgttggaggtggcatccaagtgtgatgttatttatcaaacacgtattcaaaaagaaagatttggtgagaggattgacctttatgaagctgctcgtggcaagtacatcgtggataaaaaggtcttagatgtgctgccaaaacatgctgtcatcatgcatccccttccaaggcttgatgagtgaggttatgaggacctgaagaatcat

SEQ ID NO: 13529 - DNA, 964 bp, Zea Mays
gctgcttcttgatgataactaaagctttgttggatgtgtacacaataaagagagaaattggcacactagatggaattaaacttggtttggttggtgaccttgctaatgggaggacagttcgttctctggcttacttgattgctaagtaccagaacattaagatatactttgtatctcctgatgttgttaaaatgaaggatgatatcaagaactacttaaattccaaaggtgttgaatgggaagaaagttcagatttgttggaggtggcatccaagtgtgatgttatttatcaaacacgtattcaaaaagaaagatttggtgagaggattgacctttatgaagctgctcgtggcaagtacatcgtggataaaaaggtcttagatgtgctgccaaaacatgctgtcatcatgcatccccttccaaggcttgatgaggtcaaggacagttaccacaggatgaggcgcatgaaggaaaagactagctaatccctaatgatttaggctacgattatgaacatgtactaaggtcataaatgtatttttatccgtgttgcatctcgtgcctataaataggtgatcagtacccctgtattgttcacgctagattgtaattgctctcgcgtcaacaccttcgaacaagccgaagatatcaatgtaatataaattctgttagtgttcatgtatatatcatgaaatacatatatgaaggaatgaattacatatattatctctatgtattcttattttcataaataatgacgacgtctccttcatgaccttcgtctgaagttcattatatccaaaaagagataatgcttcgaggacaaaggtccttaatgtttaataattgtgttaccttgtttttgatttacaacatttaagaacaagtgaacaatagtagaagttcacatcgcgcccgaattagactcgcggggccttcggaattgctcgccggtgttgtgttc

SEQ ID NO: 13530 - DNA, 890 bp, Zea Mays
gggaccccccctctcctgcttctcttcctcgtagggcacctctggcgggttgttgcgctgcctgatatctccaccgcccacggcctcgccttgtcccaactacaaaagcgaacccaatccctcttgactcctctcatccgcctcgtctaaccaccaccacgagggagagttaaagtcgccagtacagaagagtgaaggggagagggttgctgggtccgattcggtgggctcatcgccgtcgggtccacgaattggtgcctaggagtctcgcgtgcttcggggacataatcgatggtctcgctgcggtgggttggtggctggagacctcagaattcgtcgtcatagtgcgagctcctccgcgtgtgcaccgtgcgccgtggccaggggtgtctgcgctgcaattgccaggcatacaagatgacgatggtgcaatgcaagtgtttggtgcttttggttgatagaagctgctggatgcttttggtatttttgaaagatgcaagtcgtgcttctggttgatacttagaagttggtggttcaaaactgaaaaacctgtcaggctgtcacttgcttttggtttcttgtcaaactgctgggcgcctgaacactgctgtgcaccgtacgtcaggctgtcctcatgcatctgttaacagatcttttgtcctctgctgcttagactgctttatgaaatttgaaatgtgatgagacttatgccttatggtgactggtgatagcttattagattagagtatcatacttttggtcatggtcttatggaatatggaatgtgatgggatcattggaccgcatggtatgggtcatggatgtgtaaataaattataatttcattatttcatctctcgtctattaagtattaacagtttattactgtg

SEQ ID NO: 13531 - DNA, 936 bp, Zea Mays
gggaccccccctctcctgcttctcttcctcgtagggcacctctggcgggttgttgcgctgcctgatatctccaccgcccacggcctcgccttgtcccaactacaaaagcgaacccaatccctcttgactcctctcatccgcctcgtctaaccaccaccacgagggagagttaaagtcgccagtacagaagagtgaaggggagagggttgctgggtccgattcggtgggctcatcgccgtcgggtccacgaattggtgcctaggagtctcgcgtgcttcggggacataatcgatggtctcgctgcggtgggttggtggctggagacctcagaattcgtcgtcatagtgcgagctcctccgcgtgtgcaccgtgcgccgtggccaggggtgtctgcgctgcaattgccaggcatacaagatgacgatggtatgaagactatctcatttccaaaaagctttgtgcagagcaactagtgcaatgcaagtgtttggtgcttttggttgatagaagctgctggatgcttttggtatttttgaaagatgcaagtcgtgcttctggttgatacttagaagttggtggttcaaaactgaaaaacctgtcaggctgtcacttgcttttggtttcttgtcaaactgctgggcgcctgaacactgctgtgcaccgtacgtcaggctgtcctcatgcatctgttaacagatcttttgtcctctgctgcttagactgctttatgaaatttgaaatgtgatgagacttatgccttatggtgactggtgatagcttattagattagagtatcatacttttggtcatggtcttatggaatatggaatgtgatgggatcattggaccgcatggtatgggtcatggatgtgtaaataaattataatttcattatttcatctctcgtctattaagtattaacagtttattactgtg

SEQ ID NO: 13532 - DNA, 968 bp, Zea Mays
cccctctcctgcttctcttcctcgtagggcacctctggcgggttgttgcgctgcctgatatctccaccgcccacggcctcgccttgtcccaactacaaaagcgaacccaatccctcttgactcctctcatccgcctcgtctaaccaccaccacgagggagagttaaagtcgccagtacagaagagtgaaggggagagggttgctgggtccgattcggtgggctcatcgccgtcgggtccacgaattggtgcctaggagtctcgcgtgcttcggggacataatcgatggtctcgctgcggtgggttggtggctggagacctcagaattcgtcgtcatagtgcgagctcctccgcgtgtgcaccgtgcgccgtggccaggggtgtctgcgctgcaattgccaggcatacaagatgacgatggtgcaatgcaagtgtttggtgcttttggttgatagaagctgctggatgcttttggtatttttgaaagatgcaagtcgtgcttctggttgatacttagaattcagcatgtttgctgcctgcctgcttgctgctcagctgcagcctggaggctggtgcttatctgagagtactaagttatctgatgtgatctgtaaaacttactcagttcttgtcaaacttaatctgttaacaggtttcttgtcaaactgctgggcgcctgaacactgctgtgcaccgtacgtcaggctgtcctcatgcatctgttaacagatcttttgtcctctgctgcttagactgctttatgaaatttgaaatgtgatgagacttatgccttatggtgactggtgatagcttattagattagagtatcatacttttggtcatggtcttatggaatatggaatgtgatgggatcattggaccgcatggtatgggtcatggatgtgtaaataaattataatttcattatttcatctctcgtctattaagtattaacagtttattactgtg

SEQ ID NO: 13533 - DNA, 1669 bp, Zea Mays
aatttttaggtagtgaacagaataagtcagcagatggtggaggaacttgtagttgatgatacacctgaaacttcaagaggaataattggcctctgtagtgatccatctacaggacttttctatgcatatgatgaaagttctatattccaggtttccacttcagacgagggttgtgacatgtggcaagtttacttggatatgaatcattatgctgctgctttatcccattgccgtaatcctttccagcgtgatcaagtctacctagttcaggctgatgctgcatttgctgcaaaagagtattacatagcagcatccttctatgcaaagataaattacatcctgtcgtttgaggagatcagcctgaaatttatatcaataggtgagcaggatgctctcagaactttcttattgagaaggctcgataacctcaccaaagaggacaagatgcagattacgatgatctcaacttgggctactgagctgtacttagacaagattaatcgcctcctattggaggataccactgtcaccattataaattcagtagcagagcctaatagctctgaatatcgttcgatagtaaatgaattccgtgcttttcttagtgacagcaaagatgtattagatgaagcaacaacaatgaaactactggaaagttacggaagagtggatgagcttgtgtactttgccggtttgaaggagcagtatgaaattgtagttcatcattacattcagcaaggagaagcaagaaaagcattggaagtgcttccaacggcgcaatgttcctgtagaccttgtgtataaatttgctccagatttgatcatgttagatgcttatgagactgttgaatcatggatgatggcgagaaacaggttgaatccagggaaactcataccagcaatgatgcgttatgtgagcgaaccacatgcaaagaatgaaacacatgaagttatcaaatacttggaattttgtgtgaaagatttgaacaatgtggaccctggagtgcataatctgttgctatctctatatgccaagaaggaggatgaatcccagcttttgcaatttctcgacacaaaatttggtaaaggacaaacaaatggccctgacttcttttacgatccaaagtatgctctccgcctatgtcttcaagagaagagaatgcgtgcttgtgttcgtatttatagcatgatgtccatgcatgcggaagctgtggcacttgctttgaaggtattatgcctctgttggaaactgcgccggagagacaaccctgcaggttgccggcgagttcctacctcccagactttcataaggaaacaaactagctattacaaggtaataatccggactgctatcagtcctgatcttgctgattggatccgtccatataagactgatccactaccatactagctatttcctaaaacagaataaagtaaactagcaccaatcaaggattactttcctaacaatctcctcctaagccttgtggtgcaatttgtctacatccaccagtccgacccttagagcgcaactcttgaaatttggtcttcccaagcggtttcgtcaggaagtccccaagctgatcttcgctcctgatgaagcccactttgatctgcccattctcagcacactcccgaacaaaatgatacttcacttctatgtgcttgc

SEQ ID NO: 13534 - DNA, 1661 bp, Zea Mays
aatttttaggtagtgaacagaataagtcagcagatggtggaggaacttgtagttgatgatacacctgaaacttcaagaggaataattggcctctgtagtgatccatctacaggacttttctatgcatatgatgaaagttctatattccaggtttccacttcagacgagggttgtgacatgtggcaagtttacttggatatgaatcattatgctgctgctttatcccattgccgtaatcctttccagcgtgatcaagtctacctagttcaggctgatgctgcatttgctgcaaaagagtattacatagcagcatccttctatgcaaagataaattacatcctgtcgtttgaggagatcagcctgaaatttatatcaataggatgctctcagaactttcttattgagaaggctcgataacctcaccaaagaggacaagatgcagattacgatgatctcaacttgggctactgagctgtacttagacaagattaatcgcctcctattggaggataccactgtcaccattataaattcagtagcagagcctaatagctctgaatatcgttcgatagtaaatgaattccgtgcttttcttagtgacagcaaagatgtattagatgaagcaacaacaatgaaactactggaaagttacggaagagtggatgagcttgtgtactttgccggtttgaaggagcagtatgaaattgtagttcatcattacattcagcaaggagaagcaagaaaagcattggaagtgcttccaacggcgcaatgttcctgtagaccttgtgtataaatttgctccagatttgatcatgttagatgcttatgagactgttgaatcatggatgatggcgagaaacaggttgaatccagggaaactcataccagcaatgatgcgttatgtgagcgaaccacatgcaaagaatgaaacacatgaagttatcaaatacttggaattttgtgtgaaagatttgaacaatgtggaccctggagtgcataatctgttgctatctctatatgccaagaaggaggatgaatcccagcttttgcaatttctcgacacaaaatttggtaaaggacaaacaaatggccctgacttcttttacgatccaaagtatgctctccgcctatgtcttcaagagaagagaatgcgtgcttgtgttcgtatttatagcatgatgtccatgcatgcggaagctgtggcacttgctttgaaggtattatgcctctgttggaaactgcgccggagagacaaccctgcaggttgccggcgagttcctacctcccagactttcataaggaaacaaactagctattacaaggtaataatccggactgctatcagtcctgatcttgctgattggatccgtccatataagactgatccactaccatactagctatttcctaaaacagaataaagtaaactagcaccaatcaaggattactttcctaacaatctcctcctaagccttgtggtgcaatttgtctacatccaccagtccgacccttagagcgcaactcttgaaatttggtcttcccaagcggtttcgtcaggaagtccccaagctgatcttcgctcctgatgaagcccactttgatctgcccattctcagcacactcccgaacaaaatgatacttcacttctatgtgcttgc

SEQ ID NO: 13535 - DNA, 1556 bp, Zea Mays
ttttaggtagtgaacagaataagtcagcagatggtggaggaacttgtagttgatgatacacctgaaacttcaagaggaataattggcctctgtagtgatccatctacaggacttttctatgcatatgatgaaagttctatattccaggtttccacttcagacgagggttgtgacatgtggcaagtttacttggatatgaatcattatgctgctgctttatcccattgccgtaatcctttccagcgtgatcaagtctacctagttcaggctgatgctgcatttgctgcaaaagagtattacatagcagcatccttctatgcaaagataaattacatcctgtcgtttgaggagatcagcctgaaatttatatcaataggtgagcaggatgctctcagaactttcttattgagaaggctcgataacctcaccaaagaggacaagatgcagattacgatgatctcaacttgggctactgagctgtacttagacaagtgacagcaaagatgtattagatgaagcaacaacaatgaaactactggaaagttacggaagagtggatgagcttgtgtactttgccggtttgaaggagcagtatgaaattgtagttcatcattacattcagcaaggagaagcaagaaaagcattggaagtgcttccaacggcgcaatgttcctgtagaccttgtgtataaatttgctccagatttgatcatgttagatgcttatgagactgttgaatcatggatgatggcgagaaacaggttgaatccagggaaactcataccagcaatgatgcgttatgtgagcgaaccacatgcaaagaatgaaacacatgaagttatcaaatacttggaattttgtgtgaaagatttgaacaatgtggaccctggagtgcataatctgttgctatctctatatgccaagaaggaggatgaatcccagcttttgcaatttctcgacacaaaatttggtaaaggacaaacaaatggccctgacttcttttacgatccaaagtatgctctccgcctatgtcttcaagagaagagaatgcgtgcttgtgttcgtatttatagcatgatgtccatgcatgcggaagctgtggcacttgctttgaaggtattatgcctctgttggaaactgcgccggagagacaaccctgcaggttgccggcgagttcctacctcccagactttcataaggaaacaaactagctattacaaggtaataatccggactgctatcagtcctgatcttgctgattggatccgtccatataagactgatccactaccatactagctatttcctaaaacagaataaagtaaactagcaccaatcaaggattactttcctaacaatctcctcctaagccttgtggtgcaatttgtctacatccaccagtccgacccttagagcgcaactcttgaaatttggtcttcccaagcggtttcgtcaggaagtccccaagctgatcttcgctcctgatgaagcccactttgatctgcccattctcagcacactcccgaacaaaatgatacttcacttctatgtgcttgc

SEQ ID NO: 13536 - DNA, 1717 bp, Zea Mays
ttttaggtagtgaacagaataagtcagcagatggtggaggaacttgtagttgatgatacacctgaaacttcaagaggaataattggcctctgtagtgatccatctacaggacttttctatgcatatgatgaaagttctatattccaggtttccacttcagacgagggttgtgacatgtggcaagtttacttggatatgaatcattatgctgctgctttatcccattgccgtaatcctttccagcgtgatcaagtctacctagttcaggctgatgctgcatttgctgcaaaagagtattacatagcagcatccttctatgcaaagataaattacatcctgtcgtttgaggagatcagcctgaaatttatatcaataggtgagcaggatgctctcagaactttcttattgagaaggctcgataacctcaccaaagaggacaagatgcagattacgatgatctcaacttgggctactgagctgtacttagacaagattaatcgcctcctattggaggataccactgtcaccattataaattcagtagcagagcctaatagctctgaatatcgttcgatagtaaatgaattccgtgcttttcttagtgacagcaaagatgtattagatgaagcaacaacaatgaaactactggaaagttacggaagagtggatgagcttgtgtactttgccggtttgaaggagcagtatgaaattgtagttcatcattacattcagtggcttcagctgagacaccaggtctaatgtctttttccattattgcgtcagcaaggagaagcaagaaaagcattggaagtgcttccaacggcgcaatgttcctgtagaccttgtgtataaatttgctccagatttgatcatgttagatgcttatgagactgttgaatcatggatgatggcgagaaacaggttgaatccagggaaactcataccagcaatgatgcgttatgtgagcgaaccacatgcaaagaatgaaacacatgaagttatcaaatacttggaattttgtgtgaaagatttgaacaatgtggaccctggagtgcataatctgttgctatctctatatgccaagaaggaggatgaatcccagcttttgcaatttctcgacacaaaatttggtaaaggacaaacaaatggccctgacttcttttacgatccaaagtatgctctccgcctatgtcttcaagagaagagaatgcgtgcttgtgttcgtatttatagcatgatgtccatgcatgcggaagctgtggcacttgctttgaaggtattatgcctctgttggaaactgcgccggagagacaaccctgcaggttgccggcgagttcctacctcccagactttcataaggaaacaaactagctattacaaggtaataatccggactgctatcagtcctgatcttgctgattggatccgtccatataagactgatccactaccatactagctatttcctaaaacagaataaagtaaactagcaccaatcaaggattactttcctaacaatctcctcctaagccttgtggtgcaatttgtctacatccaccagtccgacccttagagcgcaactcttgaaatttggtcttcccaagcggtttcgtcaggaagtccccaagctgatcttcgctcctgatgaagcccactttgatctgcccattctcagcacactcccgaacaaaatgatacttcacttctatgtgcttgc

SEQ ID NO: 13537 - DNA, 1828 bp, Zea Mays
gtagtgaacagaataagtcagcagatggtggaggaacttgtagttgatgatacacctgaaacttcaagaggaataattggcctctgtagtgatccatctacaggacttttctatgcatatgatgaaagttctatattccaggtttccacttcagacgagggttgtgacatgtggcaagtttacttggatatgaatcattatgctgctgctttatcccattgccgtaatcctttccagcgtgatcaagtctacctagttcaggctgatgctgcatttgctgcaaaagagtattacatagcagcatccttctatgcaaagataaattacatcctgtcgtttgaggagatcagcctgaaatttatatcaataggtgagcaggatgctctcagaactttcttattgagaaggctcgataacctcaccaaagaggacaagatgcagattacgatgatctcaacttgggctactgagctgtacttagacaagattaatcgcctcctattggaggataccactgtcaccattataaattcagtagcagagcctaatagctctgaatatcgttcgatagtaaatgaattccgtgcttttcttagtgacagcaaagatgtattagatgaagcaacaacaatgaaactactggaaagagttacggaagagtggatgagcttgtgtactttgccggtttgaaggagcagtatgaaattgtagttcatcattacattcagcaaggagaagcaagaaaagcattggaagtgcttccaacggcgcaatgttcctgtagaccttgtgtataaatttgctccagatttgatcatgttagatgcttatgagactgttgaatcatggatgatggcgagaaacaggttgaatccagggaaactcataccagcaatgatgcgttatgtgagcgaaccacatgcaaagaatgaaacacatgaagttatcaaatacttggaattttgtgtgaaagatttgaacaatgtggaccctggagtgcataatctgttgctatctctatatgccaagaaggaggatgaatcccagcttttgcaatttctcgacacaaaatttggtaaaggacaaacaaatggccctgacttcttttacgatccaaagtatgctctccgcctatgtcttcaagagaagagaatgcgtgcttgtgttcgtatttatagcatgatgtccatgcatgcggaagctgtggcacttgctttgaaggtaaatcttattccttcctaagtttcatctcattagtaggtattatgcctctgttggaaactgcgccggagagacaaccctgcaggttgccggcgagttcctacctcccaggtaagttcttcaggtatgagaaaacctcccagggactcacacgcacacgatttggagaggaacacagcagatttggtggcgtcctattgactgccttttcttagcctctaaggccatatatttatagactttcataaggaaacaaactagctattacaaggtaataatccggactgctatcagtcctgatcttgctgattggatccgtccatataagactgatccactaccatactagctatttcctaaaacagaataaagtaaactagcaccaatcaaggattactttcctaacaatctcctcctaagccttgtggtgcaatttgtctacatccaccagtccgacccttagagcgcaactcttgaaatttggtcttcccaagcggtttcgtcaggaagtccccaagctgatcttcgctcctgatgaagcccactttgatctgcccattctcagcacactcccgaacaaaatgatacttcacttctatgtgcttgc

SEQ ID NO: 13538 - DNA, 1542 bp, Zea Mays
gtagtgaacagaataagtcagcagatggtggaggaacttgtagttgatgatacacctgaaacttcaagaggaataattggcctctgtagtgatccatctacaggacttttctatgcatatgatgaaagttctatattccaggtttccacttcagacgagggttgtgacatgtggcaagtttacttggatatgaatcattatgctgctgctttatcccattgccgtaatcctttccagcgtgatcaagtctacctagttcaggctgatgctgcatttgctgcaaaagagtattacatagcagcatccttctatgcaaagataaattacatcctgtcgtttgaggagatcagcctgaaatttatatcaataggatgctctcagaactttcttattgagaaggctcgataacctcaccaaagaggacaagatgcagattacgatgatctcaacttgggctactgagctgtacttagacaagtgacagcaaagatgtattagatgaagcaacaacaatgaaactactggaaagttacggaagagtggatgagcttgtgtactttgccggtttgaaggagcagtatgaaattgtagttcatcattacattcagcaaggagaagcaagaaaagcattggaagtgcttccaacggcgcaatgttcctgtagaccttgtgtataaatttgctccagatttgatcatgttagatgcttatgagactgttgaatcatggatgatggcgagaaacaggttgaatccagggaaactcataccagcaatgatgcgttatgtgagcgaaccacatgcaaagaatgaaacacatgaagttatcaaatacttggaattttgtgtgaaagatttgaacaatgtggaccctggagtgcataatctgttgctatctctatatgccaagaaggaggatgaatcccagcttttgcaatttctcgacacaaaatttggtaaaggacaaacaaatggccctgacttcttttacgatccaaagtatgctctccgcctatgtcttcaagagaagagaatgcgtgcttgtgttcgtatttatagcatgatgtccatgcatgcggaagctgtggcacttgctttgaaggtattatgcctctgttggaaactgcgccggagagacaaccctgcaggttgccggcgagttcctacctcccagactttcataaggaaacaaactagctattacaaggtaataatccggactgctatcagtcctgatcttgctgattggatccgtccatataagactgatccactaccatactagctatttcctaaaacagaataaagtaaactagcaccaatcaaggattactttcctaacaatctcctcctaagccttgtggtgcaatttgtctacatccaccagtccgacccttagagcgcaactcttgaaatttggtcttcccaagcggtttcgtcaggaagtccccaagctgatcttcgctcctgatgaagcccactttgatctgcccattctcagcacactcccgaacaaaatgatacttcacttctatgtgcttgc

SEQ ID NO: 13539 - DNA, 1758 bp, Zea Mays
gtagtgaacagaataagtcagcagatggtggaggaacttgtagttgatgatacacctgaaacttcaagaggaataattggcctctgtagtgatccatctacaggacttttctatgcatatgatgaaagttctatattccaggtttccacttcagacgagggttgtgacatgtggcaagtttacttggatatgaatcattatgctgctgctttatcccattgccgtaatcctttccagcgtgatcaagtctacctagttcaggctgatgctgcatttgctgcaaaagagtattacatagcagcatccttctatgcaaagataaattacatcctgtcgtttgaggagatcagcctgaaatttatatcaataggatgctctcagaactttcttattgagaaggctcgataacctcaccaaagaggacaagatgcagattacgatgatctcaacttgggctactgagctgtacttagacaagattaatcgcctcctattggaggataccactgtcaccattataaattcagtagcagagcctaatagctctgaatatcgttcgatagtaaatgaattccgtgcttttcttagtgacagcaaagatgtattagatgaagcaacaacaatgaaactactggaaagttacggaagagtggatgagcttgtgtactttgccggtttgaaggagcagtatgaaattgtagttcatcattacattcagcaaggagaagcaagaaaagcattggaagtgcttccaacggcgcaatgttcctgtagaccttgtgtataaatttgctccagatttgatcatgttagatgcttatgagactgttgaatcatggatgatggcgagaaacaggaatgaaacacatgaagttatcaaatacttggaattttgtgtgaaagatttgaacaatgtggaccctggagtgcataatctgttgctatctctatatgccaagaaggaggatgaatcccagcttttgcaatttctcgacacaaaatttggtaaaggacaaacaaatggccctgacttcttttacgatccaaagtatgctctccgcctatgtcttcaagagaagagaatgcgtgcttgtgttcgtatttatagcatgatgtccatgcatgcggaagctgtggcacttgctttgaaggtaaatcttattccttcctaagtttcatctcattagtaggtattatgcctctgttggaaactgcgccggagagacaaccctgcaggttgccggcgagttcctacctcccaggtaagttcttcaggtatgagaaaacctcccagggactcacacgcacacgatttggagaggaacacagcagatttggtggcgtcctattgactgccttttcttagcctctaaggccatatatttatagactttcataaggaaacaaactagctattacaaggtaataatccggactgctatcagtcctgatcttgctgattggatccgtccatataagactgatccactaccatactagctatttcctaaaacagaataaagtaaactagcaccaatcaaggattactttcctaacaatctcctcctaagccttgtggtgcaatttgtctacatccaccagtccgacccttagagcgcaactcttgaaatttggtcttcccaagcggtttcgtcaggaagtccccaagctgatcttcgctcctgatgaagcccactttgatctgcccattctcagcacactcccgaacaaaatgatacttcacttctatgtgcttgc

SEQ ID NO: 13540 - DNA, 1079 bp, Zea Mays
atcttcattcttcaatattggcaaagatgtattagatgaagcaacaacaatgaaactactggaaagttacggaagagtggatgagcttgtgtactttgccggtttgaaggagcagtatgaaattgtagttcatcattacattcagcaaggagaagcaagaaaagcattggaagtgcttccaacggcgcaatgttcctgtagaccttgtgtataaatttgctccagatttgatcatgttagatgcttatgagactgttgaatcatggatgatggcgagaaacaggttgaatccagggaaactcataccagcaatgatgcgttatgtgagcgaaccacatgcaaagaatgaaacacatgaagttatcaaatacttggaattttgtgtgaaagatttgaacaatgtggaccctggagtgcataatctgttgctatctctatatgccaagaaggaggatgaatcccagcttttgcaatttctcgacacaaaatttggtaaaggacaaacaaatggccctgacttcttttacgatccaaagtatgctctccgcctatgtcttcaagagaagagaatgcgtgcttgtgttcgtatttatagcatgatgtccatgcatgcggaagctgtggcacttgctttgaaggtattatgcctctgttggaaactgcgccggagagacaaccctgcaggttgccggcgagttcctacctcccagactttcataaggaaacaaactagctattacaaggtaataatccggactgctatcagtcctgatcttgctgattggatccgtccatataagactgatccactaccatactagctatttcctaaaacagaataaagtaaactagcaccaatcaaggattactttcctaacaatctcctcctaagccttgtggtgcaatttgtctacatccaccagtccgacccttagagcgcaactcttgaaatttggtcttcccaagcggtttcgtcaggaagtccccaagctgatcttcgctcctgatgaagcccactttgatctgcccattctcagcacactcccgaacaaaatgatacttcacttctatgtgcttgc

SEQ ID NO: 13541 - DNA, 436 bp, Zea Mays
gtcaactgcggagctcgggcttccctcccttctgtcccgtaaccaacccacctaggctataagtgcgcgcggtgtccggtcagccacttccccctttttcggcagagacctaccactaccatgccgccgtgcgggagagagagattcggtgtgggctcgccattgccgccaaccccaccgtcgacaaaaccacgcatccactgtcgttgtgccatccatatagctctgagcgcttcgtctcagcttgccgtaggagtccgcaaactcaacatgagggattataggctaggggatcgcgaattctttgtcggagaagttgctccgccgtggccgcatccgccgtcgaggccgagtctattcacgctactaatcttgaagagccagtggccgagtattccggtgttcagcaggtagaagttgctgagcaggagctctt

SEQ ID NO: 13542 - DNA, 1227 bp, Zea Mays
acgatatccacgtctgcgcaaatgattctaatcactcgattgccaatcaacggcccacgttggtcgactttcatcacctcttccctcgaattctctggaataggaatcgtctcgactcgctccctcgtttctttcgcctctgaacacttctgctcgaaccttgtctcatgtcgcctctcttcgttcccgtcgtagcgtccctcttccacctcttctctccccgcttccttgtcaaaatcgattcatcacccattgctttcgtccttactgcagtgtccatttttggttgtttggtgaaatttgtcgctatcttcgtcgcctctagttcgtcgtccatttcttaaagttcaaataggcctgctttgtccccttttttctcccgtcccgaggtacgcgattgcagcaaatccggcttcctccgcttcagatctccttcaatcgtcgtcttccacttcgcgtttccctctccgtactcatatggctttgtctgcatgaatgctttactggtcgcgaagccctttgttttctctagtttgcagttcgcatagctgcctcctttggatctaagtttgccagatctaaagcatcagttgaacggtcataatggtgaatcaacaaggaactcggcggggcatctctaaaaggttcagcttggttgtaatctataaactggaggaatgtagataccaatgacgtcttactccatcagaagctactagctcctaatgaagaaccaaatttctgaaaaaatacggactacaacattatccgccattttagtaatttatgaaactataaacactgtttttgtgacatgtaaatgatattatcttccaaaaaatttgctattttgtcacttctgttttgggctctctgctattatgtcaccctgtgtctatgacttatgggatcatttatcatctgtgtctataatttatgggcctaatggtaaattagtgaagtccacaacttagagtgacaaaatagcaaatggctctcttcttctacatgcgcctgagaaatgcaatagacccttatctacattccatgtgaattatggattgaaccaaaacattgtaaaattacaaaaagaacatacatggcactacgcgcgcatgggcgcgtgcaagccactagtacgtttacaaagcgagatgaatgtagaccaagtagatactacggtaactagctggttaactcctgatctcggaaaccagatcattgttg

SEQ ID NO: 13543 - DNA, 6164 bp, Zea Mays
tacatagagcctatccattccaccgagggagaaatggaccaactcataggttttcgatccgacgaccacgtccttcacacggagttgcttcgccttgacgcaccctccgcgatcacgctgcgtgccgcagccagttccctccggaaccgccaccgccgagttttgaggcccaaactctggtgggtttgaggcccaaaccaccaaacctgccgtgagcaccgcacttcgtgcacgtcctccacgatcagacgcgtgtcccgccagtccctgaccacaccggcaacatggtccattccaccacgtcctcgcataagtgtgtgtcacaggtgtcagccaccacgattggtcaattgactgctttgatccgccagtcaagacccatcactcgtcccttcaccgctccgggtccatcagtacgagcccgcatgactttcacctcagtcgtcgaccaccgttcctgtgctccacacctgcacaccacaagtcgaccgacatggttgcacaagcataatctcacactctggactaacatgcaaatacggcgcaaatctatggtgcaatgtggaaaagcgttggtcgggttttgcggtgccagcgacggacatgagcgtggagagcccaggggagctagggttctgaagcgcaccgtggggcacagcgtggcgaacgacggcccccgacatcctgctaggttttccatgggagatgggggagtcgcgtgcgccgtccgctcagtcgagagcttccgtgccggcgccctcgtgaggagaggaggagcgggagaagcgatgccggacaagggggagagggcccatggccaccgccaccagcaccagcactggaagaaccagcagtcggcgacagctgctgacctggaggagggggagctgcttaatggggaggccgggaccaatgggttgcccgagaggagcatgccacctaagaagtggaggaaggtgctggcagcctccgcagctgctgtggaggtggagcctggggagattgtgagtacaaagcaagcagtgccattgaagaaggaaagaagaaacggggacgttgagaaggtagagctgctgccagagaggcagaggaaggaaaagtcttctgggaagagcaccaggaagtctatcaaggatgatgtggagccaggggagattgcactgccaggaaaaaggcgggatgccaagtcccaactggcccatgataacagcaggaggccaagttcgtctgcccagaaaggctccttgcgggattctgatgaagaacctggtgaaattaagccagagagcggcatcagtggcagtgtaaggaagaaccggccaacagagcctcatagcagtaaccacaagcaccacactgacacctctgaccagtcaggatcaaaacatcgcaggaagggagaaggaaagagttcatctgctgccagacatttgtctgggagaattcgtgaggtctcgccaccaacacgggatcggcgtgataagcacgagaggagcccaggcatcttgggccgttttcctcatgaccgttttcgtcatgacaggtatgacaggagcccgagccgcttggagcgttccccacatcgcactcgccactatgatagcagagaccgcagtccatatatttcacctcgacatagagctcgtccgccccaattcagggataacacaccaagtcgtgttgataattcccctcgtgggagggtccagcatgaagatatcagagaccgtagcccatttcgtcatgacaggtcgccttctgaacgttgtcgtcctactgacacgcatgaagcaagcaagaagagcagaagtagcaacaactcagagaagtcacatcacaaaagcaaatcagcgaagcaatcttcaaaaatcaagagtggtagcaatgggaagaatgaggagaaaatctccaaagaaaagcacactgaaagcagtcagtacactgaactgccaccaccacctcctcttcctctaccaccgccaccaccaccgccgccgccaccgccacccctgccgcctgctgtaccacctccattgcctccatcaccagaacctgagccacctggagttctagccgaggatatgatagaagacatggatatctgtgacaccccacctcacactagtgcagtacctgaacccacagaaccaatttgtgatatagggaggtggttttaccttgatcacttcggtatcgagcaaggaccttccaaacttgctgagctgaagaagctggtgcaagatggatatcttctttctgaccatctgataaaacatgctgatagcaaccgatgggtgactgtagagaatgcagcttcaccactggtgccatctgatttcccctctttatattcggacacttcaacacagttggtcaacccaccagaagccccaggaaatttgctcgatgaagctctagaggaggcttctaacttggcatcaggagctgaggataaacaaatggaggaaacgtctgcagaagatagtgaagaattctgcattgatgatagggttgaagcactgatggatggatcaattttggtgcatggccaggagctcgagatcattggagagcttttaggtgcagattttcagcctgctgattggcaaagatggagtcgtcgtgaagattttactaggctcaatgtgcacactgaagtaaacaatgaaatcaatggaggcacagaaaatagagcaacagatgcttatggtcttgtttctgtggagaagaactttcatcataacgctgagtctagcgaatggttttctggtagatggtcttgcaaaggtggtgactggaggagaaatgacgaactaagccaagatactccattcaggaaaaaacttgttctcaatgaagggtatcctctgtgtcaaatgccaaaaggtagctgtgaggatccacgccggccctgcaaggatgagttgtactaccctgtacgtgctaaaaagtatgaactgccattgtgggcattctcattgacagaagaagatattgatagtgttaatgacaccactaaaagcggtgttgtgcctgggaggccaggtcagaccagacagccttctaggggagtgaagggcatgatgctttcagtggttaggataaattctcgtgttgttaaagatcaatcatctgttgaaccccatacaaaacccagaggaactgatcgaccactgtcgaggtcttcacgctcccattcaattggagctgagagaagttctgtccatgaaggttcgtctcatttcaggaagcaccatgaccatgattcacaaagttcgcacaagtccaagcctgttccaaacattccaaaggaccgtgtatgcactgttgatgagctgtcagtttatcggggtgactggtattaccttgatggcactgggcatgagcatggtccattttcttattctgaattgcaagaattagttaaaaatggcactatcattgaacaaagtagtgtgttccgtaagattgataacacatggtttccagttcttaaggatttaaaacctggaagctctgttcccagtgcagcacgaagctcaagttttactgctgctcttatgctcccagaccaatataattttggtgtgaaccaaggatcaggtagcttcaatcagttgcacccccagtttgtgggttatacacgtggtaaattacatgaactagtcatgaaatatttcaagagcagggaacttactttagctataaatgaggtcttggatccctggatctcagcaaagcagccaaaaaaagagtttgaagcatacttctcccacaattcagcatctagaaatttgctgccagaagatggtgggtctgcaaaaaaggcaaagttgctacctgatcagagtgatgaagatattcatttgtcacaagacattcttgccagtcggaaggaggacatctgttttgacgagctatgtgatgcagaaccttctgttgataatgattctctgaatcccggagcaggaaatgaaacctggggtctactaaacggccatgtgttagcaagaatcttccattttatgagggcagatgtgaaagcacttatttcttctgcagctacctgtaggagctggaatgctgctgtgaagtattacagaaacatgtgtagattcattgatctgtcttctgttggccctctttgcactgattctgtgttttgtgatattatggctggttatgagaagcaaaatattaggacccttattttagctggttgttcgaatcttagttcgcatgcccttggcagagtacttgagcagcttccacaaatatcttatgttgacatccatggttgcggtcatctaggggatctgaaaaataaatttcagcatgtaaaatggatcaggagctcattgaatccagaggagtcatatcggaaaattaaaaccttgaagcagataggtgatgggaacaactacgcatccaaagttgcaaggaacttcaccaatcatctggatggttctgatgagcttgatgggtattttgctgatatttcaaatagagagaatgctaacctttcatttggacaaggtttctataaacgatcaaaattgcttgatgctagaaagtcctctgcggttttgtcgagggatgcagaaatgaggcggttgatgcagagacaggcagagaccagttacagaaagatggaagagttcatcataaacagactgagagaaattatgaggagcaacagatttgattttttcattccaaaggtttccaagattgaaggtaggctaaaaaacgggtattatgctcgccatggctttcgtaccatcaagcatgacatccgtaccatgtgccaagatgcattgagatataaagatggcaatgattcgggagatataaagcaaattgttgtctccttcatacagctagcaaagagactagggaacccaaggtacatttctgatagatatggagcaggagcccaggacagcctggacattaatcaatattcatttgatactaaactcaaaaagaagcaaaataaaataagaggagcaaattcattggctgctggagcagataattcatctcgtgcatttgaccttgaaatcaaaagaagcctatctaaattaaagaaaaaggatgtctactctggtagcgaaacatctgatgatgatgatggctactctgaagttgatgaaactgagagcgaaactactgtttctgatactgagagtgaccttgatgtaaattctggagcctgggatttaaaaggaaacagtctaaagttaattgaacctggggaatctgtgaccgatgatcgtatattgggtgcccgcatgacaaaggccagccttgttcctccagttactaggaagtatgaagttatcgaggagtaccttattgtagcagatttggaggaagtacagcgaaaaatgagagttgctttacctgatgactattctgagaagttgctgtcacagaagaatggcaccgaaaacttggaacttccagaggttaaggattatcaaccccgaaaagtagcaggagatgaaattcttgagcaagaagtatatggcatagatccatacacacacaatctactgagtgacattatgcctgctgatcttgagttgtcacctactgacaagcatatctttattgaggagttgcttctgaatacattgaataagcaagttaggcatttcactggttcgggaaatacccctatgacttacaaccttaggcctgtcattgaagagatccaaaggtctgcagaggataatggtgatagacgaacttcaaagatgtgcttggggatgctaaagaccatgagaaatcgctctgaacagaacttcgttgcttatagaaagggtctcggtgttgtttgcaacaaaaaaggtggatttggtgtagatgactttgttgtagagttctttggggaggtttacccttcttggagatggtatgaaaagcaagatggtattaaacatatacaaaacaacagtgaagatcaagctcctgagttttacaacattatgttagaaaggccaaagggagacggagatggatatgacttggtttttgttgatgcgatgcacaaggccaactacgctagtagaatctgccactcctgcaacccaaactgcgaagcaaaattggagtttacacacttcgaccaattgcagaaggcgaggaaatcacttttg

SEQ ID NO: 13544 - DNA, 7500 bp, Zea Mays
tccgtcttcgttccttgccccccttccttcagaagagcgaggccgcggtcgcggaggaggctttacgaacaaacgagccattagtccccaaaagccaacacacaaacccaggcgatagcgagcgcgcccgcgaaggctacgacgcgagagcgcgcgaggtgtggagcccccaatcccggaagcttccttggccgcgcgcagggcgcgggagtgggagctcgccgccggttaccgagccctctccgccgcggatctcccgatctgagacgccactcgtcaattccccgcagggttttgcggtgccagcgacggacatgagcgtggagagcccaggggagctagggttctgaagcgcaccgtggggcacagcgtggcgaacgacggcccccgacatcctgctaggttttccatgggagatgggggagtcgcgtgcgccgtccgctcagtcgagagcttccgtgccggcgccctcgtgaggagaggaggagcgggagaagcgatgccggacaagggggagagggcccatggccaccgccaccagcaccagcactggaagaaccagcagtcggcgacagctgctgacctggaggagggggagctgcttaatggggaggccgggaccaatgggttgcccgagaggagcatgccacctaagaagtggaggaaggtgctggcagcctccgcagctgctgtggaggtggagcctggggagattgtgagtacaaagcaagcagtgccattgaagaaggaaagaagaaacggggacgttgagaaggtagagctgctgccagagaggcagaggaaggaaaagtcttctgggaagagcaccaggaagtctatcaaggatgatgtggagccaggggagattgcactgccaggaaaaaggcgggatgccaagtcccaactggcccatgataacagcaggaggccaagttcgtctgcccagaaaggctccttgcgggattctgatgaagaacctggtgaaattaagccagagagcggcatcagtggcagtgtaaggaagaaccggccaacagagcctcatagcagtaaccacaagcaccacactgacacctctgaccagtcaggatcaaaacatcgcaggaagggagaaggaaagagttcatctgctgccagacatttgtctgggagaattcgtgaggtctcgccaccaacacgggatcggcgtgataagcacgagaggagcccaggcatcttgggccgttttcctcatgaccgttttcgtcatgacaggtatgacaggagcccgagccgcttggagcgttccccacatcgcactcgccactatgatagcagagaccgcagtccatatatttcacctcgacatagagctcgtccgccccaattcagggataacacaccaagtcgtgttgataattcccctcgtgggagggtccagcatgaagatatcagagaccgtagcccatttcgtcatgacaggtcgccttctgaacgttgtcgtcctactgacacgcatgaagcaagcaagaagagcagaagtagcaacaactcagagaagtcacatcacaaaagcaaatcagcgaagcaatcttcaaaaatcaagagtggtagcaatgggaagaatgaggagaaaatctccaaagaaaagcacactgaaagcagtcagtacactgaactgccaccaccacctcctcttcctctaccaccgccaccaccaccgccgccgccaccgccacccctgccgcctgctgtaccacctccattgcctccatcaccagaacctgagccacctggagttctagccgaggatatgatagaagacatggatatctgtgacaccccacctcacactagtgcagtacctgaacccacagaaccaatttgtgatatagggaggtggttttaccttgatcacttcggtatcgagcaaggaccttccaaacttgctgagctgaagaagctggtgcaagatggatatcttctttctgaccatctgataaaacatgctgatagcaaccgatgggtgactgtagagaatgcagcttcaccactggtgccatctgatttcccctctttatattcggacacttcaacacagttggtcaacccaccagaagccccaggaaatttgctcgatgaagctctagaggaggcttctaacttggcatcaggagctgaggataaacaaatggaggaaacgtctgcagaagatagtgaagaattctgcattgatgatagggttgaagcactgatggatggatcaattttggtgcatggccaggagctcgagatcattggagattttactaggctcaatgtgcacactgaagtaaacaatgaaatcaatggaggcacagaaaatagagcaacagatgcttatggtcttgtttctgtggagaagaactttcatcataacgctgagtctagcgaatggttttctggtagatggtcttgcaaaggtggtgactggaggagaaatgacgaactaagccaagatactccattcaggaaaaaacttgttctcaatgaagggtatcctctgtgtcaaatgccaaaaggtagctgtgaggatccacgccggccctgcaaggatgagttgtactaccctgtacgtgctaaaaagtatgaactgccattgtgggcattctcattgacagaagaagatattgatagtgttaatgacaccactaaaagcggtgttgtgcctgggaggccaggtcagaccagacagccttctaggggagtgaagggcatgatgctttcagtggttaggataaattctcgtgttgttaaagatcaatcatctgttgaaccccatacaaaacccagaggaactgatcgaccactgtcgaggtcttcacgctcccattcaattggagctgagagaagttctgtccatgaaggttcgtctcatttcaggaagcaccatgaccatgattcacaaagttcgcacaagtccaagcctgttccaaacattccaaaggaccgtgtatgcactgttgatgagctgtcagtttatcggggtgactggtattaccttgatggcactgggcatgagcatggtccattttcttattctgaattgcaagaattagttaaaaatggcactatcattgaacaaagtagtgtgttccgtaagattgataacacatggtttccagttcttaaggatttaaaacctggaagctctgttcccagtgcagcacgaagctcaagttttactgctgctcttatgctcccagaccaatataattttggtgtgaaccaaggatcaggtagcttcaatcagttgcacccccagtttgtgggttatacacgtggtaaattacatgaactagtcatgaaatatttcaagagcagggaacttactttagctataaatgaggtcttggatccctggatctcagcaaagcagccaaaaaaagagtttgaagcatacttctcccacaattcagcatctagaaatttgctgccagaagatggtgggtctgcaaaaaaggcaaagttgctacctgatcagagtgatgaagatattcatttgtcacaagacattcttgccagtcggaaggaggacatctgttttgacgagctatgtgatgcagaaccttctgttgataatgattctctgaatcccggagcaggaaatgaaacctggggtctactaaacggccatgtgttagcaagaatcttccattttatgagggcagatgtgaaagcacttatttcttctgcagctacctgtaggagctggaatgctgctgtgaagtattacagaaacatgtgtagattcattgatctgtcttctgttggccctctttgcactgattctgtgttttgtgatattatggctggttatgagaagcaaaatattaggacccttattttagctggttgttcgaatcttagttcgcatgcccttggcagagtacttgagcagcttccacaaatatcttatgttgacatccatggttgcggtcatctaggggatctgaaaaataaatttcagcatgtaaaatggatcaggagctcattgaatccagaggagtcatatcggaaaattaaaaccttgaagcagataggtgatgggaacaactacgcatccaaagttgcaaggaacttcaccaatcatctggatggttctgatgagcttgatgggtattttgctgatatttcaaatagagagaatgctaacctttcatttggacaaggtttctataaacgatcaaaattgcttgatgctagaaagtcctctgcggttttgtcgagggatgcagaaatgaggcggttgatgcagagacaggcagagaccagttacagaaagatggaagagttcatcataaacagactgagagaaattatgaggagcaacagatttgattttttcattccaaaggtttccaagattgaaggtaggctaaaaaacgggtattatgctcgccatggctttcgtaccatcaagcatgacatccgtaccatgtgccaagatgcattgagatataaagatggcaatgattcgggagatataaagcaaattgttgtctccttcatacagctagcaaagagactagggaacccaaggtacatttctgatagatatggagcaggagcccaggacagcctggacattaatcaatattcatttgatactaaactcaaaaagaagcaaaataaaataagaggagcaaattcattggctgctggagcagataattcatctcgtgcatttgaccttgaaatcaaaagaagcctatctaaattaaagaaaaaggatgtctactctggtagcgaaacatctgatgatgatgatggctactctgaagttgatgaaactgagagcgaaactactgtttctgatactgagagtgaccttgatgtaaattctggagcctgggatttaaaaggaaacagtctaaagttaattgaacctggggaatctgtgaccgatgatcgtatattgggtgcccgcatgacaaaggccagccttgttcctccagttactaggaagtatgaagttatcgaggagtaccttattgtagcagatttggaggaagtacagcgaaaaatgagagttgctttacctgatgactattctgagaagttgctgtcacagaagaatggcaccgaaaacttggaacttccagaggttaaggattatcaaccccgaaaagtagcaggagatgaaattcttgagcaagaagtatatggcatagatccatacacacacaatctactgagtgacattatgcctgctgatcttgagttgtcacctactgacaagcatatctttattgaggagttgcttctgaatacattgaataagcaagttaggcatttcactggttcgggaaatacccctatgacttacaaccttaggcctgtcattgaagagatccaaaggtctgcagaggataatggtgatagacgaacttcaaagatgtgcttggggatgctaaagaccatgagaaatcgctctgaacagaacttcgttgcttatagaaagggtctcggtgttgtttgcaacaaaaaaggtggatttggtgtagatgactttgttgtagagttctttggggaggtttacccttcttggagatggtatgaaaagcaagatggtattaaacatatacaaaacaacagtgaagatcaagctcctgagttttacaacattatgttagaaaggccaaagggagacggagatggatatgacttggtttttgttgatgcgatgcacaaggccaactacgctagtagaatctgccactcctgcaacccaaactgcgaagcaaaagtgacagcagtgaatggtaaataccagattggagtttacacacttcgaccaattgcagaaggcgaggaaatcacttttgattacaattctgtaactgagtctgcctctgtggaagtcaagtatgccgtggcagctatttgaatttttctggtgaaggagcctttgagaaggtattaatggaattccatggtgtgctcgataggcatagcctgctgctacaggcttgtgaaacagactctgtctctcaacaagacttaattgacttgggtagagctggtcttggtacctgtttgcttgctggtttgcctggatggcttgttgcttacacagctcacctggtgcggtttatataccttgagagacagaaactccctgatgagatcttaaggcacaatgtggatgagaagcgccagttccttatagaaataaacatggattctgagaagaatgatgctgaggttcaggcagagggagtattaaattcaagattacaacaaatagtgcatacacttgacaaggtgagatatgttatgagatgcatatttggagacccaaagaatgctcctcctcctcttgtaaggttgtctgggaaaagtctggtatctgccatctggaaaggggacagttcaatagttgctgaactcattcagtcgatggaacctcatgttgaagaagaggtacttagtgatctgaaggccaaaatccgtgctcatgatccgtcagagtctgaagatattgagggaggcatccggaattctctcttgtggctgcgtgatgaattgcgaactctttcatgcacttacaagtgccgtcatgatgctgctgcagatttgattcatttgtatgcttatacaaagtgcttcttccgagtccgggattataagacagtaaaatctccaccagttcatatcagtccgcttgacttaggccccaaatatgctgataaactgggaccaggctttcaggagtactgcaagacatacccagaaaattattgcttagcccagcttatctattggtatagccagaattcagaacctgaatctagattaacaagagctagaaaaggttgcatgtcgttgccagatgtctcatccttctatgtgaagtctgcaaaaccatcacaagagcgagcttatggaaacagaactgtgagattcatgttatcgcgcatggaaaagcaggcacaaagaccatggccaaaggataggatatgggtgttcaagagtgatccgagattctttggtagtccaatgatggacaccgtgttgaataattccccgcttgacaaggagatggtgcactggctcaagactagaccaaatgttttcctaggctagtaaaaaaggtttgtaggcagataaggtggtatttggttctttctcctttttggagattttagtctacatgattctttttccgactcacaccttggctacctgatcatggggagtttagcttttagatagcagggtagtctcaccacccccatctgtacattcctctctccctactttccttgtagagatgtatctggttaataactgatagattcgtcattgatttgatgtagtgaattttccccataggaatgctccctcttttgtttcatgtaaatgcagaacaatttcaatcttgaattcagtaatgtgttacaggcatgttgcatttctgtggttcagttcgttgtttcaatcaataaaatgttttaggggcttataggtttcattcat

SEQ ID NO: 13545 - DNA, 7572 bp, Zea Mays
tccgtcttcgttccttgccccccttccttcagaagagcgaggccgcggtcgcggaggaggctttacgaacaaacgagccattagtccccaaaagccaacacacaaacccaggcgatagcgagcgcgcccgcgaaggctacgacgcgagagcgcgcgaggtgtggagcccccaatcccggaagcttccttggccgcgcgcagggcgcgggagtgggagctcgccgccggttaccgagccctctccgccgcggatctcccgatctgagacgccactcgtcaattccccgcagggttttgcggtgccagcgacggacatgagcgtggagagcccaggggagctagggttctgaagcgcaccgtggggcacagcgtggcgaacgacggcccccgacatcctgctaggttttccatgggagatgggggagtcgcgtgcgccgtccgctcagtcgagagcttccgtgccggcgccctcgtgaggagaggaggagcgggagaagcgatgccggacaagggggagagggcccatggccaccgccaccagcaccagcactggaagaaccagcagtcggcgacagctgctgacctggaggagggggagctgcttaatggggaggccgggaccaatgggttgcccgagaggagcatgccacctaagaagtggaggaaggtgctggcagcctccgcagctgctgtggaggtggagcctggggagattgtgagtacaaagcaagcagtgccattgaagaaggaaagaagaaacggggacgttgagaaggtagagctgctgccagagaggcagaggaaggaaaagtcttctgggaagagcaccaggaagtctatcaaggatgatgtggagccaggggagattgcactgccaggaaaaaggcgggatgccaagtcccaactggcccatgataacagcaggaggccaagttcgtctgcccagaaaggctccttgcgggattctgatgaagaacctggtgaaattaagccagagagcggcatcagtggcagtgtaaggaagaaccggccaacagagcctcatagcagtaaccacaagcaccacactgacacctctgaccagtcaggatcaaaacatcgcaggaagggagaaggaaagagttcatctgctgccagacatttgtctgggagaattcgtgaggtctcgccaccaacacgggatcggcgtgataagcacgagaggagcccaggcatcttgggccgttttcctcatgaccgttttcgtcatgacaggtatgacaggagcccgagccgcttggagcgttccccacatcgcactcgccactatgatagcagagaccgcagtccatatatttcacctcgacatagagctcgtccgccccaattcagggataacacaccaagtcgtgttgataattcccctcgtgggagggtccagcatgaagatatcagagaccgtagcccatttcgtcatgacaggtcgccttctgaacgttgtcgtcctactgacacgcatgaagcaagcaagaagagcagaagtagcaacaactcagagaagtcacatcacaaaagcaaatcagcgaagcaatcttcaaaaatcaagagtggtagcaatgggaagaatgaggagaaaatctccaaagaaaagcacactgaaagcagtcagtacactgaactgccaccaccacctcctcttcctctaccaccgccaccaccaccgccgccgccaccgccacccctgccgcctgctgtaccacctccattgcctccatcaccagaacctgagccacctggagttctagccgaggatatgatagaagacatggatatctgtgacaccccacctcacactagtgcagtacctgaacccacagaaccaatttgtgatatagggaggtggttttaccttgatcacttcggtatcgagcaaggaccttccaaacttgctgagctgaagaagctggtgcaagatggatatcttctttctgaccatctgataaaacatgctgatagcaaccgatgggtgactgtagagaatgcagcttcaccactggtgccatctgatttcccctctttatattcggacacttcaacacagttggtcaacccaccagaagccccaggaaatttgctcgatgaagctctagaggaggcttctaacttggcatcaggagctgaggataaacaaatggaggaaacgtctgcagaagatagtgaagaattctgcattgatgatagggttgaagcactgatggatggatcaattttggtgcatggccaggagctcgagatcattggagagcttttaggtgcagattttcagcctgctgattggcaaagatggagtcgtcgtgaagattttactaggctcaatgtgcacactgaagtaaacaatgaaatcaatggaggcacagaaaatagagcaacagatgcttatggtcttgtttctgtggagaagaactttcatcataacgctgagtctagcgaatggttttctggtagatggtcttgcaaaggtggtgactggaggagaaatgacgaactaagccaagatactccattcaggaaaaaacttgttctcaatgaagggtatcctctgtgtcaaatgccaaaaggtagctgtgaggatccacgccggccctgcaaggatgagttgtactaccctgtacgtgctaaaaagtatgaactgccattgtgggcattctcattgacagaagaagatattgatagtgttaatgacaccactaaaagcggtgttgtgcctgggaggccaggtcagaccagacagccttctaggggagtgaagggcatgatgctttcagtggttaggataaattctcgtgttgttaaagatcaatcatctgttgaaccccatacaaaacccagaggaactgatcgaccactgtcgaggtcttcacgctcccattcaattggagctgagagaagttctgtccatgaaggttcgtctcatttcaggaagcaccatgaccatgattcacaaagttcgcacaagtccaagcctgttccaaacattccaaaggaccgtgtatgcactgttgatgagctgtcagtttatcggggtgactggtattaccttgatggcactgggcatgagcatggtccattttcttattctgaattgcaagaattagttaaaaatggcactatcattgaacaaagtagtgtgttccgtaagattgataacacatggtttccagttcttaaggatttaaaacctggaagctctgttcccagtgcagcacgaagctcaagttttactgctgctcttatgctcccagaccaatataattttggtgtgaaccaaggatcaggtagcttcaatcagttgcacccccagtttgtgggttatacacgtggtaaattacatgaactagtcatgaaatatttcaagagcagggaacttactttagctataaatgaggtcttggatccctggatctcagcaaagcagccaaaaaaagagtttgaagcatacttctcccacaattcagcatctagaaatttgctgccagatggtgggtctgcaaaaaaggcaaagttgctacctgatcagagtgatgaagatattcatttgtcacaagacattcttgccagtcggaaggaggacatctgttttgacgagctatgtgatgcagaaccttctgttgataatgattctctgaatcccggagcaggaaatgaaacctggggtctactaaacggccatgtgttagcaagaatcttccattttatgagggcagatgtgaaagcacttatttcttctgcagctacctgtaggagctggaatgctgctgtgaagtattacagaaacatgtgtagattcattgatctgtcttctgttggccctctttgcactgattctgtgttttgtgatattatggctggttatgagaagcaaaatattaggacccttattttagctggttgttcgaatcttagttcgcatgcccttggcagagtacttgagcagcttccacaaatatcttatgttgacatccatggttgcggtcatctaggggatctgaaaaataaatttcagcatgtaaaatggatcaggagctcattgaatccagaggagtcatatcggaaaattaaaaccttgaagcagataggtgatgggaacaactacgcatccaaagttgcaaggaacttcaccaatcatctggatggttctgatgagcttgatgggtattttgctgatatttcaaatagagagaatgctaacctttcatttggacaaggtttctataaacgatcaaaattgcttgatgctagaaagtcctctgcggttttgtcgagggatgcagaaatgaggcggttgatgcagagacaggcagagaccagttacagaaagatggaagagttcatcataaacagactgagagaaattatgaggagcaacagatttgattttttcattccaaaggtttccaagattgaaggtaggctaaaaaacgggtattatgctcgccatggctttcgtaccatcaagcatgacatccgtaccatgtgccaagatgcattgagatataaagatggcaatgattcgggagatataaagcaaattgttgtctccttcatacagctagcaaagagactagggaacccaaggtacatttctgatagatatggagcaggagcccaggacagcctggacattaatcaatattcatttgatactaaactcaaaaagaagcaaaataaaataagaggagcaaattcattggctgctggagcagataattcatctcgtgcatttgaccttgaaatcaaaagaagcctatctaaattaaagaaaaaggatgtctactctggtagcgaaacatctgatgatgatgatggctactctgaagttgatgaaactgagagcgaaactactgtttctgatactgagagtgaccttgatgtaaattctggagcctgggatttaaaaggaaacagtctaaagttaattgaacctggggaatctgtgaccgatgatcgtatattgggtgcccgcatgacaaaggccagccttgttcctccagttactaggaagtatgaagttatcgaggagtaccttattgtagcagatttggaggaagtacagcgaaaaatgagagttgctttacctgatgactattctgagaagttgctgtcacagaagaatggcaccgaaaacttggaacttccagaggttaaggattatcaaccccgaaaagtagcaggagatgaaattcttgagcaagaagtatatggcatagatccatacacacacaatctactgagtgacattatgcctgctgatcttgagttgtcacctactgacaagcatatctttattgaggagttgcttctgaatacattgaataagcaagttaggcatttcactggttcgggaaatacccctatgacttacaaccttaggcctgtcattgaagagatccaaaggtctgcagaggataatggtgatagacgaacttcaaagatgtgcttggggatgctaaagaccatgagaaatcgctctgaacagaacttcgttgcttatagaaagggtctcggtgttgtttgcaacaaaaaaggtggatttggtgtagatgactttgttgtagagttctttggggaggtttacccttcttggagatggtatgaaaagcaagatggtattaaacatatacaaaacaacagtgaagatcaagctcctgagttttacaacattatgttagaaaggccaaagggagacggagatggatatgacttggtttttgttgatgcgatgcacaaggccaactacgctagtagaatctgccactcctgcaacccaaactgcgaagcaaaagtgacagcagtgaatggtaaataccagattggagtttacacacttcgaccaattgcagaaggcgaggaaatcacttttgattacaattctgtaactgagaagagcatgaagcatcagtctgcctctgtggaagtcaagtatgccgtggcagctatttgaatttttctggtgaaggagcctttgagaaggtattaatggaattccatggtgtgctcgataggcatagcctgctgctacaggcttgtgaaacagactctgtctctcaacaagacttaattgacttgggtagagctggtcttggtacctgtttgcttgctggtttgcctggatggcttgttgcttacacagctcacctggtgcggtttatataccttgagagacagaaactccctgatgagatcttaaggcacaatgtggatgagaagcgccagttccttatagaaataaacatggattctgagaagaatgatgctgaggttcaggcagagggagtattaaattcaagattacaacaaatagtgcatacacttgacaaggtgagatatgttatgagatgcatatttggagacccaaagaatgctcctcctcctcttgtaaggttgtctgggaaaagtctggtatctgccatctggaaaggggacagttcaatagttgctgaactcattcagtcgatggaacctcatgttgaagaagaggtacttagtgatctgaaggccaaaatccgtgctcatgatccgtcagagtctgaagatattgagggaggcatccggaattctctcttgtggctgcgtgatgaattgcgaactctttcatgcacttacaagtgccgtcatgatgctgctgcagatttgattcatttgtatgcttatacaaagtgcttcttccgagtccgggattataagacagtaaaatctccaccagttcatatcagtccgcttgacttaggccccaaatatgctgataaactgggaccaggctttcaggagtactgcaagacatacccagaaaattattgcttagcccagcttatctattggtatagccagaattcagaacctgaatctagattaacaagagctagaaaaggttgcatgtcgttgccagatgtctcatccttctatgtgaagtctgcaaaaccatcacaagagcgagcttatggaaacagaactgtgagattcatgttatcgcgcatggaaaagcaggcacaaagaccatggccaaaggataggatatgggtgttcaagagtgatccgagattctttggtagtccaatgatggacaccgtgttgaataattccccgcttgacaaggagatggtgcactggctcaagactagaccaaatgttttcctaggctagtaaaaaaggtttgtaggcagataaggtggtatttggttctttctcctttttggagattttagtctacatgattctttttccgactcacaccttggctacctgatcatggggagtttagcttttagatagcagggtagtctcaccacccccatctgtacattcctctctccctactttccttgtagagatgtatctggttaataactgatagattcgtcattgatttgatgtagtgaattttccccataggaatgctccctcttttgtttcatgtaaatgcagaacaatttcaatcttgaattcagtaatgtgttacaggcatgttgcatttctgtggttcagttcgttgtttcaatcaataaaatgttttaggggcttataggtttcattcat

SEQ ID NO: 13546 - DNA, 7444 bp, Zea Mays
tccgtcttcgttccttgccccccttccttcagaagagcgaggccgcggtcgcggaggaggctttacgaacaaacgagccattagtccccaaaagccaacacacaaacccaggcgatagcgagcgcgcccgcgaaggctacgacgcgagagcgcgcgaggtgtggagcccccaatcccggaagcttccttggccgcgcgcagggcgcgggagtgggagctcgccgccggttaccgagccctctccgccgcggatctcccgatctgagacgccactcgtcaattccccgcagggttttgcggtgccagcgacggacatgagcgtggagagcccaggggagctagggttctgaagcgcaccgtggggcacagcgtggcgaacgacggcccccgacatcctgctaggttttccatgggagatgggggagtcgcgtgcgccgtccgctcagtcgagagcttccgtgccggcgccctcgtgaggagaggaggagcgggagaagcgatgccggacaagggggagagggcccatggccaccgccaccagcaccagcactggaagaaccagcagtcggcgacagctgctgacctggaggagggggagctgcttaatggggaggccgggaccaatgggttgcccgagaggagcatgccacctaagaagtggaggaaggtgctggcagcctccgcagctgctgtggaggtggagcctggggagattgtgagtacaaagcaagcagtgccattgaagaaggaaagaagaaacggggacgttgagaaggtagagctgctgccagagaggcagaggaaggaaaagtcttctgggaagagcaccaggaagtctatcaaggatgatgtggagccaggggagattgcactgccaggaaaaaggcgggatgccaagtcccaactggcccatgataacagcaggaggccaagttcgtctgcccagaaaggctccttgcgggattctgatgaagaacctggtgaaattaagccagagagcggcatcagtggcagtgtaaggaagaaccggccaacagagcctcatagcagtaaccacaagcaccacactgacacctctgaccagtcaggatcaaaacatcgcaggaagggagaaggaaagagttcatctgctgccagacatttgtctgggagaattcgtgaggtctcgccaccaacacgggatcggcgtgataagcacgagaggagcccaggcatcttgggccgttttcctcatgaccgttttcgtcatgacaggtatgacaggagcccgagccgcttggagcgttccccacatcgcactcgccactatgatagcagagaccgcagtccatatatttcacctcgacatagagctcgtccgccccaattcagggataacacaccaagtcgtgttgataattcccctcgtgggagggtccagcatgaagatatcagagaccgtagcccatttcgtcatgacaggtcgccttctgaacgttgtcgtcctactgacacgcatgaagcaagcaagaagagcagaagtagcaacaactcagagaagtcacatcacaaaagcaaatcagcgaagcaatcttcaaaaatcaagagtggtagcaatgggaagaatgaggagaaaatctccaaagaaaagcacactgaaagcagtcagtacactgaactgccaccaccacctcctcttcctctaccaccgccaccaccaccgccgccgccaccgccacccctgccgcctgctgtaccacctccattgcctccatcaccagaacctgagccacctggagttctagccgaggatatgatagaagacatggatatctgtgacaccccacctcacactagtgcagtacctgaacccacagaaccaatttgtgatatagggaggtggttttaccttgatcacttcggtatcgagcaaggaccttccaaacttgctgagctgaagaagctggtgcaagatggatatcttctttctgaccatctgataaaacatgctgatagcaaccgatgggtgactgtagagaatgcagcttcaccactggtgccatctgatttcccctctttatattcggacacttcaacacagttggtcaacccaccagaagccccaggaaatttgctcgatgaagctctagaggaggcttctaacttggcatcaggagctgaggataaacaaatggaggaaacgtctgcagaagatagtgaagaattctgcattgatgatagggttgaagcactgatggatggatcaattttggtgcatggccaggagctcgagatcattggagagcttttaggtgcagattttcagcctgctgattggcaaagatggagtcgtcgtgaagattttactaggctcaatgtgcacactgaagtaaacaatgaaatcaatggaggcacagaaaatagagcaacagatgcttatggtcttgtttctgtggagaagaactttcatcataacgctgagtctagcgaatggttttctggtagatggtcttgcaaaggtggtgactggaggagaaatgacgaactaagccaagatactccattcaggaaaaaacttgttctcaatgaagggtatcctctgtgtcaaatgccaaaaggtagctgtgaggatccacgccggccctgcaaggatgagttgtactaccctgtacgtgctaaaaagtatgaactgccattgtgggcattctcattgacagaagaagatattgatagtgttaatgacaccactaaaagcggtgttgtgcctgggaggccaggtcagaccagacagccttctaggggagtgaagggcatgatgctttcagtggttaggataaattctcgtgttgttaaagatcaatcatctgttgaaccccatacaaaacccagaggaactgatcgaccactgtcgaggtcttcacgctcccattcaattggagctgagagaagttctgtccatgaaggttcgtctcatttcaggaagcaccatgaccatgattcacaaagttcgcacaagtccaagcctgttccaaacattccaaaggaccgtgtatgcactgttgatgagctgtcagtttatcggggtgactggtattaccttgatggcactgggcatgagcatggtccattttcttattctgaattgcaagaattagttaaaaatggcactatcattgaacaaagtagtgtgttccgtaagattgataacacatggtttccagttcttaaggatttaaaacctggaagctctgttcccagtgcagcacgaagctcaagttttactgctgctcttatgctcccagaccaatataattttggtgtgaaccaaggatcaggtagcttcaatcagttgcacccccagtttgtgggttatacacgtggtaaattacatgaactagtcatgaaatatttcaagagcagggaacttactttagctataaatgaggtcttggatccctggatctcagcaaagcagccaaaaaaagagtttgaagcatacttctcccacaattcagcatctagaaatttgctgccagaagatggtgggtctgcaaaaaaggcaaagttgctacctgatcagagtgatgaagatattcatttgtcacaagacattcttgccagtcggaaggaggacatctgttttgacgagctatgtgatgcagaaccttctgttgataatgattctctgaatcccggagcaggaaatgaaacctggggtctactaaacggccatgtgttagcaagaatcttccattttatgagggcagatgtgaaagcacttatttcttctgcagctacctgtaggagctggaatgctgctgtgaagtattacagaaacatgtgtagattcattgatctgtcttctgttggccctctttgcactgattctgtgttttgtgatattatggctggttatgagaagcaaaatattaggacccttattttagctggttgttcgaatcttagttcgcatgcccttggcagagtacttgagcagcttccacaaatatcttatgttgacatccatggttgcggtcatctaggggatctgaaaaataaatttcagcatgtaaaatggatcaggagctcattgaatccagaggagtcatatcggaaaattaaaaccttgaagcagataggtgatgggaacaactacgcatccaaagttgcaaggaacttcaccaatcatctggatggttctgatgagcttgatgggtattttgctgatatttcaaatagagagaatgctaacctttcatttggacaaggtttctataaacgatcaaaattgcttgatgctagaaagtcctctgcggttttgtcgagggatgcagaaatgaggcggttgatgcagagacaggcagagaccagttacagaaagatggaagagttcatcataaacagactgagagaaattatgaggagcaacagatttgattttttcattccaaaggtttccaagattgaaggtaggctaaaaaacgggtattatgctcgccatggctttcgtaccatcaagcatgacatccgtaccatgtgccaagatgcattgagatataaagatggcaatgattcgggagatataaagcaaattgttgtctccttcatacagctagcaaagagactagggaacccaagataattcatctcgtgcatttgaccttgaaatcaaaagaagcctatctaaattaaagaaaaaggatgtctactctggtagcgaaacatctgatgatgatgatggctactctgaagttgatgaaactgagagcgaaactactgtttctgatactgagagtgaccttgatgtaaattctggagcctgggatttaaaaggaaacagtctaaagttaattgaacctggggaatctgtgaccgatgatcgtatattgggtgcccgcatgacaaaggccagccttgttcctccagttactaggaagtatgaagttatcgaggagtaccttattgtagcagatttggaggaagtacagcgaaaaatgagagttgctttacctgatgactattctgagaagttgctgtcacagaagaatggcaccgaaaacttggaacttccagaggttaaggattatcaaccccgaaaagtagcaggagatgaaattcttgagcaagaagtatatggcatagatccatacacacacaatctactgagtgacattatgcctgctgatcttgagttgtcacctactgacaagcatatctttattgaggagttgcttctgaatacattgaataagcaagttaggcatttcactggttcgggaaatacccctatgacttacaaccttaggcctgtcattgaagagatccaaaggtctgcagaggataatggtgatagacgaacttcaaagatgtgcttggggatgctaaagaccatgagaaatcgctctgaacagaacttcgttgcttatagaaagggtctcggtgttgtttgcaacaaaaaaggtggatttggtgtagatgactttgttgtagagttctttggggaggtttacccttcttggagatggtatgaaaagcaagatggtattaaacatatacaaaacaacagtgaagatcaagctcctgagttttacaacattatgttagaaaggccaaagggagacggagatggatatgacttggtttttgttgatgcgatgcacaaggccaactacgctagtagaatctgccactcctgcaacccaaactgcgaagcaaaagtgacagcagtgaatggtaaataccagattggagtttacacacttcgaccaattgcagaaggcgaggaaatcacttttgattacaattctgtaactgagagcatgaagcatcagtctgcctctgtggaagtcaagtatgccgtggcagctatttgaatttttctggtgaaggagcctttgagaaggtattaatggaattccatggtgtgctcgataggcatagcctgctgctacaggcttgtgaaacagactctgtctctcaacaagacttaattgacttgggtagagctggtcttggtacctgtttgcttgctggtttgcctggatggcttgttgcttacacagctcacctggtgcggtttatataccttgagagacagaaactccctgatgagatcttaaggcacaatgtggatgagaagcgccagttccttatagaaataaacatggattctgagaagaatgatgctgaggttcaggcagagggagtattaaattcaagattacaacaaatagtgcatacacttgacaaggtgagatatgttatgagatgcatatttggagacccaaagaatgctcctcctcctcttgtaaggttgtctgggaaaagtctggtatctgccatctggaaaggggacagttcaatagttgctgaactcattcagtcgatggaacctcatgttgaagaagaggtacttagtgatctgaaggccaaaatccgtgctcatgatccgtcagagtctgaagatattgagggaggcatccggaattctctcttgtggctgcgtgatgaattgcgaactctttcatgcacttacaagtgccgtcatgatgctgctgcagatttgattcatttgtatgcttatacaaagtgcttcttccgagtccgggattataagacagtaaaatctccaccagttcatatcagtccgcttgacttaggccccaaatatgctgataaactgggaccaggctttcaggagtactgcaagacatacccagaaaattattgcttagcccagcttatctattggtatagccagaattcagaacctgaatctagattaacaagagctagaaaaggttgcatgtcgttgccagatgtctcatccttctatgtgaagtctgcaaaaccatcacaagagcgagcttatggaaacagaactgtgagattcatgttatcgcgcatggaaaagcaggcacaaagaccatggccaaaggataggatatgggtgttcaagagtgatccgagattctttggtagtccaatgatggacaccgtgttgaataattccccgcttgacaaggagatggtgcactggctcaagactagaccaaatgttttcctaggctagtaaaaaaggtttgtaggcagataaggtggtatttggttctttctcctttttggagattttagtctacatgattctttttccgactcacaccttggctacctgatcatggggagtttagcttttagatagcagggtagtctcaccacccccatctgtacattcctctctccctactttccttgtagagatgtatctggttaataactgatagattcgtcattgatttgatgtagtgaattttccccataggaatgctccctcttttgtttcatgtaaatgcagaacaatttcaatcttgaattcagtaatgtgttacaggcatgttgcatttctgtggttcagttcgttgtttcaatcaataaaatgttttaggggcttataggtttcattcat

SEQ ID NO: 13547 - DNA, 7525 bp, Zea Mays
tccgtcttcgttccttgccccccttccttcagaagagcgaggccgcggtcgcggaggaggctttacgaacaaacgagccattagtccccaaaagccaacacacaaacccaggcgatagcgagcgcgcccgcgaaggctacgacgcgagagcgcgcgaggtgtggagcccccaatcccggaagcttccttggccgcgcgcagggcgcgggagtgggagctcgccgccggttaccgagccctctccgccgcggatctcccgatctgagacgccactcgtcaattccccgcagggttttgcggtgccagcgacggacatgagcgtggagagcccaggggagctagggttctgaagcgcaccgtggggcacagcgtggcgaacgacggcccccgacatcctgctaggttttccatgggagatgggggagtcgcgtgcgccgtccgctcagtcgagagcttccgtgccggcgccctcgtgaggagaggaggagcgggagaagcgatgccggacaagggggagagggcccatggccaccgccaccagcaccagcactggaagaaccagcagtcggcgacagctgctgacctggaggagggggagctgcttaatggggaggccgggaccaatgggttgcccgagaggagcatgccacctaagaagtggaggaaggtgctggcagcctccgcagctgctgtggaggtggagcctggggagattgtgagtacaaagcaagcagtgccattgaagaaggaaagaagaaacggggacgttgagaaggtagagctgctgccagagaggcagaggaaggaaaagtcttctgggaagagcaccaggaagtctatcaaggatgatgtggagccaggggagattgcactgccaggaaaaaggcgggatgccaagtcccaactggcccatgataacagcaggaggccaagttcgtctgcccagaaaggctccttgcgggattctgatgaagaacctggtgaaattaagccagagagcggcatcagtggcagtgtaaggaagaaccggccaacagagcctcatagcagtaaccacaagcaccacactgacacctctgaccagtcaggatcaaaacatcgcaggaagggagaaggaaagagttcatctgctgccagacatttgtctgggagaattcgtgaggtctcgccaccaacacgggatcggcgtgataagcacgagaggagcccaggcatcttgggccgttttcctcatgaccgttttcgtcatgacaggtatgacaggagcccgagccgcttggagcgttccccacatcgcactcgccactatgatagcagagaccgcagtccatatatttcacctcgacatagagctcgtccgccccaattcagggataacacaccaagtcgtgttgataattcccctcgtgggagggtccagcatgaagatatcagagaccgtagcccatttcgtcatgacaggtcgccttctgaacgttgtcgtcctactgacacgcatgaagcaagcaagaagagcagaagtagcaacaactcagagaagtcacatcacaaaagcaaatcagcgaagcaatcttcaaaaatcaagagtggtagcaatgggaagaatgaggagaaaatctccaaagaaaagcacactgaaagcagtcagtacactgaactgccaccaccacctcctcttcctctaccaccgccaccaccaccgccgccgccaccgccacccctgccgcctgctgtaccacctccattgcctccatcaccagaacctgagccacctggagttctagccgaggatatgatagaagacatggatatctgtgacaccccacctcacactagtgcagtacctgaacccacagaaccaatttgtgatatagggaggtggttttaccttgatcacttcggtatcgagcaaggaccttccaaacttgctgagctgaagaagctggtgcaagatggatatcttctttctgaccatctgataaaacatgctgatagcaaccgatgggtgactgtagagaatgcagcttcaccactggtgccatctgatttcccctctttatattcggacacttcaacacagttggtcaacccaccagaagccccaggaaatttgctcgatgaagctctagaggaggcttctaacttggcatcaggagctgaggataaacaaatggaggaaacgtctgcagaagatagtgaagaattctgcattgatgatagggttgaagcactgatggatggatcaattttggtgcatggccaggagctcgagatcattggagagcttttaggtgcagattttcagcctgctgattggcaaagatggagtcgtcgtgaagattttactaggctcaatgtgcacactgaagtaaacaatgaaatcaatggaggcacagaaaatagagcaacagatgcttatggtcttgtttctgtggagaagaactttcatcataacgctgagtctagcgaatggttttctggtagatggtcttgcaaaggtggtgactggaggagaaatgacgaactaagccaagatactccattcaggaaaaaacttgttctcaatgaagggtatcctctgtgtcaaatgccaaaaggtagctgtgaggatccacgccggccctgcaaggatgagttgtactaccctgtacgtgctaaaaagtatgaactgccattgtgggcattctcattgacagaagaagatattgatagtgttaatgacaccactaaaagcggtgttgtgcctgggaggccaggtcagaccagacagccttctaggggagtgaagggcatgatgctttcagtggttaggataaattctcgtgttgttaaagatcaatcatctgttgaaccccatacaaaacccagaggaactgatcgaccactgtcgaggtcttcacgctcccattcaattggagctgagagaagttctgtccatgaaggttcgtctcatttcaggaagcaccatgaccatgattcacaaagttcgcacaagtccaagcctgttccaaacattccaaaggaccgtgtatgcactgttgatgagctgtcagtttatcggggtgactggtattaccttgatggcactgggcatgagcatggtccattttcttattctgaattgcaagaattagttaaaaatggcactatcattgaacaaagtagtgtgttccgtaagattgataacacatggtttccagttcttaaggatttaaaacctggaagctctgttcccagtgcagcacgaagctcaagttttactgctgctcttatgctcccagaccaatataattttggtgtgaaccaaggatcaggtagcttcaatcagttgcacccccagtttgtgggttatacacgtggtaaattacatgaactagtcatgaaatatttcaagagcagggaacttactttagctataaatgaggtcttggatccctggatctcagcaaagcagccaaaaaaagagtttgaagcatacttctcccacaattcagcatctagaaatttgctgccagaagatggtgggtctgcaaaaaaggcaaagttgctacctgatcagagtgatgaagatattcatttgtcacaagacattcttgccagtcggaaggaggacatctgttttgacgagctatgtgatgcagaaccttctgttgataatgattctctgaatcccggagcaggaaatgaaacctggggtctactaaacggccatgtgttagcaagaatcttccattttatgagggcagatgtgaaagcacttatttcttctgcagctacctgtaggagctggaatgctgctgtgaagtattacagaaacatgtgtagattcattgatctgtcttctgttggccctctttgcactgattctgtgttttgtgatattatggctggttatgagaagcaaaatattaggacccttattttagctggttgttcgaatcttagttcgcatgcccttggcagagtacttgagcagcttccacaaatatcttatgttgacatccatggttgcggtcatctaggggatctgaaaaataaatttcagcatgtaaaatggatcaggagctcattgaatccagaggagtcatatcggaaaattaaaaccttgaagcagataggtgatgggaacaactacgcatccaaagttgcaaggaacttcaccaatcatctggatggttctgatgagcttgatgggtattttgctgatatttcaaatagagagaatgctaacctttcatttggacaaggtttctataaacgatcaaaattgcttgatgctagaaagtcctctgcggttttgtcgagggatgcagaaatgaggcggttgatgcagagacaggcagagaccagttacagaaagatggaagagttcatcataaacagactgagagaaattatgaggagcaacagatttgattttttcattccaaaggtttccaagattgaaggtaggctaaaaaacgggtattatgctcgccatggctttcgtaccatcaagcatgacatccgtaccatgtgccaagatgcattgagatataaagatggcaatgattcgggagatataaagcaaattgttgtctccttcatacagctagcaaagagactagggaacccaaggtacatttctgatagatatggagcaggagcccaggacagcctggacattaatcaatattcatttgatactaaactcaaaaagaagcaaaataaaataagaggagcaaattcattggctgctggagcagataattcatctcgtgcatttgaccttgaaatcaaaagaagcctatctaaattaaagaaaaaggatgtctactctggtagcgaaacatctgatgatgatgatggctactctgaagttgatgaaactgagagcgaaactactgtttctgatactgagagtgaccttgatgtaaattctggagcctgggatttaaaaggaaacagtctaaagttaattgaacctggggaatctgtgaccgatgatcgtatattgggtgcccgcatgacaaaggccagccttgttcctccagttactaggaagtatgaagttatcgaggagtaccttattgtagcagatttggaggaagtacagcgaaaaatgagagttgctttacctgatgactattctgagaagttgctgtcacagaagaatggcaccgaaaacttggaacttccagaggttaaggattatcaaccccgaaaagtagcaggagatgaaattcttgagcaagaagtatatggcatagatccatacacacacaatctactgagtgacattatgcctgctgatcttgagttgtcacctactgacaagcatatctttattgaggagttgcttctgaatacattgaataagcaagttaggcatttcactggttcgggaaatacccctatgacttacaaccttaggcctgtcattgaagagatccaaaggtctgcagaggataatggtgatagacgaacttcaaagatgtgcttggggatgctaaagaccatgagaaatcgctctgaacagaacttcgttgcttatagaaaggtggatttggtgtagatgactttgttgtagagttctttggggaggtttacccttcttggagatggtatgaaaagcaagatggtattaaacatatacaaaacaacagtgaagatcaagctcctgagttttacaacattatgttagaaaggccaaagggagacggagatggatatgacttggtttttgttgatgcgatgcacaaggccaactacgctagtagaatctgccactcctgcaacccaaactgcgaagcaaaagtgacagcagtgaatggtaaataccagattggagtttacacacttcgaccaattgcagaaggcgaggaaatcacttttgattacaattctgtaactgagtctgcctctgtggaagtcaagtatgccgtggcagctatttgaatttttctggtgaaggagcctttgagaaggtattaatggaattccatggtgtgctcgataggcatagcctgctgctacaggcttgtgaaacagactctgtctctcaacaagacttaattgacttgggtagagctggtcttggtacctgtttgcttgctggtttgcctggatggcttgttgcttacacagctcacctggtgcggtttatataccttgagagacagaaactccctgatgagatcttaaggcacaatgtggatgagaagcgccagttccttatagaaataaacatggattctgagaagaatgatgctgaggttcagagggagtattaaattcaagattacaacaaatagtgcatacacttgacaaggtgagatatgttatgagatgcatatttggagacccaaagaatgctcctcctcctcttgtaaggttgtctgggaaaagtctggtatctgccatctggaaaggggacagttcaatagttgctgaactcattcagtcgatggaacctcatgttgaagaagaggtacttagtgatctgaaggccaaaatccgtgctcatgatccgtcagagtctgaagatattgagggaggcatccggaattctctcttgtggctgcgtgatgaattgcgaactctttcatgcacttacaagtgccgtcatgatgctgctgcagatttgattcatttgtatgcttatacaaagtgcttcttccgagtccgggattataagacagtaaaatctccaccagttcatatcagtccgcttgacttaggccccaaatatgctgataaactgggaccaggctttcaggagtactgcaagacatacccagaaaattattgcttagcccagcttatctattggtatagccagaattcagaacctgaatctagattaacaagagctagaaaaggttgcatgtcgttgccagatgtctcatccttctatgtgaagtctgcaaaaccatcacaagagcgagcttatggaaacagaactgtgagattcatgttatcgcgcatggaaaagcaggcacaaagaccatggccaaaggataggatatgggtgttcaagagtgatccgagattctttggtagtccaatgatggacaccgtgttgaataattccccgcttgacaaggagatggtgcactggctcaagactagaccaaatgttttcctaggctagtaaaaaaggtttgtaggcagataaggtggtatttggttctttctcctttttggagattttagtctacatgattctttttccgactcacaccttggctacctgatcatggggagtttagcttttagatagcagggtagtctcaccacccccatctgtacattcctctctccctactttccttgtagagatgtatctggttaataactgatagattcgtcattgatttgatgtagtgaattttccccataggaatgctccctcttttgtttcatgtaaatgcagaacaatttcaatcttgaattcagtaatgtgttacaggcatgttgcatttctgtggttcagttcgttgtttcaatcaataaaatgttttaggggcttataggtttcattcat

SEQ ID NO: 13548 - DNA, 7549 bp, Zea Mays
tccgtcttcgttccttgccccccttccttcagaagagcgaggccgcggtcgcggaggaggctttacgaacaaacgagccattagtccccaaaagccaacacacaaacccaggcgatagcgagcgcgcccgcgaaggctacgacgcgagagcgcgcgaggtgtggagcccccaatcccggaagcttccttggccgcgcgcagggcgcgggagtgggagctcgccgccggttaccgagccctctccgccgcggatctcccgatctgagacgccactcgtcaattccccgcagggttttgcggtgccagcgacggacatgagcgtggagagcccaggggagctagggttctgaagcgcaccgtggggcacagcgtggcgaacgacggcccccgacatcctgctaggttttccatgggagatgggggagtcgcgtgcgccgtccgctcagtcgagagcttccgtgccggcgccctcgtgaggagaggaggagcgggagaagcgatgccggacaagggggagagggcccatggccaccgccaccagcaccagcactggaagaaccagcagtcggcgacagctgctgacctggaggagggggagctgcttaatggggaggccgggaccaatgggttgcccgagaggagcatgccacctaagaagtggaggaaggtgctggcagcctccgcagctgctgtggaggtggagcctggggagattgtgagtacaaagcaagcagtgccattgaagaaggaaagaagaaacggggacgttgagaaggtagagctgctgccagagaggcagaggaaggaaaagtcttctgggaagagcaccaggaagtctatcaaggatgatgtggagccaggggagattgcactgccaggaaaaaggcgggatgccaagtcccaactggcccatgataacagcaggaggccaagttcgtctgcccagaaaggctccttgcgggattctgatgaagaacctggtgaaattaagccagagagcggcatcagtggcagtgtaaggaagaaccggccaacagagcctcatagcagtaaccacaagcaccacactgacacctctgaccagtcaggatcaaaacatcgcaggaagggagaaggaaagagttcatctgctgccagacatttgtctgggagaattcgtgaggtctcgccaccaacacgggatcggcgtgataagcacgagaggagcccaggcatcttgggccgttttcctcatgaccgttttcgtcatgacaggtatgacaggagcccgagccgcttggagcgttccccacatcgcactcgccactatgatagcagagaccgcagtccatatatttcacctcgacatagagctcgtccgccccaattcagggataacacaccaagtcgtgttgataattcccctcgtgggagggtccagcatgaagatatcagagaccgtagcccatttcgtcatgacaggtcgccttctgaacgttgtcgtcctactgacacgcatgaagcaagcaagaagagcagaagtagcaacaactcagagaagtcacatcacaaaagcaaatcagcgaagcaatcttcaaaaatcaagagtggtagcaatgggaagaatgaggagaaaatctccaaagaaaagcacactgaaagcagtcagtacactgaactgccaccaccacctcctcttcctctaccaccgccaccaccaccgccgccgccaccgccacccctgccgcctgctgtaccacctccattgcctccatcaccagaacctgagccacctggagttctagccgaggatatgatagaagacatggatatctgtgacaccccacctcacactagtgcagtacctgaacccacagaaccaatttgtgatatagggaggtggttttaccttgatcacttcggtatcgagcaaggaccttccaaacttgctgagctgaagaagctggtgcaagatggatatcttctttctgaccatctgataaaacatgctgatagcaaccgatgggtgactgtagagaatgcagcttcaccactggtgccatctgatttcccctctttatattcggacacttcaacacagttggtcaacccaccagaagccccaggaaatttgctcgatgaagctctagaggaggcttctaacttggcatcaggagctgaggataaacaaatggaggaaacgtctgcagaagatagtgaagaattctgcattgatgatagggttgaagcactgatggatggatcaattttggtgcatggccaggagctcgagatcattggagagcttttaggtgcagattttcagcctgctgattggcaaagatggagtcgtcgtgaagattttactaggctcaatgtgcacactgaagtaaacaatgaaatcaatggaggcacagaaaatagagcaacagatgcttatggtcttgtttctgtggagaagaactttcatcataacgctgagtctagcgaatggttttctggtagatggtcttgcaaaggtggtgactggaggagaaatgacgaactaagccaagatactccattcaggaaaaaacttgttctcaatgaagggtatcctctgtgtcaaatgccaaaaggtagctgtgaggatccacgccggccctgcaaggatgagttgtactaccctgtacgtgctaaaaagtatgaactgccattgtgggcattctcattgacagaagaagatattgatagtgttaatgacaccactaaaagcggtgttgtgcctgggaggccaggtcagaccagacagccttctaggggagtgaagggcatgatgctttcagtggttaggataaattctcgtgttgttaaagatcaatcatctgttgaaccccatacaaaacccagaggaactgatcgaccactgtcgaggtcttcacgctcccattcaattggagctgagagaagttctgtccatgaaggttcgtctcatttcaggaagcaccatgaccatgattcacaaagttcgcacaagtccaagcctgttccaaacattccaaaggaccgtgtatgcactgttgatgagctgtcagtttatcggggtgactggtattaccttgatggcactgggcatgagcatggtccattttcttattctgaattgcaagaattagttaaaaatggcactatcattgaacaaagtagtgtgttccgtaagattgataacacatggtttccagttcttaaggatttaaaacctggaagctctgttcccagtgcagcacgaagctcaagttttactgctgctcttatgctcccagaccaatataattttggtgtgaaccaaggatcaggtagcttcaatcagttgcacccccagtttgtgggttatacacgtggtaaattacatgaactagtcatgaaatatttcaagagcagggaacttactttagctataaatgaggtcttggatccctggatctcagcaaagcagccaaaaaaagagtttgaagcatacttctcccacaattcagcatctagaaatttgctgccagaagatggtgggtctgcaaaaaaggcaaagttgctacctgatcagagtgatgaagatattcatttgtcacaagacattcttgccagtcggaaggaggacatctgttttgacgagctatgtgatgcagaaccttctgttgataatgattctctgaatcccggagcaggaaatgaaacctggggtctactaaacggccatgtgttagcaagaatcttccattttatgagggcagatgtgaaagcacttatttcttctgcagctacctgtaggagctggaatgctgctgtgaagtattacagaaacatgtgtagattcattgatctgtcttctgttggccctctttgcactgattctgtgttttgtgatattatggctggttatgagaagcaaaatattaggacccttattttagctggttgttcgaatcttagttcgcatgcccttggcagagtacttgagcagcttccacaaatatcttatgttgacatccatggttgcggtcatctaggggatctgaaaaataaatttcagcatgtaaaatggatcaggagctcattgaatccagaggagtcatatcggaaaattaaaaccttgaagcagataggtgatgggaacaactacgcatccaaagttgcaaggaacttcaccaatcatctggatggttctgatgagcttgatgggtattttgctgatatttcaaatagagagaatgctaacctttcatttggacaaggtttctataaacgatcaaaattgcttgatgctagaaagtcctctgcggttttgtcgagggatgcagaaatgaggcggttgatgcagagacaggcagagaccagttacagaaagatggaagagttcatcataaacagactgagagaaattatgaggagcaacagatttgattttttcattccaaaggtttccaagattgaaggtaggctaaaaaacgggtattatgctcgccatggctttcgtaccatcaagcatgacatccgtaccatgtgccaagatgcattgagatataaagatggcaatgattcgggagatataaagcaaattgttgtctccttcatacagctagcaaagagactagggaacccaaggtacatttctgatagatatggagcaggagcccaggacagcctggacattaatcaatattcatttgatactaaactcaaaaagaagcaaaataaaataagaggagcaaattcattggctgctggagcagataattcatctcgtgcatttgaccttgaaatcaaaagaagcctatctaaattaaagaaaaaggatgtctactctggtagcgaaacatctgatgatgatgatggctactctgaagttgatgaaactgagagcgaaactactgtttctgatactgagagtgaccttgatgtaaattctggagcctgggatttaaaaggaaacagtctaaagttaattgaacctggggaatctgtgaccgatgatcgtatattgggtgcccgcatgacaaaggccagccttgttcctccagttactaggaagtatgaagttatcgaggagtaccttattgtagcagatttggaggaagtacagcgaaaaatgagagttgctttacctgatgactattctgagaagttgctgtcacagaagaatggcaccgaaaacttggaacttccagaggttaaggattatcaaccccgaaaagtagcaggagatgaaattcttgagcaagaagtatatggcatagatccatacacacacaatctactgagtgacattatgcctgctgatcttgagttgtcacctactgacaagcatatctttattgaggagttgcttctgaatacattgaataagcaagttaggcatttcactggttcgggaaatacccctatgacttacaaccttaggcctgtcattgaagagatccaaaggtctgcagaggataatggtgatagacgaacttcaaagatgtgcttggggatgctaaagaccatgagaaatcgctctgaacagaacttcgttgcttatagaaagggtctcggtgttgtttgcaacaaaaaaggtggatttggtgtagatgactttgttgtagagttctttggggaggtttacccttcttggagatggtatgaaaagcaagatggtattaaacatatacaaaacaacagtgaagatcaagctcctgagttttacaacattatgttagaaaggccaaagacggagatggatatgacttggtttttgttgatgcgatgcacaaggccaactacgctagtagaatctgccactcctgcaacccaaactgcgaagcaaaagtgacagcagtgaatggtaaataccagattggagtttacacacttcgaccaattgcagaaggcgaggaaatcacttttgattacaattctgtaactgagtctgcctctgtggaagtcaagtatgccgtggcagctatttgaatttttctggtgaaggagcctttgagaaggtattaatggaattccatggtgtgctcgataggcatagcctgctgctacaggcttgtgaaacagactctgtctctcaacaagacttaattgacttgggtagagctggtcttggtacctgtttgcttgctggtttgcctggatggcttgttgcttacacagctcacctggtgcggtttatataccttgagagacagaaactccctgatgagatcttaaggcacaatgtggatgagaagcgccagttccttatagaaataaacatggattctgagaagaatgatgctgaggttcagagggagtattaaattcaagattacaacaaatagtgcatacacttgacaaggtgagatatgttatgagatgcatatttggagacccaaagaatgctcctcctcctcttgtaaggttgtctgggaaaagtctggtatctgccatctggaaaggggacagttcaatagttgctgaactcattcagtcgatggaacctcatgttgaagaagaggtacttagtgatctgaaggccaaaatccgtgctcatgatccgtcagagtctgaagatattgagggaggcatccggaattctctcttgtggctgcgtgatgaattgcgaactctttcatgcacttacaagtgccgtcatgatgctgctgcagatttgattcatttgtatgcttatacaaagtgcttcttccgagtccgggattataagacagtaaaatctccaccagttcatatcagtccgcttgacttaggccccaaatatgctgataaactgggaccaggctttcaggagtactgcaagacatacccagaaaattattgcttagcccagcttatctattggtatagccagaattcagaacctgaatctagattaacaagagctagaaaaggttgcatgtcgttgccagatgtctcatccttctatgtgaagtctgcaaaaccatcacaagagcgagcttatggaaacagaactgtgagattcatgttatcgcgcatggaaaagcaggcacaaagaccatggccaaaggataggatatgggtgttcaagagtgatccgagattctttggtagtccaatgatggacaccgtgttgaataattccccgcttgacaaggagatggtgcactggctcaagactagaccaaatgttttcctaggctagtaaaaaaggtttgtaggcagataaggtggtatttggttctttctcctttttggagattttagtctacatgattctttttccgactcacaccttggctacctgatcatggggagtttagcttttagatagcagggtagtctcaccacccccatctgtacattcctctctccctactttccttgtagagatgtatctggttaataactgatagattcgtcattgatttgatgtagtgaattttccccataggaatgctccctcttttgtttcatgtaaatgcagaacaatttcaatcttgaattcagtaatgtgttacaggcatgttgcatttctgtggttcagttcgttgtttcaatcaataaaatgttttaggggcttataggtttcattcat

SEQ ID NO: 13549 - DNA, 7447 bp, Zea Mays
tccgtcttcgttccttgccccccttccttcagaagagcgaggccgcggtcgcggaggaggctttacgaacaaacgagccattagtccccaaaagccaacacacaaacccaggcgatagcgagcgcgcccgcgaaggctacgacgcgagagcgcgcgaggtgtggagcccccaatcccggaagcttccttggccgcgcgcagggcgcgggagtgggagctcgccgccggttaccgagccctctccgccgcggatctcccgatctgagacgccactcgtcaattccccgcagggttttgcggtgccagcgacggacatgagcgtggagagcccaggggagctagggttctgaagcgcaccgtggggcacagcgtggcgaacgacggcccccgacatcctgctaggttttccatgggagatgggggagtcgcgtgcgccgtccgctcagtcgagagcttccgtgccggcgccctcgtgaggagaggaggagcgggagaagcgatgccggacaagggggagagggcccatggccaccgccaccagcaccagcactggaagaaccagcagtcggcgacagctgctgacctggaggagggggagctgcttaatggggaggccgggaccaatgggttgcccgagaggagcatgccacctaagaagtggaggaaggtgctggcagcctccgcagctgctgtggaggtggagcctggggagattgtgagtacaaagcaagcagtgccattgaagaaggaaagaagaaacggggacgttgagaaggtagagctgctgccagagaggcagaggaaggaaaagtcttctgggaagagcaccaggaagtctatcaaggatgatgtggagccaggggagattgcactgccaggaaaaaggcgggatgccaagtcccaactggcccatgataacagcaggaggccaagttcgtctgcccagaaaggctccttgcgggattctgatgaagaacctggtgaaattaagccagagagcggcatcagtggcagtgtaaggaagaaccggccaacagagcctcatagcagtaaccacaagcaccacactgacacctctgaccagtcaggatcaaaacatcgcaggaagggagaaggaaagagttcatctgctgccagacatttgtctgggagaattcgtgaggtctcgccaccaacacgggatcggcgtgataagcacgagaggagcccaggcatcttgggccgttttcctcatgaccgttttcgtcatgacaggtatgacaggagcccgagccgcttggagcgttccccacatcgcactcgccactatgatagcagagaccgcagtccatatatttcacctcgacatagagctcgtccgccccaattcagggataacacaccaagtcgtgttgataattcccctcgtgggagggtccagcatgaagatatcagagaccgtagcccatttcgtcatgacaggtcgccttctgaacgttgtcgtcctactgacacgcatgaagcaagcaagaagagcagaagtagcaacaactcagagaagtcacatcacaaaagcaaatcagcgaagcaatcttcaaaaatcaagagtggtagcaatgggaagaatgaggagaaaatctccaaagaaaagcacactgaaagcagtcagtacactgaactgccaccaccacctcctcttcctctaccaccgccaccaccaccgccgccgccaccgccacccctgccgcctgctgtaccacctccattgcctccatcaccagaacctgagccacctggagttctagccgaggatatgatagaagacatggatatctgtgacaccccacctcacactagtgcagtacctgaacccacagaaccaatttgtgatatagggaggtggttttaccttgatcacttcggtatcgagcaaggaccttccaaacttgctgagctgaagaagctggtgcaagatggatatcttctttctgaccatctgataaaacatgctgatagcaaccgatgggtgactgtagagaatgcagcttcaccactggtgccatctgatttcccctctttatattcggacacttcaacacagttggtcaacccaccagaagccccaggaaatttgctcgatgaagctctagaggaggcttctaacttggcatcaggagctgaggataaacaaatggaggaaacgtctgcagaagatagtgaagaattctgcattgatgatagggttgaagcactgatggatggatcaattttggtgcatggccaggagctcgagatcattggagagcttttaggtgcagattttcagcctgctgattggcaaagatggagtcgtcgtgaagattttactaggctcaatgtgcacactgaagtaaacaatgaaatcaatggaggcacagaaaatagagcaacagatgcttatggtcttgtttctgtggagaagaactttcatcataacgctgagtctagcgaatggttttctggtagatggtcttgcaaaggtggtgactggaggagaaatgacgaactaagccaagatactccattcaggaaaaaacttgttctcaatgaagggtatcctctgtgtcaaatgccaaaaggtagctgtgaggatccacgccggccctgcaaggatgagttgtactaccctgtacgtgctaaaaagtatgaactgccattgtgggcattctcattgacagaagaagatattgatagtgttaatgacaccactaaaagcggtgttgtgcctgggaggccaggtcagaccagacagccttctaggggagtgaagggcatgatgctttcagtggttaggataaattctcgtgttgttaaagatcaatcatctgttgaaccccatacaaaacccagaggaactgatcgaccactgtcgaggtcttcacgctcccattcaattggagctgagagaagttctgtccatgaaggttcgtctcatttcaggaagcaccatgaccatgattcacaaagttcgcacaagtccaagcctgttccaaacattccaaaggaccgtgtatgcactgttgatgagctgtcagtttatcggggtgactggtattaccttgatggcactgggcatgagcatggtccattttcttattctgaattgcaagaattagttaaaaatggcactatcattgaacaaagtagtgtgttccgtaagattgataacacatggtttccagttcttaaggatttaaaacctggaagctctgttcccagtgcagcacgaagctcaagttttactgctgctcttatgctcccagaccaatataattttggtgtgaaccaaggatcaggtagcttcaatcagttgcacccccagtttgtgggttatacacgtggtaaattacatgaactagtcatgaaatatttcaagagcagggaacttactttagctataaatgaggtcttggatccctggatctcagcaaagcagccaaaaaaagagtttgaagcatacttctcccacaattcagcatctagaaatttgctgccagaagatggtgggtctgcaaaaaaggcaaagttgctacctgatcagagtgatgaagatattcatttgtcacaagacattcttgccagtcggaaggaggacatctgttttgacgagctatgtgatgcagaaccttctgttgataatgattctctgaatcccggagcaggaaatgaaacctggggtctactaaacggccatgtgttagcaagaatcttccattttatgagggcagatgtgaaagcacttatttcttctgcagctacctgtaggagctggaatgctgctgtgaagtattacagaaacatgtgtagattcattgatctgtcttctgttggccctctttgcactgattctgtgttttgtgatattatggctggttatgagaagcaaaatattaggacccttattttagctggttgttcgaatcttagttcgcatgcccttggcagagtacttgagcagcttccacaaatatcttatgttgacatccatggttgcggtcatctaggggatctgaaaaataaatttcagcatgtaaaatggatcaggagctcattgaatccagaggagtcatatcggaaaattaaaaccttgaagcagataggtgatgggaacaactacgcatccaaagttgcaaggaacttcaccaatcatctggatggttctgatgagcttgatgggtattttgctgatatttcaaatagagagaatgctaacctttcatttggacaaggtttctataaacgatcaaaattgcttgatgctagaaagtcctctgcggttttgtcgagggatgcagaaatgaggcggttgatgcagagacaggcagagaccagttacagaaagatggaagagttcatcataaacagactgagagaaattatgaggagcaacagatttgattttttcattccaaaggtttccaagattgaaggtaggctaaaaaacgggtattatgctcgccatggctttcgtaccatcaagcatgacatccgtaccatgtgccaagatgcattgagatataaagatggcaatgattcgggagatataaagcaaattgttgtctccttcatacagctagcaaagagactagggaacccaagataattcatctcgtgcatttgaccttgaaatcaaaagaagcctatctaaattaaagaaaaaggatgtctactctggtagcgaaacatctgatgatgatgatggctactctgaagttgatgaaactgagagcgaaactactgtttctgatactgagagtgaccttgatgtaaattctggagcctgggatttaaaaggaaacagtctaaagttaattgaacctggggaatctgtgaccgatgatcgtatattgggtgcccgcatgacaaaggccagccttgttcctccagttactaggaagtatgaagttatcgaggagtaccttattgtagcagatttggaggaagtacagcgaaaaatgagagttgctttacctgatgactattctgagaagttgctgtcacagaagaatggcaccgaaaacttggaacttccagaggttaaggattatcaaccccgaaaagtagcaggagatgaaattcttgagcaagaagtatatggcatagatccatacacacacaatctactgagtgacattatgcctgctgatcttgagttgtcacctactgacaagcatatctttattgaggagttgcttctgaatacattgaataagcaagttaggcatttcactggttcgggaaatacccctatgacttacaaccttaggcctgtcattgaagagatccaaaggtctgcagaggataatggtgatagacgaacttcaaagatgtgcttggggatgctaaagaccatgagaaatcgctctgaacagaacttcgttgcttatagaaagggtctcggtgttgtttgcaacaaaaaaggtggatttggtgtagatgactttgttgtagagttctttggggaggtttacccttcttggagatggtatgaaaagcaagatggtattaaacatatacaaaacaacagtgaagatcaagctcctgagttttacaacattatgttagaaaggccaaagggagacggagatggatatgacttggtttttgttgatgcgatgcacaaggccaactacgctagtagaatctgccactcctgcaacccaaactgcgaagcaaaagtgacagcagtgaatggtaaataccagattggagtttacacacttcgaccaattgcagaaggcgaggaaatcacttttgattacaattctgtaactgagaagagcatgaagcatcagtctgcctctgtggaagtcaagtatgccgtggcagctatttgaatttttctggtgaaggagcctttgagaaggtattaatggaattccatggtgtgctcgataggcatagcctgctgctacaggcttgtgaaacagactctgtctctcaacaagacttaattgacttgggtagagctggtcttggtacctgtttgcttgctggtttgcctggatggcttgttgcttacacagctcacctggtgcggtttatataccttgagagacagaaactccctgatgagatcttaaggcacaatgtggatgagaagcgccagttccttatagaaataaacatggattctgagaagaatgatgctgaggttcaggcagagggagtattaaattcaagattacaacaaatagtgcatacacttgacaaggtgagatatgttatgagatgcatatttggagacccaaagaatgctcctcctcctcttgtaaggttgtctgggaaaagtctggtatctgccatctggaaaggggacagttcaatagttgctgaactcattcagtcgatggaacctcatgttgaagaagaggtacttagtgatctgaaggccaaaatccgtgctcatgatccgtcagagtctgaagatattgagggaggcatccggaattctctcttgtggctgcgtgatgaattgcgaactctttcatgcacttacaagtgccgtcatgatgctgctgcagatttgattcatttgtatgcttatacaaagtgcttcttccgagtccgggattataagacagtaaaatctccaccagttcatatcagtccgcttgacttaggccccaaatatgctgataaactgggaccaggctttcaggagtactgcaagacatacccagaaaattattgcttagcccagcttatctattggtatagccagaattcagaacctgaatctagattaacaagagctagaaaaggttgcatgtcgttgccagatgtctcatccttctatgtgaagtctgcaaaaccatcacaagagcgagcttatggaaacagaactgtgagattcatgttatcgcgcatggaaaagcaggcacaaagaccatggccaaaggataggatatgggtgttcaagagtgatccgagattctttggtagtccaatgatggacaccgtgttgaataattccccgcttgacaaggagatggtgcactggctcaagactagaccaaatgttttcctaggctagtaaaaaaggtttgtaggcagataaggtggtatttggttctttctcctttttggagattttagtctacatgattctttttccgactcacaccttggctacctgatcatggggagtttagcttttagatagcagggtagtctcaccacccccatctgtacattcctctctccctactttccttgtagagatgtatctggttaataactgatagattcgtcattgatttgatgtagtgaattttccccataggaatgctccctcttttgtttcatgtaaatgcagaacaatttcaatcttgaattcagtaatgtgttacaggcatgttgcatttctgtggttcagttcgttgtttcaatcaataaaatgttttaggggcttataggtttcattcat

SEQ ID NO: 13550 - DNA, 7579 bp, Zea Mays
tccgtcttcgttccttgccccccttccttcagaagagcgaggccgcggtcgcggaggaggctttacgaacaaacgagccattagtccccaaaagccaacacacaaacccaggcgatagcgagcgcgcccgcgaaggctacgacgcgagagcgcgcgaggtgtggagcccccaatcccggaagcttccttggccgcgcgcagggcgcgggagtgggagctcgccgccggttaccgagccctctccgccgcggatctcccgatctgagacgccactcgtcaattccccgcagggttttgcggtgccagcgacggacatgagcgtggagagcccaggggagctagggttctgaagcgcaccgtggggcacagcgtggcgaacgacggcccccgacatcctgctaggttttccatgggagatgggggagtcgcgtgcgccgtccgctcagtcgagagcttccgtgccggcgccctcgtgaggagaggaggagcgggagaagcgatgccggacaagggggagagggcccatggccaccgccaccagcaccagcactggaagaaccagcagtcggcgacagctgctgacctggaggagggggagctgcttaatggggaggccgggaccaatgggttgcccgagaggagcatgccacctaagaagtggaggaaggtgctggcagcctccgcagctgctgtggaggtggagcctggggagattgtgagtacaaagcaagcagtgccattgaagaaggaaagaagaaacggggacgttgagaaggtagagctgctgccagagaggcagaggaaggaaaagtcttctgggaagagcaccaggaagtctatcaaggatgatgtggagccaggggagattgcactgccaggaaaaaggcgggatgccaagtcccaactggcccatgataacagcaggaggccaagttcgtctgcccagaaaggctccttgcgggattctgatgaagaacctggtgaaattaagccagagagcggcatcagtggcagtgtaaggaagaaccggccaacagagcctcatagcagtaaccacaagcaccacactgacacctctgaccagtcaggatcaaaacatcgcaggaagggagaaggaaagagttcatctgctgccagacatttgtctgggagaattcgtgaggtctcgccaccaacacgggatcggcgtgataagcacgagaggagcccaggcatcttgggccgttttcctcatgaccgttttcgtcatgacaggtatgacaggagcccgagccgcttggagcgttccccacatcgcactcgccactatgatagcagagaccgcagtccatatatttcacctcgacatagagctcgtccgccccaattcagggataacacaccaagtcgtgttgataattcccctcgtgggagggtccagcatgaagatatcagagaccgtagcccatttcgtcatgacaggtcgccttctgaacgttgtcgtcctactgacacgcatgaagcaagcaagaagagcagaagtagcaacaactcagagaagtcacatcacaaaagcaaatcagcgaagcaatcttcaaaaatcaagagtggtagcaatgggaagaatgaggagaaaatctccaaagaaaagcacactgaaagcagtcagtacactgaactgccaccaccacctcctcttcctctaccaccgccaccaccaccgccgccgccaccgccacccctgccgcctgctgtaccacctccattgcctccatcaccagaacctgagccacctggagttctagccgaggatatgatagaagacatggatatctgtgacaccccacctcacactagtgcagtacctgaacccacagaaccaatttgtgatatagggaggtggttttaccttgatcacttcggtatcgagcaaggaccttccaaacttgctgagctgaagaagctggtgcaagatggatatcttctttctgaccatctgataaaacatgctgatagcaaccgatgggtgactgtagagaatgcagcttcaccactggtgccatctgatttcccctctttatattcggacacttcaacacagttggtcaacccaccagaagccccaggaaatttgctcgatgaagctctagaggaggcttctaacttggcatcaggagctgaggataaacaaatggaggaaacgtctgcagaagatagtgaagaattctgcattgatgatagggttgaagcactgatggatggatcaattttggtgcatggccaggagctcgagatcattggagagcttttaggtgcagattttcagcctgctgattggcaaagatggagtcgtcgtgaagattttactaggctcaatgtgcacactgaagtaaacaatgaaatcaatggaggcacagaaaatagagcaacagatgcttatggtcttgtttctgtggagaagaactttcatcataacgctgagtctagcgaatggttttctggtagatggtcttgcaaaggtggtgactggaggagaaatgacgaactaagccaagatactccattcaggaaaaaacttgttctcaatgaagggtatcctctgtgtcaaatgccaaaaggtagctgtgaggatccacgccggccctgcaaggatgagttgtactaccctgtacgtgctaaaaagtatgaactgccattgtgggcattctcattgacagaagaagatattgatagtgttaatgacaccactaaaagcggtgttgtgcctgggaggccaggtcagaccagacagccttctaggggagtgaagggcatgatgctttcagtggttaggataaattctcgtgttgttaaagatcaatcatctgttgaaccccatacaaaacccagaggaactgatcgaccactgtcgaggtcttcacgctcccattcaattggagctgagagaagttctgtccatgaaggttcgtctcatttcaggaagcaccatgaccatgattcacaaagttcgcacaagtccaagcctgttccaaacattccaaaggaccgtgtatgcactgttgatgagctgtcagtttatcggggtgactggtattaccttgatggcactgggcatgagcatggtccattttcttattctgaattgcaagaattagttaaaaatggcactatcattgaacaaagtagtgtgttccgtaagattgataacacatggtttccagttcttaaggatttaaaacctggaagctctgttcccagtgcagcacgaagctcaagttttactgctgctcttatgctcccagaccaatataattttggtgtgaaccaaggatcaggtagcttcaatcagttgcacccccagtttgtgggttatacacgtggtaaattacatgaactagtcatgaaatatttcaagagcagggaacttactttagctataaatgaggtcttggatccctggatctcagcaaagcagccaaaaaaagagtttgaagcatacttctcccacaattcagcatctagaaatttgctgccagatggtgggtctgcaaaaaaggcaaagttgctacctgatcagagtgatgaagatattcatttgtcacaagacattcttgccagtcggaaggaggacatctgttttgacgagctatgtgatgcagaaccttctgttgataatgattctctgaatcccggagcaggaaatgaaacctggggtctactaaacggccatgtgttagcaagaatcttccattttatgagggcagatgtgaaagcacttatttcttctgcagctacctgtaggagctggaatgctgctgtgaagtattacagaaacatgtgtagattcattgatctgtcttctgttggccctctttgcactgattctgtgttttgtgatattatggctggttatgagaagcaaaatattaggacccttattttagctggttgttcgaatcttagttcgcatgcccttggcagagtacttgagcagcttccacaaatatcttatgttgacatccatggttgcggtcatctaggggatctgaaaaataaatttcagcatgtaaaatggatcaggagctcattgaatccagaggagtcatatcggaaaattaaaaccttgaagcagataggtgatgggaacaactacgcatccaaagttgcaaggaacttcaccaatcatctggatggttctgatgagcttgatgggtattttgctgatatttcaaatagagagaatgctaacctttcatttggacaaggtttctataaacgatcaaaattgcttgatgctagaaagtcctctgcggttttgtcgagggatgcagaaatgaggcggttgatgcagagacaggcagagaccagttacagaaagatggaagagttcatcataaacagactgagagaaattatgaggagcaacagatttgattttttcattccaaaggtttccaagattgaaggtaggctaaaaaacgggtattatgctcgccatggctttcgtaccatcaagcatgacatccgtaccatgtgccaagatgcattgagatataaagatggcaatgattcgggagatataaagcaaattgttgtctccttcatacagctagcaaagagactagggaacccaaggtacatttctgatagatatggagcaggagcccaggacagcctggacattaatcaatattcatttgatactaaactcaaaaagaagcaaaataaaataagaggagcaaattcattggctgctggagcagataattcatctcgtgcatttgaccttgaaatcaaaagaagcctatctaaattaaagaaaaaggatgtctactctggtagcgaaacatctgatgatgatgatggctactctgaagttgatgaaactgagagcgaaactactgtttctgatactgagagtgaccttgatgtaaattctggagcctgggatttaaaaggaaacagtctaaagttaattgaacctggggaatctgtgaccgatgatcgtatattgggtgcccgcatgacaaaggccagccttgttcctccagttactaggaagtatgaagttatcgaggagtaccttattgtagcagatttggaggaagtacagcgaaaaatgagagttgctttacctgatgactattctgagaagttgctgtcacagaagaatggcaccgaaaacttggaacttccagaggttaaggattatcaaccccgaaaagtagcaggagatgaaattcttgagcaagaagtatatggcatagatccatacacacacaatctactgagtgacattatgcctgctgatcttgagttgtcacctactgacaagcatatctttattgaggagttgcttctgaatacattgaataagcaagttaggcatttcactggttcgggaaatacccctatgacttacaaccttaggcctgtcattgaagagatccaaaggtctgcagaggataatggtgatagacgaacttcaaagatgtgcttggggatgctaaagaccatgagaaatcgctctgaacagaacttcgttgcttatagaaagggtctcggtgttgtttgcaacaaaaaaggtggatttggtgtagatgactttgttgtagagttctttggggaggtttacccttcttggagatggtatgaaaagcaagatggtattaaacatatacaaaacaacagtgaagatcaagctcctgagttttacaacattatgttagaaaggccaaagggagacggagatggatatgacttggtttttgttgatgcgatgcacaaggccaactacgctagtagaatctgccactcctgcaacccaaactgcgaagcaaaagtgacagcagtgaatggtaaataccagattggagtttacacacttcgaccaattgcagaaggcgaggaaatcacttttgattacaattctgtaactgagagcaaagaagagcatgaagcatcagtctgcctctgtggaagtcaagtatgccgtggcagctatttgaatttttctggtgaaggagcctttgagaaggtattaatggaattccatggtgtgctcgataggcatagcctgctgctacaggcttgtgaaacagactctgtctctcaacaagacttaattgacttgggtagagctggtcttggtacctgtttgcttgctggtttgcctggatggcttgttgcttacacagctcacctggtgcggtttatataccttgagagacagaaactccctgatgagatcttaaggcacaatgtggatgagaagcgccagttccttatagaaataaacatggattctgagaagaatgatgctgaggttcaggcagagggagtattaaattcaagattacaacaaatagtgcatacacttgacaaggtgagatatgttatgagatgcatatttggagacccaaagaatgctcctcctcctcttgtaaggttgtctgggaaaagtctggtatctgccatctggaaaggggacagttcaatagttgctgaactcattcagtcgatggaacctcatgttgaagaagaggtacttagtgatctgaaggccaaaatccgtgctcatgatccgtcagagtctgaagatattgagggaggcatccggaattctctcttgtggctgcgtgatgaattgcgaactctttcatgcacttacaagtgccgtcatgatgctgctgcagatttgattcatttgtatgcttatacaaagtgcttcttccgagtccgggattataagacagtaaaatctccaccagttcatatcagtccgcttgacttaggccccaaatatgctgataaactgggaccaggctttcaggagtactgcaagacatacccagaaaattattgcttagcccagcttatctattggtatagccagaattcagaacctgaatctagattaacaagagctagaaaaggttgcatgtcgttgccagatgtctcatccttctatgtgaagtctgcaaaaccatcacaagagcgagcttatggaaacagaactgtgagattcatgttatcgcgcatggaaaagcaggcacaaagaccatggccaaaggataggatatgggtgttcaagagtgatccgagattctttggtagtccaatgatggacaccgtgttgaataattccccgcttgacaaggagatggtgcactggctcaagactagaccaaatgttttcctaggctagtaaaaaaggtttgtaggcagataaggtggtatttggttctttctcctttttggagattttagtctacatgattctttttccgactcacaccttggctacctgatcatggggagtttagcttttagatagcagggtagtctcaccacccccatctgtacattcctctctccctactttccttgtagagatgtatctggttaataactgatagattcgtcattgatttgatgtagtgaattttccccataggaatgctccctcttttgtttcatgtaaatgcagaacaatttcaatcttgaattcagtaatgtgttacaggcatgttgcatttctgtggttcagttcgttgtttcaatcaataaaatgttttaggggcttataggtttcattcat

SEQ ID NO: 13551 - DNA, 7547 bp, Zea Mays
tccgtcttcgttccttgccccccttccttcagaagagcgaggccgcggtcgcggaggaggctttacgaacaaacgagccattagtccccaaaagccaacacacaaacccaggcgatagcgagcgcgcccgcgaaggctacgacgcgagagcgcgcgaggtgtggagcccccaatcccggaagcttccttggccgcgcgcagggcgcgggagtgggagctcgccgccggttaccgagccctctccgccgcggatctcccgatctgagacgccactcgtcaattccccgcagggttttgcggtgccagcgacggacatgagcgtggagagcccaggggagctagggttctgaagcgcaccgtggggcacagcgtggcgaacgacggcccccgacatcctgctaggttttccatgggagatgggggagtcgcgtgcgccgtccgctcagtcgagagcttccgtgccggcgccctcgtgaggagaggaggagcgggagaagcgatgccggacaagggggagagggcccatggccaccgccaccagcaccagcactggaagaaccagcagtcggcgacagctgctgacctggaggagggggagctgcttaatggggaggccgggaccaatgggttgcccgagaggagcatgccacctaagaagtggaggaaggtgctggcagcctccgcagctgctgtggaggtggagcctggggagattgtgagtacaaagcaagcagtgccattgaagaaggaaagaagaaacggggacgttgagaaggtagagctgctgccagagaggcagaggaaggaaaagtcttctgggaagagcaccaggaagtctatcaaggatgatgtggagccaggggagattgcactgccaggaaaaaggcgggatgccaagtcccaactggcccatgataacagcaggaggccaagttcgtctgcccagaaaggctccttgcgggattctgatgaagaacctggtgaaattaagccagagagcggcatcagtggcagtgtaaggaagaaccggccaacagagcctcatagcagtaaccacaagcaccacactgacacctctgaccagtcaggatcaaaacatcgcaggaagggagaaggaaagagttcatctgctgccagacatttgtctgggagaattcgtgaggtctcgccaccaacacgggatcggcgtgataagcacgagaggagcccaggcatcttgggccgttttcctcatgaccgttttcgtcatgacaggtatgacaggagcccgagccgcttggagcgttccccacatcgcactcgccactatgatagcagagaccgcagtccatatatttcacctcgacatagagctcgtccgccccaattcagggataacacaccaagtcgtgttgataattcccctcgtgggagggtccagcatgaagatatcagagaccgtagcccatttcgtcatgacaggtcgccttctgaacgttgtcgtcctactgacacgcatgaagcaagcaagaagagcagaagtagcaacaactcagagaagtcacatcacaaaagcaaatcagcgaagcaatcttcaaaaatcaagagtggtagcaatgggaagaatgaggagaaaatctccaaagaaaagcacactgaaagcagtcagtacactgaactgccaccaccacctcctcttcctctaccaccgccaccaccaccgccgccgccaccgccacccctgccgcctgctgtaccacctccattgcctccatcaccagaacctgagccacctggagttctagccgaggatatgatagaagacatggatatctgtgacaccccacctcacactagtgcagtacctgaacccacagaaccaatttgtgatatagggaggtggttttaccttgatcacttcggtatcgagcaaggaccttccaaacttgctgagctgaagaagctggtgcaagatggatatcttctttctgaccatctgataaaacatgctgatagcaaccgatgggtgactgtagagaatgcagcttcaccactggtgccatctgatttcccctctttatattcggacacttcaacacagttggtcaacccaccagaagccccaggaaatttgctcgatgaagctctagaggaggcttctaacttggcatcaggagctgaggataaacaaatggaggaaacgtctgcagaagatagtgaagaattctgcattgatgatagggttgaagcactgatggatggatcaattttggtgcatggccaggagctcgagatcattggagagcttttaggtgcagattttcagcctgctgattggcaaagatggagtcgtcgtgaagattttactaggctcaatgtgcacactgaagtaaacaatgaaatcaatggaggcacagaaaatagagcaacagatgcttatggtcttgtttctgtggagaagaactttcatcataacgctgagtctagcgaatggttttctggtagatggtcttgcaaaggtggtgactggaggagaaatgacgaactaagccaagatactccattcaggaaaaaacttgttctcaatgaagggtatcctctgtgtcaaatgccaaaaggtagctgtgaggatccacgccggccctgcaaggatgagttgtactaccctgtacgtgctaaaaagtatgaactgccattgtgggcattctcattgacagaagaagatattgatagtgttaatgacaccactaaaagcggtgttgtgcctgggaggccaggtcagaccagacagccttctaggggagtgaagggcatgatgctttcagtggttaggataaattctcgtgttgttaaagatcaatcatctgttgaaccccatacaaaacccagaggaactgatcgaccactgtcgaggtcttcacgctcccattcaattggagctgagagaagttctgtccatgaaggttcgtctcatttcaggaagcaccatgaccatgattcacaaagttcgcacaagtccaagcctgttccaaacattccaaaggaccgtgtatgcactgttgatgagctgtcagtttatcggggtgactggtattaccttgatggcactgggcatgagcatggtccattttcttattctgaattgcaagaattagttaaaaatggcactatcattgaacaaagtagtgtgttccgtaagattgataacacatggtttccagttcttaaggatttaaaacctggaagctctgttcccagtgcagcacgaagctcaagttttactgctgctcttatgctcccagaccaatataattttggtgtgaaccaaggatcaggtagcttcaatcagttgcacccccagtttgtgggttatacacgtggtaaattacatgaactagtcatgaaatatttcaagagcagggaacttactttagctataaatgaggtcttggatccctggatctcagcaaagcagccaaaaaaagagtttgaagcatacttctcccacaattcagcatctagaaatttgctgccagaagatggtgggtctgcaaaaaaggcaaagttgctacctgatcagagtgatgaagatattcatttgtcacaagacattcttgccagtcggaaggaggacatctgttttgacgagctatgtgatgcagaaccttctgttgataatgattctctgaatcccggagcaggaaatgaaacctggggtctactaaacggccatgtgttagcaagaatcttccattttatgagggcagatgtgaaagcacttatttcttctgcagctacctgtaggagctggaatgctgctgtgaagtattacagaaacatgtgtagattcattgatctgtcttctgttggccctctttgcactgattctgtgttttgtgatattatggctggttatgagaagcaaaatattaggacccttattttagctggttgttcgaatcttagttcgcatgcccttggcagagtacttgagcagcttccacaaatatcttatgttgacatccatggttgcggtcatctaggggatctgaaaaataaatttcagcatgtaaaatggatcaggagctcattgaatccagaggagtcatatcggaaaattaaaaccttgaagcagataggtgatgggaacaactacgcatccaaagttgcaaggaacttcaccaatcatctggatggttctgatgagcttgatgggtattttgctgatatttcaaatagagagaatgctaacctttcatttggacaaggtttctataaacgatcaaaattgcttgatgctagaaagtcctctgcggttttgtcgagggatgcagaaatgaggcggttgatgcagagacaggcagagaccagttacagaaagatggaagagttcatcataaacagactgagagaaattatgaggagcaacagatttgattttttcattccaaaggtttccaagattgaaggtaggctaaaaaacgggtattatgctcgccatggctttcgtaccatcaagcatgacatccgtaccatgtgccaagatgcattgagatataaagatggcaatgattcgggagatataaagcaaattgttgtctccttcatacagctagcaaagagactagggaacccaaggtacatttctgatagatatggagcaggagcccaggacagcctggacattaatcaatattcatttgatactaaactcaaaaagaagcaaaataaaataagaggagcaaattcattggctgctggagcagataattcatctcgtgcatttgaccttgaaatcaaaagaagcctatctaaattaaagaaaaaggatgtctactctggtagcgaaacatctgatgatgatgatggctactctgaagttgatgaaactgagagcgaaactactgtttctgatactgagagtgaccttgatgtaaattctggagcctgggatttaaaaggaaacagtctaaagttaattgaacctggggaatctgtgaccgatgatcgtatattgggtgcccgcatgacaaaggccagccttgttcctccagttactaggaagtatgaagttatcgaggagtaccttattgtagcagatttggaggaagtacagcgaaaaatgagagttgctttacctgatgactattctgagaagttgctgtcacagaagaatggcaccgaaaacttggaacttccagaggttaaggattatcaaccccgaaaagtagcaggagatgaaattcttgagcaagaagtatatggcatagatccatacacacacaatctactgagtgacattatgcctgctgatcttgagttgtcacctactgacaagcatatctttattgaggagttgcttctgaatacattgaataagcaagttaggcatttcactggttcgggaaatacccctatgacttacaaccttaggcctgtcattgaagagatccaaaggtctgcagaggataatggtgatagacgaacttcaaagatgtgcttggggatgctaaagaccatgagaaatcgctctgaacagaacttcgttgcttatagaaagggtctcggtgttgtttgcaacaaaaaaggtggatttggtgtagatgactttgttgtagagttctttggggaggtttacccttcttggagatggtatgaaaagcaagatggtattaaacatatacaaaacaacagtgaagatcaagctcctgagttttacaacattatgttagaaaggccaaagggagacggagatggatatgacttggtttttgttgatgcgatgcacaaggccaactacgctagtagaatctgccactcctgcaacccaaactgcgaagcaaaattggagtttacacacttcgaccaattgcagaaggcgaggaaatcacttttgattacaattctgtaactgagaagagcatgaagcatcagtctgcctctgtggaagtcaagtatgccgtggcagctatttgaatttttctggtgaaggagcctttgagaaggtattaatggaattccatggtgtgctcgataggcatagcctgctgctacaggcttgtgaaacagactctgtctctcaacaagacttaattgacttgggtagagctggtcttggtacctgtttgcttgctggtttgcctggatggcttgttgcttacacagctcacctggtgcggtttatataccttgagagacagaaactccctgatgagatcttaaggcacaatgtggatgagaagcgccagttccttatagaaataaacatggattctgagaagaatgatgctgaggttcaggcagagggagtattaaattcaagattacaacaaatagtgcatacacttgacaaggtgagatatgttatgagatgcatatttggagacccaaagaatgctcctcctcctcttgtaaggttgtctgggaaaagtctggtatctgccatctggaaaggggacagttcaatagttgctgaactcattcagtcgatggaacctcatgttgaagaagaggtacttagtgatctgaaggccaaaatccgtgctcatgatccgtcagagtctgaagatattgagggaggcatccggaattctctcttgtggctgcgtgatgaattgcgaactctttcatgcacttacaagtgccgtcatgatgctgctgcagatttgattcatttgtatgcttatacaaagtgcttcttccgagtccgggattataagacagtaaaatctccaccagttcatatcagtccgcttgacttaggccccaaatatgctgataaactgggaccaggctttcaggagtactgcaagacatacccagaaaattattgcttagcccagcttatctattggtatagccagaattcagaacctgaatctagattaacaagagctagaaaaggttgcatgtcgttgccagatgtctcatccttctatgtgaagtctgcaaaaccatcacaagagcgagcttatggaaacagaactgtgagattcatgttatcgcgcatggaaaagcaggcacaaagaccatggccaaaggataggatatgggtgttcaagagtgatccgagattctttggtagtccaatgatggacaccgtgttgaataattccccgcttgacaaggagatggtgcactggctcaagactagaccaaatgttttcctaggctagtaaaaaaggtttgtaggcagataaggtggtatttggttctttctcctttttggagattttagtctacatgattctttttccgactcacaccttggctacctgatcatggggagtttagcttttagatagcagggtagtctcaccacccccatctgtacattcctctctccctactttccttgtagagatgtatctggttaataactgatagattcgtcattgatttgatgtagtgaattttccccataggaatgctccctcttttgtttcatgtaaatgcagaacaatttcaatcttgaattcagtaatgtgttacaggcatgttgcatttctgtggttcagttcgttgtttcaatcaataaaatgttttaggggcttataggtttcattcat

SEQ ID NO: 13552 - DNA, 1518 bp, Zea Mays
ggtgtgctcgataggcatagcctgctgctacaggcttgtgaaacagactctgtctctcaacaagacttaattgacttgggtagagctggtcttggtacctgtttgcttgctggtttgcctggatggcttgttgcttacacagctcacctgaaactccctgatgagatcttaaggcacaatgtggatgagaagcgccagttccttatagaaataaacatggattctgagaagaatgatgctgaggttcaggcagagggagtattaaattcaagattacaacaaatagtgcatacacttgacaaggtgagatatgttatgagatgcatatttggagacccaaagaatgctcctcctcctcttgtaaggttgtctgggaaaagtctggtatctgccatctggaaaggggacagttcaatagttgctgaactcattcagtcgatggaacctcatgttgaagaagaggtacttagtgatctgaaggccaaaatccgtgctcatgatccgtcagagtctgaagatattgagggaggcatccggaattctctcttgtggctgcgtgatgaattgcgaactctttcatgcacttacaagtgccgtcatgatgctgctgcagatttgattcatttgtatgcttatacaaagtgcttcttccgagtccgggattataagacagtaaaatctccaccagttcatatcagtccgcttgacttaggccccaaatatgctgataaactgggaccaggctttcaggagtactgcaagacatacccagaaaattattgcttagcccagcttatctattggtatagccagaattcagaacctgaatctagattaacaagagctagaaaaggttgcatgtcgttgccagatgtctcatccttctatgtgaagtctgcaaaaccatcacaagagcgagcttatggaaacagaactgtgagattcatgttatcgcgcatggaaaagcaggcacaaagaccatggccaaaggataggatatgggtgttcaagagtgatccgagattctttggtagtccaatgatggacaccgtgttgaataattccccgcttgacaaggagatggtgcactggctcaagactagaccaaatgttttcctaggctagtaaaaaaggtttgtaggcagataaggtggtatttggttctttctcctttttggagattttagtctacatgattctttttccgactcacaccttggctacctgatcatggggagtttagcttttagatagcagggtagtctcaccacccccatctgtacattcctctctccctactttccttgtagagatgtatctggttaataactgatagattcgtcattgatttgatgtagtgaattttccccataggaatgctccctcttttgtttcatgtaaatgcagaacaatttcaatcttgaattcagtaatgtgttacaggcatgttgcatttctgtggttcagttcgttgtttcaatcaataaaatgttttaggggcttataggtttcattcat

SEQ ID NO: 13553 - DNA, 2939 bp, Zea Mays
ctccaccgtcgcagatggggaagaacgacgacgcaaaagctcctccaatgcgcgcagaccacacggacatggaagaagcgccgcgagatatggatcacttggacgaacatgacagtgatgacatgaatgtaggggtagcttcagatggcccctccagactcagaaagaagaggtccaaggtttgggacgactacaagcccatcattgtagatggagcaattcagagcgcggaatgtcgctactgtcatattcacatgagttgcagaggtgctgatggtcaatccaatgggacaagccatttgtggcgacaccagaaaatttgccgagcaaaagatgggatttttccaaacccacttcaacaggacgcatacttgccatatgtggtgaatgaagtagacccgctggaccaaattcttccagattcacttgatgagattaatttagtgactcaaagtgagaatagcaaattcaggtcaaaggtttggaaggattttataccattctatgttcgagggagagtccagggtgctgactgtgttcattgccacaagcgattcagtgcagataaaggtagaagccatttgaaccggcacactcaaacttgtccggcacggagtggaaatagcctaaatcaccagaaagattgcagaatatgctagtaagttcctcaaagacagccgaggcgatgcaagccttgtggaacatcatgttctagctttaccagcaatggatgatatgaatccctcagagcagaatacttcatcagctcaggctgctactgatataaccaggaaacctgaccaagaagcatcttatcatgagttaactagaatgattatttcacatggctatcccttgtcgattgtcgagcatgaagaaatgagaaggtttgcaaagatcctaaaccccacatttaacatggcttcaagcattgatatagaagagtattcaactcttttgtttcagaaagaaaagtctgagcttaaggaaagaattgcacttttgtcccatcgggtttccttgtcagcaagtgtttgggttcctcatggagctgaagcctcagtaaagtatctctgtttggcagtgcattttgtagattcaaactggaaacttcaaaggaaaaccatcaaatttggtgtgttctggtcctcatctactagtttggaaaggatgatacagtttaaggaggcctgtgtgctagattctgatattggaccatttaatgtcatacaggaagctataagagattggaatcttgatcagaagcatttcagcttgacatctggtagtgaaattagaaatgacgaggggacctcaaaactgatggacttgctcatccaaaggaaatgccttcctattagaggcaagctatacaatatcgcttgtgtgaatgatgtgcttaacggcattgtctcaaaaggtcaaccggtgctttatcatgttggtaacatactagagaaatttattcaggcacaaatgtcctcatctctgactcgacagcaacttctagaagttgttgcacatatgggattgaagtgcccacaggaagaagctaaatggtggcacataatttactttaggcttgaagttcttctgcatttcaagaaggcatttccctcggaagacttgttatctgcagaagataacaaaacttttgagtctgtttgcaggatactcagggctttttatcgcgctgttgaagtgatttgtggtcctgtttgccccacagcaaatatgtacttcaatgaactgtggaaagttagaactgttttgcaagaagaagcatcaactgatcgtgctgcacttgctaacatggttttggagatgctggaagcattcaatgagtattggaaaaattcatatgtgtggctgtcaatacctgttgttcttgatcccagattcaaaattacttttattgagttccgtttaaagcgagcttttggtaccaatgcagaaaaacatgtatctgccattcgtgatacaataagggagctgtttcatgaatattgtggactttcagataacttgggtgccgatacatcaactcgtgaagctcatgatgttgagttgtatggatttgacagtgattcattggaagattgggatgagcatcttaatgcacagacaaggaaccaacaattgacagaacttgacaactatctagaagatggtcttgtcccaaggaaggatgattttgatatcctgaactggtggatgagtaattgtacaaagtatccaaccctttcagttatggcacgcgatgtcctggcgattccagcttctgccgataattttgaggctgcgttaagtggtgaggcaaatgtgatacataagcaatggagtacattaagtatcaaaacaattgaggctcttgtatgtacccgagattggggtaaatagaatgtttacaagcagttcataaccatagtgcttctaacccgggaatacaggatgatacagaaagagtacaccagccatttattgtgcagtatatcagacatctcgcagccaactgtgccaatgacgtgctgctgctttagcctgattgagaattcttgtacaacgtctctagaaagccatttgatgactgatgttctgttcatgttatcctggcgtgctggatgtgctgtgcccccttcaaaagctgaattttggggcaaccaccagtgctcaaatttgatctacgggtcctgtggctgacatcaccatgaaatgattgctggcttcaaatcacatttaggacaatgtggttggttaaacgttgcattaatcttgagtagcatatcaatactgcaaaagagcggaagaattagaatacctttcgctcaaggtctatattcatataggaatgtaaatattactgtcaccagtaagacatcttacaccttccttctgttcaaatcaatagatgcccattccgctggcaaacttttttctca

SEQ ID NO: 13554 - DNA, 2965 bp, Zea Mays
atggggaagaacgacgacgcaaaagctcctccaatgcgcgcagaccacacggacatggaagaagcgccgcgagatatggatcacttggacgaacatgacagtgatgacatgaatgtaggggtagcttcagatggcccctccagactcagaaagaagaggtccaaggtttgggacgactacaagcccatcattgtagatggagcaattcagagcgcggaatgtcgctactgtcatattcacatgagttgcagaggtgctgatggtcaatccaatgggacaagccatttgtggcgacaccagaaaatttgccgagcaaaagatgggatttttccaaacccacttcaacaggacgcatacttgccatatgtggtgaatgaagtagacccgctggaccaaattcttccagattcacttgatgagattaatttagtgactcaaagtgagaatagcaaattcaggtcaaaggtttggaaggattttataccattctatgttcgagggagagtccagggtgctgactgtgttcattgccacaagcgattcagtgcagataaaggtagaagccatttgaaccggcacactcaaacttgtccggcacggagtggaaatagcctaaatcaccagaaaggtgtgttgtaccagtctagtctaccgagttctaaatctagctttcaagatgagctttcaccagcattgacaaatggcaaagttcagattgcagaatatgctagtaagttcctcaaagacagccgaggcgatgcaagccttgtggaacatcatgttctagctttaccagcaatggatgatatgaatccctcagagcagaatacttcatcagctcaggctgctactgatataaccaggaaacctgaccaagaagcatcttatcatgagttaactagaatgattatttcacatggctatcccttgtcgattgtcgagcatgaagaaatgagaaggtttgcaaagatcctaaaccccacatttaacatggcttcaagcattgatatagaagagtattcaactcttttgtttcagaaagaaaagtctgagcttaaggaaagaattgcacttttgtcccatcgggtttccttgtcagcaagtgtttgggttcctcatggagctgaagcctcagtaaagtatctctgtttggcagtgcattttgtagattcaaactggaaacttcaaaggaaaaccatcaaatttggtgtgttctggtcctcatctactagtttggaaaggatgatacagtttaaggaggcctgtgtgctagattctgatattggaccatttaatgtcatacaggaagctataagagattggaatcttgatcagaagcatttcagcttgacatctggtagtgaaattagaaatgacgaggggacctcaaaactgatggacttgctcatccaaaggaaatgccttcctattagaggcaagctatacaatatcgcttgtgtgaatgatgtgcttaacggcattgtctcaaaaggtcaaccggtgctttatcatgttggtaacatactagagaaatttattcaggcacaaatgtcctcatctctgactcgacagcaacttctagaagttgttgcacatatgggattgaagtgcccacaggaagaagctaaatggtggcacataatttactttaggcttgaagttcttctgcatttcaagaaggcatttccctcggaagacttgttatctgcagaagataacaaaacttttgagtctgtttgcaggatactcagggctttttatcgcgctgttgaagtgatttgtggtcctgtttgccccacagcaaatatgtacttcaatgaactgtggaaagttagaactgttttgcaagaagaagcatcaactgatcgtgctgcacttgctaacatggttttggagatgctggaagcattcaatgagtattggaaaaattcatatgtgtggctgtcaatacctgttgttcttgatcccagattcaaaattacttttattgagttccgtttaaagcgagcttttggtaccaatgcagaaaaacatgtatctgccattcgtgatacaataagggagctgtttcatgaatattgtggactttcagataacttgggtgccgatacatcaactcgtgaagctcatgatgttgagttgtatggatttgacagtgattcattggaagattgggatgagcatcttaatgcacagacaaggaaccaacaattgacagaacttgacaactatctagaagatggtcttgtcccaaggaaggatgattttgatatcctgaactggtggatgagtaattgtacaaagtatccaaccctttcagttatggcacgcgatgtcctggcgattccagcttctgccgataattttgaggctgcgttaagtggtgaggcaaatgtgatacataagcaatggagtacattaagtatcaaaacaattgaggctcttgtatgtacccgagattggggtaaatagaatggatgatacagaaagagtacaccagccatttattgtgcagtatatcagacatctcgcagccaactgtgccaatgacgtgctgctgctttagcctgattgagaattcttgtacaacgtctctagaaagccatttgatgactgatgttctgttcatgttatcctggcgtgctggatgtgctgtgcccccttcaaaagctgaattttggggcaaccaccagtgctcaaatttgatctacgggtcctgtggctgacatcaccatgaaatgattgctggcttcaaatcacatttaggacaatgtggttggttaaacgttgcattaatcttgagtagcatatcaatactgcaaaagagcggaagaattagaatacctttcgctcaaggtctatattcatataggaatgtaaatattactgtcaccagtaagacatcttacaccttccttctgttcaaatcaatagatgcccattccgctggcaaacttttttctca

SEQ ID NO: 13555 - DNA, 3101 bp, Zea Mays
gttcacaatgcgggttagggcgggtcgggctgggttaccctgggcacctcgggtcgctctctgctgttcgctcccagctcccgcagaaagagaaagacaacgccgccgctcgccgccgtcgttccccggcgacctcctccaacgaagtccgttgatccagatatggatcacttggacgaacatgacagtgatgacatgaatgtaggggtagcttcagatggcccctccagactcagaaagaagaggtccaaggtttgggacgactacaagcccatcattgtagatggagcaattcagagcgcggaatgtcgctactgtcatattcacatgagttgcagaggtgctgatggtcaatccaatgggacaagccatttgtggcgacaccagaaaatttgccgagcaaaagatgggatttttccaaacccacttcaacaggacgcatacttgccatatgtggtgaatgaagtagacccgctggaccaaattcttccagattcacttgatgagattaatttagtgactcaaagtgagaatagcaaattcaggtcaaaggtttggaaggattttataccattctatgttcgagggagagtccagggtgctgactgtgttcattgccacaagcgattcagtgcagataaaggtagaagccatttgaaccggcacactcaaacttgtccggcacggagtggaaatagcctaaatcaccagaaaggtgtgttgtaccagtctagtctaccgagttctaaatctagctttcaagatgagctttcaccagcattgacaaatggcaaagttcagattgcagaatatgctagtaagttcctcaaagacagccgaggcgatgcaagccttgtggaacatcatgttctagctttaccagcaatggatgatatgaatccctcagagcagaatacttcatcagctcaggctgctactgatataaccaggaaacctgaccaagaagcatcttatcatgagttaactagaatgattatttcacatggctatcccttgtcgattgtcgagcatgaagaaatgagaaggtttgcaaagatcctaaaccccacatttaacatggcttcaagcattgatatagaagagtattcaactcttttgtttcagaaagaaaagtctgagcttaaggaaagaattgcacttttgtcccatcgggtttccttgtcagcaagtgtttgggttcctcatggagctgaagcctcagtaaagtatctctgtttggcagtgcattttgtagattcaaactggaaacttcaaaggaaaaccatcaaatttggtgtgttctggtcctcatctactagtttggaaaggatgatacagtttaaggaggcctgtgtgctagattctgatattggaccatttaatgtcatacaggaagctataagagattggaatcttgatcagaagcatttcagcttgacatctggtagtgaaattagaaatgacgaggggacctcaaaactgatggacttgctcatccaaaggaaatgccttcctattagaggcaagctatacaatatcgcttgtgtgaatgatgtgcttaacggcattgtctcaaaaggtcaaccggtgctttatcatgttggtaacatactagagaaatttattcaggcacaaatgtcctcatctctgactcgacagcaacttctagaagttgttgcacatatgggattgaagtgcccacaggaagaagctaaatggtggcacataatttactttaggcttgaagttcttctgcatttcaagaaggcatttccctcggaagacttgttatctgcagaagataacaaaacttttgagtctgtttgcaggatactcagggctttttatcgcgctgttgaagtgatttgtggtcctgtttgccccacagcaaatatgtacttcaatgaactgtggaaagttagaactgttttgcaagaagaagcatcaactgatcgtgctgcacttgctaacatggttttggagatgctggaagcattcaatgagtattggaaaaattcatatgtgtggctgtcaatacctgttgttcttgatcccagattcaaaattacttttattgagttccgtttaaagcgagcttttggtaccaatgcagaaaaacatgtatctgccattcgtgatacaataagggagctgtttcatgaatattgtggactttcagataacttgggtgccgatacatcaactcgtgaagctcatgatgttgagttgtatggatttgacagtgattcattggaagattgggatgagcatcttaatgcacagacaaggaaccaacaattgacagaacttgacaactatctagaagatggtcttgtcccaaggaaggatgattttgatatcctgaactggtggatgagtaattgtacaaagtatccaaccctttcagttatggcacgcgatgtcctggcgattccagcttctgccgataattttgaggctgcgttaagtggtgaggcaaatgtgatacataagcaatggagtacattaagtatcaaaacaattgaggctcttgtatgtacccgagattggggtaaatagaatgaagtttacaagcagttcataaccatagtgcttctaacccgggaatacaggatgatacagaaagagtacaccagccatttattgtgcagtatatcagacatctcgcagccaactgtgccaatgacgtgctgctgctttagcctgattgagaattcttgtacaacgtctctagaaagccatttgatgactgatgttctgttcatgttatcctggcgtgctggatgtgctgtgcccccttcaaaagctgaattttggggcaaccaccagtgctcaaatttgatctacgggtcctgtggctgacatcaccatgaaatgattgctggcttcaaatcacatttaggacaatgtggttggttaaacgttgcattaatcttgagtagcatatcaatactgcaaaagagcggaagaattagaatacctttcgctcaaggtctatattcatataggaatgtaaatattactgtcaccagtaagacatcttacaccttccttctgttcaaatcaatagatgcccattccgctggcaaacttttttctca

SEQ ID NO: 13556 - DNA, 4388 bp, Zea Mays
ctgaagtatgatgggacgaacccgttccgctactaaattattgttgtttggatgttccatataagacagatttgcttaaaaaataaaaattatgcttaaatgctgaatctttgggctctgtaaaatctcctagacggagccacttggcatggagccgctctataccagctgcctccggaaccaaacactatctaaatagttcctagaatttctgggagacctcatttagtcatactatttagtagtttaggaactaaggctatcttcagtagctctaatatctcgccttttatcccaccttctatttcaaacttcattatgtaaacagtgctgtctacggtacaaaacaatgctttacatggtcatatgcacgatctgctgaacacaacttaatggtgactaaactttagttactaaattttaggaggtgggaaccaaacgctcttgaaaattggccccagtgctgctagtcttgttttcctttactctggaacggttccagatggaatgataggtttacttgtgctaacattgatcacctgggatagtttgtagcctcaatccatgcaaaacgacaatgccttagtcttttacaattttgcatgtacatatcggctatagggtgtctaccgatctagagtatatatgatcctatttttacataagtttaaacagtaagttacaagttcagtgaaagatagttcactctaaactctgaaggacaaactccaggaagttaaactgtagttttatttcagtttcagcgctggtagtgtggcatctgtatttctgtttttttcttgatcaggttctgctgcattgctatgaatggtgtgagttgcatggagttgaatataagccaattgctgacgtggcgttttatttcaaaatctatacatcgatctgatttctcatgagtttagccccgttttgaaacatagtgttggtctgtagtttgcattgttattaaaacgtcgtttaaacgagaaaacgtgtttaaaagttggaatgtccgaacgttttaggtttagggcgtagaacgtccgttttgagtgtttaaacgacgtttaagcgtccagatagcgttgtagggcgttttagaggttctacccgtcctgggcctttagcattttctaggtcactttcctgggcactggccagcgccggacgcggtgccctcactccctcagccagccgccgctctgctctcctctctcctctcctcagccacagccagccgtcgctctgctctcctctcctcagccacagccagccgccgctctcctctcctctctcctctcctctcctcagccatgcagccagccgctgctctctggcgcccacagcagcccagccggcagccgctgctctcctcagccagcagaccaaagcagaccgccctcggcctccacgaactgtggcactgcgcccacagcagaccatattgatatggatcacttggacgaacatgacagtgatgacatgaatgtaggggtagcttcagatggcccctccagactcagaaagaagaggtccaaggtttgggacgactacaagcccatcattgtagatggagcaattcagagcgcggaatgtcgctactgtcatattcacatgagttgcagaggtgctgatggtcaatccaatgggacaagccatttgtggcgacaccagaaaatttgccgagcaaaagatgggatttttccaaacccacttcaacaggacgcatacttgccatatgtggtgaatgaagtagacccgctggaccaaattcttccagattcacttgatgagattaatttagtgactcaaagtgagaatagcaaattcaggtcaaaggtttggaaggattttataccattctatgttcgagggagagtccagggtgctgactgtgttcattgccacaagcgattcagtgcagataaaggtagaagccatttgaaccggcacactcaaacttgtccggcacggagtggaaatagcctaaatcaccagaaaggtgtgttgtaccagtctagtctaccgagttctaaatctagctttcaagatgagctttcaccagcattgacaaatggcaaagttcagattgcagaatatgctagtaagttcctcaaagacagccgaggcgatgcaagccttgtggaacatcatgttctagctttaccagcaatggatgatatgaatccctcagagcagaatacttcatcagctcaggctgctactgatataaccaggaaacctgaccaagaagcatcttatcatgagttaactagaatgattatttcacatggctatcccttgtcgattgtcgagcatgaagaaatgagaaggtttgcaaagatcctaaaccccacatttaacatggcttcaagcattgatatagaagagtattcaactcttttgtttcagaaagaaaagtctgagcttaaggaaagaattgcacttttgtcccatcgggtttccttgtcagcaagtgtttgggttcctcatggagctgaagcctcagtaaagtatctctgtttggcagtgcattttgtagattcaaactggaaacttcaaaggaaaaccatcaaatttggtgtgttctggtcctcatctactagtttggaaaggatgatacagtttaaggaggcctgtgtgctagattctgatattggaccatttaatgtcatacaggaagctataagagattggaatcttgatcagaagcatttcagcttgacatctggtagtgaaattagaaatgacgaggggacctcaaaactgatggacttgctcatccaaaggaaatgccttcctattagaggcaagctatacaatatcgcttgtgtgaatgatgtgcttaacggcattgtctcaaaaggtcaaccggtgctttatcatgttggtaacatactagagaaatttattcaggcacaaatgtcctcatctctgactcgacagcaacttctagaagttgttgcacatatgggattgaagtgcccacaggaagaagctaaatggtggcacataatttactttaggcttgaagttcttctgcatttcaagaaggcatttccctcggaagacttgttatctgcagaagataacaaaacttttgagtctgtttgcaggatactcagggctttttatcgcgctgttgaagtgatttgtggtcctgtttgccccacagcaaatatgtacttcaatgaactgtggaaagttagaactgttttgcaagaagaagcatcaactgatcgtgctgcacttgctaacatggttttggagatgctggaagcattcaatgagtattggaaaaattcatatgtgtggctgtcaatacctgttgttcttgatcccagattcaaaattacttttattgagttccgtttaaagcgagcttttggtaccaatgcagaaaaacatgtatctgccattcgtgatacaataagggagctgtttcatgaatattgtggactttcagataacttgggtgccgatacatcaactcgtgaagctcatgatgttgagttgtatggatttgacagtgattcattggaagattgggatgagcatcttaatgcacagacaaggaaccaacaattgacagaacttgacaactatctagaagatggtcttgtcccaaggaaggatgattttgatatcctgaactggtggatgagtaattgtacaaagtatccaaccctttcagttatggcacgcgatgtcctggcgattccagcttctgccgataattttgaggctgcgttaagtggtgaggcaaatgtgatacataagcaatggagtacattaagtatcaaaacaattgaggctcttgtatgtacccgagattggggtaaatagaatgaagtttacaagcagttcataaccatagtgcttctaacccgggaatacaggatgatacagaaagagtacaccagccatttattgtgcagtatatcagacatctcgcagccaactgtgccaatgacgtgctgctgctttagcctgattgagaattcttgtacaacgtctctagaaagccatttgatgactgatgttctgttcatgttatcctggcgtgctggatgtgctgtgcccccttcaaaagctgaattttggggcaaccaccagtgctcaaatttgatctacgggtcctgtggctgacatcaccatgaaatgattgctggcttcaaatcacatttaggacaatgtggttggttaaacgttgcattaatcttgagtagcatatcaatactgcaaaagagcggaagaattagaatacctttcgctcaaggtctatattcatataggaatgtaaatattactgtcaccagtaagacatcttacaccttccttctgttcaaatcaatagatgcccattccgctggcaaacttttttctca

SEQ ID NO: 13557 - DNA, 3013 bp, Zea Mays
ctcagccagcagaccaaagcagaccgccctcggcctccacgaactgtggcactgcgcccacagcagaccatattgatatggatcacttggacgaacatgacagtgatgacatgaatgtaggggtagcttcagatggcccctccagactcagaaagaagaggtccaaggtttgggacgactacaagcccatcattgtagatggagcaattcagagcgcggaatgtcgctactgtcatattcacatgagttgcagaggtgctgatggtcaatccaatgggacaagccatttgtggcgacaccagaaaatttgccgagcaaaagatgggatttttccaaacccacttcaacaggacgcatacttgccatatgtggtgaatgaagtagacccgctggaccaaattcttccagattcacttgatgagattaatttagtgactcaaagtgagaatagcaaattcaggtcaaaggtttggaaggattttataccattctatgttcgagggagagtccagggtgctgactgtgttcattgccacaagcgattcagtgcagataaaggtagaagccatttgaaccggcacactcaaacttgtccggcacggagtggaaatagcctaaatcaccagaaaggtgtgttgtaccagtctagtctaccgagttctaaatctagctttcaagatgagctttcaccagcattgacaaatggcaaagttcagattgcagaatatgctagtaagttcctcaaagacagccgaggcgatgcaagccttgtggaacatcatgttctagctttaccagcaatggatgatatgaatccctcagagcagaatacttcatcagctcaggctgctactgatataaccaggaaacctgaccaagaagcatcttatcatgagttaactagaatgattatttcacatggctatcccttgtcgattgtcgagcatgaagaaatgagaaggtttgcaaagatcctaaaccccacatttaacatggcttcaagcattgatatagaagagtattcaactcttttgtttcagaaagaaaagtctgagcttaaggaaagaattgcacttttgtcccatcgggtttccttgtcagcaagtgtttgggttcctcatggagctgaagcctcagtaaagtatctctgtttggcagtgcattttgtagattcaaactggaaacttcaaaggaaaaccatcaaatttggtgtgttctggtcctcatctactagtttggaaaggatgatacagtttaaggaggcctgtgtgctagattctgatattggaccatttaatgtcatacaggaagctataagagattggaatcttgatcagaagcatttcagcttgacatctggtagtgaaattagaaatgacgaggggacctcaaaactgatggacttgctcatccaaaggaaatgccttcctattagaggcaagctatacaatatcgcttgtgtgaatgatgtgcttaacggcattgtctcaaaaggtcaaccggtgctttatcatgttggtaacatactagagaaatttattcaggcacaaatgtcctcatctctgactcgacagcaacttctagaagttgttgcacatatgggattgaagtgcccacaggaagaagctaaatggtggcacataatttactttaggcttgaagttcttctgcatttcaagaaggcatttccctcggaagacttgttatctgcagaagataacaaaacttttgagtctgtttgcaggatactcagggctttttatcgcgctgttgaagtgatttgtggtcctgtttgccccacagcaaatatgtacttcaatgaactgtggaaagttagaactgttttgcaagaagaagcatcaactgatcgtgctgcacttgctaacatggttttggagatgctggaagcattcaatgagtattggaaaaattcatatgtgtggctgtcaatacctgttgttcttgatcccagattcaaaattacttttattgagttccgtttaaagcgagcttttggtaccaatgcagaaaaacatgtatctgccattcgtgatacaataagggagctgtttcatgaatattgtggactttcagataacttgggtgccgatacatcaactcgtgaagctcatgatgttgagttgtatggatttgacagtgattcattggaagattgggatgagcatcttaatgcacagacaaggaaccaacaattgacagaacttgacaactatctagaagatggtcttgtcccaaggaaggatgattttgatatcctgaactggtggatgagtaattgtacaaagtatccaaccctttcagttatggcacgcgatgtcctggcgattccagcttctgccgataattttgaggctgcgttaagtggtgaggcaaatgtgatacataagcaatggagtacattaagtatcaaaacaattgaggctcttgtatgtacccgagattggggtaaatagaatgtttacaagcagttcataaccatagtgcttctaacccgggaatacaggatgatacagaaagagtacaccagccatttattgtgcagtatatcagacatctcgcagccaactgtgccaatgacgtgctgctgctttagcctgattgagaattcttgtacaacgtctctagaaagccatttgatgactgatgttctgttcatgttatcctggcgtgctggatgtgctgtgcccccttcaaaagctgaattttggggcaaccaccagtgctcaaatttgatctacgggtcctgtggctgacatcaccatgaaatgattgctggcttcaaatcacatttaggacaatgtggttggttaaacgttgcattaatcttgagtagcatatcaatactgcaaaagagcggaagaattagaatacctttcgctcaaggtctatattcatataggaatgtaaatattactgtcaccagtaagacatcttacaccttccttctgttcaaatcaatagatgcccattccgctggcaaacttttttctca

SEQ ID NO: 13558 - DNA, 3404 bp, Zea Mays
cataatttaaaaaaacgcaccgactcccctacagccgccagcgatcccaatccccgactcctccggcagcccgcaacgactcgcgccgcctccggtcgcgccgggtccaggtaaagcggcttccatctcctcggtctcagcgcgtcatcccctcctccttcctcttccgtttcccttagggttggagtagacacgtcggctcaaggatccttcgaggtgcgtatcttctccttttctccatgctacctttccctctctttttcatgcacgatcttttgcgtttctgtgatgtgtgatggatcaagcccgggttcttctgggcggggtagatactcctccgatatgtgttacgctagtggtactagtagatgtaattcaactccaattttttcggtgttcaattgaacccttgtgccgttcgatgtttactttggtaattgtttgactactaaaaatagactactgttgcactgaatattgcatggcgtcttcttcgaataaaactgggttgactcgtctacagcctctagatgcagctgacctttgacactgctccagtaatccagcgcatatgcttcagtgatgtgtacatgaactttttgattggctgttatactcataccagttacagattgatcatgccggtagtgagtagtgaagatggctgatactaatgctctcaccatttgtctgctcatgtactcccaagaatcgagaatattcctttcagccatcgaatcatgtttgtgcctatgtagggaaaggagacctgggtaatgccttgctatacatcgtcatatgtcccatatgaaatcgctagcacatccaatctcagcaaggacccaccttaatagaatttgagctttaagctatctttcataatattgtaactaatggcatgcatgttatcttaagtttggcaagtaatttctgtaagtgtgacatgggaattaagtactttttctgagtgctagttccagattgcagatggattacgtttctgcaacgtttggtgcactggtgagagctgtctcattgagtcaccaggtcacgggttcgaatcagtctctccacatttgcacatttgcgagagaaggcttgctttggtttatccttttttcagacccctctcatgtgggagcctccaacactgggtcgggattgccctttaatgatcttagatgtgatgattaatttgattctggacccctcatctcgtaaatcttaatttacaagcgaaattttgctccaatgcgtctattgaaattgatttttggaagatgttgagttattcacagtgcgatgttcatgtcagctttactccacttaagccaactacccaggaaaccaccaaatcaccatgttatttaagaggttttatttaggtagttgtagcccagcttaagcttatgtgcagaacatactaaacctcattttttgtaagtgattttgaaaagagattactttgaaaactttaaacctcatttccgttatctgattttgaaaagagattattatgaaaactttaaatatgcctttgctatctgtaacagagtaatggaaagtcaaccatcaaactaaattgttttttccatcatcaaagcaatttgcaatatccgtaacctgtttgaccaatactggcagggactgactggttgtgcaaatacctacttttaaattattgaaagtgggagcatgaaaggtaattttgcggtcctgtcatgcattatagggaactagggacaacgttaatagatgttgtgatttttttaagaaaagtaaatcttgtctaccttgctgtttaccagttgctgtttattctttgaggatacgctcccttttgatttcacttgttcaatgtaaccatatgtttgttccatgtttaatggaagtttctgtgtttgtgatacccaaatcaaccaccaggataaaatgttataccaatgcgctattgcaccactgcagttgctttaagatggatttttgcttaagatggaattttacaagcaagcatcttttgtaacttcagttagattatttgctgctctcaagagtagcgttcaagctacaagaataaataagataaaggccagtgatttttttcatacacaaaaggcattcccaatcccatccatcaacatagatctgagaatttttagtgttgtaacctgaaatacatcttttgcatttttatgtgttataacctgtaattttgtagtctttcttgtttatctggatggaaaaaatgatcaaatttccaattgttttccaagggtcaggacacttattgattttgaacaaagatctagcatggaaccatcctcacagcctcaaccaatgatgggtgttgggtcacaaccttatcctgctgctgctccctatgtgccagtacctggatctcttgctgttcctcctggctcacagccagcagcagcattccccaatccaactcaactcagtgctcagcaccagatggtgtaccagcaggctcagcaatttcatcaacaacttcagcaacagcaggaacaacagctcagggagttctggactacccagatggatgagatcaagcaagcaaatgacttcaagatccacaccttgccacttgcaaggataaagaagataatgaaggctgatgaggatgtgcggatgatctctgcagaagctcctgttgtgtttgcgaaggcatgcgaggtattcatattagagctgacattgaggtcatggatgcacacagaggagaacaagcgccggaccttgcagaagaacgacattgcagctgccatcaccaggactgatatatatgacttcctggtggacataatcccgagggatgaaatgaaagaggaggggctcggacataatcccatagttggcctgccgcctgctatgggggctccagctgatcatggttctcatccatattactatgtgccagctcagcaggtgcaaggagcaggtatgatgtatggtggccagcagggtcacccagtgacttatatgtggcagacgccgcaagggcaagcggcagagccccccgaagaggagcagcagcagtctgcctgaatgtagcaaatagacgataacagcaaagcaattacatcttgatctgaagttctgaacttagttctctaaacaaacaaatatgatttggttatgttaattgtgcagatgattgcaggctgaaacaattgtcgctaattaggtgtcatagcctcatagggtttcctaatggtagtttcgactcccgacgctgccacggcagcagtagaaaatgattgtaatttgcagactaatgtagtaagattagccttttctgtctaatccaatatacgattgaggccctcgtatgaactgagtgtttgtttgccttatttttttaaccattgtgctctttgcttggc

SEQ ID NO: 13559 - DNA, 1976 bp, Zea Mays
cataatttaaaaaaacgcaccgactcccctacagccgccagcgatcccaatccccgactcctccggcagcccgcaacgactcgcgccgcctccggtcgcgccgggtccaggtaaagcggcttccatctcctcggtctcagcgcgtcatcccctcctccttcctcttccgtttcccttagggttggagtagacacgtcggctcaaggatccttcgagggactgactggttgtgcaaatacctacttttaaattattgaaagtgggagcatgaaaggtaattttgcggtcctgtcatgcattatagggaactagggacaacgttaatagatgttgtgatttttttaagaaaagtaaatcttgtctaccttgctgtttaccagttgctgtttattctttgaggatacgctcccttttgatttcacttgttcaatgtaaccatatgtttgttccatgtttaatggaagtttctgtgtttgtgatacccaaatcaaccaccaggataaaatgttataccaatgcgctattgcaccactgcagttgctttaagatggatttttgcttaagatggaattttacaagcaagcatcttttgtaacttcagttagattatttgctgctctcaagagtagcgttcaagctacaagaataaataagataaaggccagtgatttttttcatacacaaaaggcattcccaatcccatccatcaacatagatctgagaatttttagtgttgtaacctgaaatacatcttttgcatttttatgtgttataacctgtaattttgtagtctttcttgtttatctggatggaaaaaatgatcaaatttccaattgttttccaagggtcaggacacttattgattttgaacaaagatctagcatggaaccatcctcacagcctcaaccaatgatgggtgttgggtcacaaccttatcctgctgctgctccctatgtgccagtacctggatctcttgctgttcctcctggctcacagccagcagcagcattccccaatccaactcaactcagtgctcagcaccagatggtgtaccagcaggctcagcaatttcatcaacaacttcagcaacagcaggaacaacagctcagggagttctggactacccagatggatgagatcaagcaagcaaatgacttcaagatccacaccttgccacttgcaaggataaagaagataatgaaggctgatgaggatgtgcggatgatctctgcagaagctcctgttgtgtttgcgaaggcatgcgaggtattcatattagagctgacattgaggtcatggatgcacacagaggagaacaagcgccggaccttgcagaagaacgacattgcagctgccatcaccaggactgatatatatgacttcctggtggacataatcccgagggatgaaatgaaagaggaggggctcggacataatcccatagttggcctgccgcctgctatgggggctccagctgatcatggttctcatccatattactatgtgccagctcagcaggtgcaaggagcaggtatgatgtatggtggccagcagggtcacccagtgacttatatgtggcagacgccgcaagggcaagcggcagagccccccgaagaggagcagcagcagtctgcctgaatgtagcaaatagacgataacagcaaagcaattacatcttgatctgaagttctgaacttagttctctaaacaaacaaatatgatttggttatgttaattgtgcagatgattgcaggctgaaacaattgtcgctaattaggtgtcatagcctcatagggtttcctaatggtagtttcgactcccgacgctgccacggcagcagtagaaaatgattgtaatttgcagactaatgtagtaagattagccttttctgtctaatccaatatacgattgaggccctcgtatgaactgagtgtttgtttgccttatttttttaaccattgtgctctttgcttggc

SEQ ID NO: 13560 - DNA, 2833 bp, Zea Mays
cataatttaaaaaaacgcaccgactcccctacagccgccagcgatcccaatccccgactcctccggcagcccgcaacgactcgcgccgcctccggtcgcgccgggtccaggtaaagcggcttccatctcctcggtctcagcgcgtcatcccctcctccttcctcttccgtttcccttagggttggagtagacacgtcggctcaaggatccttcgaggtgcgtatcttctccttttctccatgctacctttccctctctttttcatgcacgatcttttgcgtttctgtgatgtgtgatggatcaagcccgggttcttctgggcggggtagatactcctccgatatgtgttacgctagtggtactagtagatgtaattcaactccaattttttcggtgttcaattgaacccttgtgccgttcgatgtttactttggtaattgtttgactactaaaaatagactactgttgcactgaatattgcatggcgtcttcttcgaataaaactgggttgactcgtctacagcctctagatgcagctgacctttgacactgctccagtaatccagcgcatatgcttcagtgatgtgtacatgaactttttgattggctgttatactcataccagttacagattgatcatgccggtagtgagtagtgaagatggctgatactaatgctctcaccatttgtctgctcatgtactcccaagaatcgagaatattcctttcagccatcgaatcatgtttgtgcctatgtagggaaaggagacctgggtaatgccttgctatacatcgtcatatgtcccatatgaaatcgctagcacatccaatctcagcaaggacccaccttaatagaatttgagctttaagctatctttcataatattgtaactaatggcatgcatgttatcttaagtttggcaagtaatttctgtaagtgtgacatgggaattaagtactttttctgagtgctagttccagattgcagatggattacgtttctgcaacgtttggtgcactggtgagagctgtctcattgagtcaccaggtcacgggttcgaatcagtctctccacatttgcacatttgcgagagaaggcttgctttggtttatccttttttcagacccctctcatgtgggagcctccaacactgggtcgggattgccctttaatgatcttagatgtgatgattaatttgattctggacccctcatctcgtaaatcttaatttacaagcgaaattttgctccaatgcgtctattgaaattgatttttggaagatgttgagttattcacagtgcgatgttcatgtcagctttactccacttaagccaactacccaggaaaccaccaaatcaccatgttatttaagaggttttatttaggtagttgtagcccagcttaagcttatgtgcagaacatactaaacctcattttttgtaagtgattttgaaaagagattactttgaaaactttaaacctcatttccgttatctgattttgaaaagagattattatgaaaactttaaatatgcctttgctatctgtaacagagtaatggaaagtcaaccatcaaactaaattgttttttccatcatcaaagcaatttgcaatatccgtaacctgtttgaccaatactggcagggactgactggttgtgcaaatacctacttttaaattattgaaagtgggagcatgaaagggtcaggacacttattgattttgaacaaagatctagcatggaaccatcctcacagcctcaaccaatgatgggtgttgggtcacaaccttatcctgctgctgctccctatgtgccagtacctggatctcttgctgttcctcctggctcacagccagcagcagcattccccaatccaactcaactcagtgctcagcaccagatggtgtaccagcaggctcagcaatttcatcaacaacttcagcaacagcaggaacaacagctcagggagttctggactacccagatggatgagatcaagcaagcaaatgacttcaagatccacaccttgccacttgcaaggataaagaagataatgaaggctgatgaggatgtgcggatgatctctgcagaagctcctgttgtgtttgcgaaggcatgcgaggtattcatattagagctgacattgaggtcatggatgcacacagaggagaacaagcgccggaccttgcagaagaacgacattgcagctgccatcaccaggactgatatatatgacttcctggtggacataatcccgagggatgaaatgaaagaggaggggctcggacataatcccatagttggcctgccgcctgctatgggggctccagctgatcatggttctcatccatattactatgtgccagctcagcaggtgcaaggagcaggtatgatgtatggtggccagcagggtcacccagtgacttatatgtggcagacgccgcaagggcaagcggcagagccccccgaagaggagcagcagcagtctgcctgaatgtagcaaatagacgataacagcaaagcaattacatcttgatctgaagttctgaacttagttctctaaacaaacaaatatgatttggttatgttaattgtgcagatgattgcaggctgaaacaattgtcgctaattaggtgtcatagcctcatagggtttcctaatggtagtttcgactcccgacgctgccacggcagcagtagaaaatgattgtaatttgcagactaatgtagtaagattagccttttctgtctaatccaatatacgattgaggccctcgtatgaactgagtgtttgtttgccttatttttttaaccattgtgctctttgcttggc

SEQ ID NO: 13561 - DNA, 420 bp, Zea Mays
cgagaatcctggctccagctccgtaacaatcccacctccgctcccatatgaatcagaggatccgctcggccacgcccatcgcaccaaaccactgaacatccttgccttcgagagaaaccaagagtgcgggaggtggcgcatccacagaatcgggtgctcgctggcgtagcgctccagcgaagagaacttagggagtattggtctgggccgcgcgttcgtaacatagagcctagcatcgatggtggctagagcgtggggaatcgctcgccggacttgctctcgccttcatggaatctagccaccacggccaggcccgctcgctgcataatcccggtgaagagcaggtagcccaggaggaggtctacaacgaggagtgcgagctaatctaggtggcgtctccgagtcagcgttatggcacca

SEQ ID NO: 13562 - DNA, 3466 bp, Zea Mays
  misc_feature (3465)..(3466): n is a, c, g, or t
ctctctcccaatttcagtcagttcgctccgctcccacatgcctcctccgcctccctctcgccgtcccggcatacccaatccctaggcaccccgccgaaaccctagattctcctctcctgctccgatggctggggcagcggcgtcccccgtggcggcccacgtggtggaacggttccgctcgcggctgcgcgaggaagcgggcagcggggagccgggcgcctccgcggtcgtgcgcttgtacgcggaggcgctccgcgagcttaccttcaactgcaagccggtcatcaccgagctcaccatcgtcgcaggccagcacgccgcgctcgccgccgggggaatcgccggcgccgtctgcgcccgcgtcgccgaggtgccacctgatcagatattaccatctttgtatctgctagatagtattgtgaagaacataggtggggaatatgtagagcattttgcaattaggttgcaaagtgtatttgttgatgcatactacagagttcatccaaaccagtatgcttcaatgaggcgcctctttcgtacctggtggccagtgtttccttcttctgtgcttcacagcattgaggatgaccttcaattttcgccctcagagaataaccgtcccaccacatcgacaaatgtgcatcaaacagagtcgttatctcctagaccatctcatggcatacatgtaaatcctaaatacctagaagcacaacataagttcaagcgggtcaatgtggcgcaccagtcagcagctcaggacactaggcaaatgtctgatgtgcaggaggatctgataaatggactaacatcgaatagttcacaaggacggccttcagtgtttcagaaatcttctttacagtatgctgatgatcctggtcaacaagagatgtttcgacctcttgctggagcaataagggcaacatcgccacatctcttgagaacacatgcatctgatgtgaatctagatgggccattagccaattcaaggagaaacttgtccagatcaccacctcttgatgtgttccctaggaatgtttccccaaagagaccactagagaggctaccaccatctcattctgtattgggacctgatcccagaaaattgcctgatcgaaatggcaggttaaggtgggctttggacgatggtgcacagtggcctacaataagtatgcttgatgaagagtacaggaagcaaagtgcaagggaacttattgatgcatatggaaattgtcaaggacgagatgctgatgaacgacttcctaaagtacagcgcctggattcaaatggtatgactagcaaatctggtgcacgaaattggttaacttcagaggaagagtattcatgggaggatatgagtccaactttgactgatcgagtcagaagcagcatgccatcttttcctcctggaaccatgagaattggatttcctggggcaaatgcagggctactggaatctgatgttgggaggcacaatttcctaagccaagctactagatcatcagttgatgtttcaccatttaatattgaagataggatttcagctgcaagtcatgttgacatttccacaaggagatatccaagcaattttggtgttcagaatggagctcttttggagtaccagaattctgaacatactctaaatcatgggagaattgctaccatgccagctccaccttggcaacagcctattggtcttccattgcgaatacaaggacctgaacatccttcagtacttggtagaataccacagcctgtcgacggtgaaatgccagtcaagaggttggacattagtggcacgtacaatggtttgaatgtagataaacccttggtgaagcataggtcatcacctgctcctgccccgacagaatggctcccccttcaccatgcccaatcacaaactttaccactaattccacctgataccaaacatgttagaagtgcatcagatagtttagaaattagttcttttgttagccatggaggtagttcatcagtatttgttccacggcatcagtatgatgccgtggatcggaaaacaggtaccagtaacttagctcaaccaccatcaccatatcagaaccaagatttgttgccatcaagtcaacaaaatcaaggtacaattttgggaaaccaagctcatcctcatcgtcccctaaagttacatccccatgctcatcctcaccatcaggagacctttagaagctttgcacctggcatgtctgtatctccattccaaggacaaggaggtaatgcaaccatgacaccagtttctgttctgccaacgtctttttctgtacctcctgctgtgccaccctatggcgtgctgtctgcacctgggtttcctatgccaccattaccgcctggaccaccagcacctgtctcactgcagatgggttcatcatcatcacaagttggtggcccccaaccatttgtctctggactgttgagtaaccttatgcggcacggtgtaatttcactggaaccacctagtcaatcccaggattctgttggagttgacttcaatgtagacctcaaggtacggaatgaatctgtcaccaatgctttgtatcaggatcttccaaggcagtgcaaaacttgtggtcttcgatttaaatgccaagaggagcatcgtgctcacatggactggcatgttacaaagaacaggaattcaaagaatcgtaagaaatcttcacgtaaatattttgtcaccgctgttgaatggttaagagcagcagaaacagtaggaaacgatggagttcctgcttttgtgctctcagacccagtcccagacagacaggaagagaaagaaattgctgttcctgcggatgaggagcaaacatcctgtgcattatgtcaagagccatttgaagatttctacagtgatgagactgacgagtggatgtacagaggtgcagtttatatgaatgcaccagatggtaatatcgatggtttggaatggtcacagttgggacctattgtccatgctaaatgtcgatctgggcccggcaatacttcttagggtgggcatagctgggatgatttgatagtttttttttcccgttgcggctgtaggcatgacctgtaaactaatggagactcagattttggtatggttagcttcttttccatctggctcccttaatagccagtgcatagaatgttttttggaacaaaaaggcaggagccagtgcatagaatgtcaatgtgacaatagtgtataactgtaaaatttttgtgtaattcagttgcacagtgctgctttttcattacaactatagtgtgatctatactgaagcttcatgtttagggtttctgcagcacagttgttgacaacggtatatgtatatgtaaccatggtttcactggacatgggaaacaatatatttcaatagtcctgttttcttccgttaatatcttgtgcagaatacatagcagttctctacgttggttggtagctttggaagnn

SEQ ID NO: 13563 - DNA, 2341 bp, Zea Mays
tttcagtcagttcgctccgctcccacatgcctcctccgcctccctctcgccgtcccggcatacccaatccctaggcaccccgccgaaaccctagattctcctctcctgctccgatggctggggcagcggcgtcccccgtggcggcccacgtggtggaacggttccgctcgcggctgcgcgaggaagcgggcagcggggagccgggcgcctccgcggtcgtgcgcttgtacgcggaggcgctccgcgagcttaccttcaactgcaagccggtcatcaccgagctcaccatcgtcgcaggccagcacgccgcgctcgccgccgggggaatcgccggcgccgtctgcgcccgcgtcgccgaggtgccacctgatcagatattaccatctttgtatctgctagatagtattgtgaagaacataggtggggaatatgtagagcattttgcaattaggttgcaaagtgtatttgttgatgcatactacagagttcatccaaaccagtatgcttcaatgaggcgcctctttcgtacctggtggccagtgtttccttcttctgtgcttcacagcattgaggatgaccttcaattttcgccctcagagaataaccgtcccaccacatcgacaaatgtgcatcaaacagagtcgttatctcctagaccatctcatggcatacatgtaaatcctaaatacctagaagcacaacataagttcaagcgggtcaatgtggcgcaccagtcagcagctcaggacactaggcaaatgtctgatgtgcaggaggatctgataaatggactaacatcgaatagttcacaaggacggccttcagtgtttcagcatgttgacatttccacaaggagatatccaagcaattttggtgttcagaatggagctcttttggagtaccagaattctgaacatactctaaatcatgggagaattgctaccatgccagctccaccttggcaacagcctattggtcttccattgcgaatacaaggacctgaacatccttcagtacttggtagaataccacagcctgtcgacggtgaaatgccagtcaagaggttggacattagtggcacgtacaatggtttgaatgtagataaacccttggtgaagcataggtcatcacctgctcctgccccgacagaatggctcccccttcaccatgcccaatcacaaactttaccactaattccacctgataccaaacatgttagaagtgcatcagatagtttagaaattagttcttttgttagccatggaggtagttcatcagtatttgttccacggcatcagtatgatgccgtggatcggaaaacaggtaccagtaacttagctcaaccaccatcaccatatcagaaccaagatttgttgccatcaagtcaacaaaatcaaggtacaattttgggaaaccaagctcatcctcatcgtcccctaaagttacatccccatgctcatcctcaccatcaggagacctttagaagctttgcacctggcatgtctgtatctccattccaaggacaaggaggtaatgcaaccatgacaccagtttctgttctgccaacgtctttttctgtacctcctgctgtgccaccctatggcgtgctgtctgcacctgggtttcctatgccaccattaccgcctggaccaccagcacctgtctcactgcagatgggttcatcatcatcacaagttggtggcccccaaccatttgtctctggactgttgagtaaccttatgcggcacggtgtaatttcactggaaccacctagtcaatcccaggattctgttggagttgacttcaatgtagacctcaaggtacggaatgaatctgtcaccaatgctttgtatcaggatcttccaaggcagtgcaaaacttgtggtcttcgatttaaatgccaagaggagcatcgtgctcacatggactggcatgttacaaagaacaggaattcaaagaatcgtaagaaatcttcacgtaaatattttgtcaccgctgttgaatggttaagagcagcagaaacagtaggaaacgatggagttcctgcttttgtgctctcagacccagtcccagacagacaggaagagaaagaaattgctgttcctgcggatgaggagcaaacatcctgtgcattatgtcaagagccatttgaagatttctacagtgatgagactgacgagtggatgtacagaggtgcagtttatatgaatgcaccagatggtaatatcgatggtttggaatggtcacagttgggacctattgtccatgctaaatgtcgatctgggcccggcaatacttcttagggtgggcatagctggcgtgatctaatttataaaaaagt

SEQ ID NO: 13564 - DNA, 3144 bp, Zea Mays
  misc_feature (3143)..(3144): n is a, c, g, or t
tttcagtcagttcgctccgctcccacatgcctcctccgcctccctctcgccgtcccggcatacccaatccctaggcaccccgccgaaaccctagattctcctctcctgctccgatggctggggcagcggcgtcccccgtggcggcccacgtggtggaacggttccgctcgcggctgcgcgaggaagcgggcagcggggagccgggcgcctccgcggtcgtgcgcttgtacgcggaggcgctccgcgagcttaccttcaactgcaagccggtcatcaccgagctcaccatcgtcgcaggccagcacgccgcgctcgccgccgggggaatcgccggcgccgtctgcgcccgcgtcgccgaggtgccacctgatcagatattaccatctttgtatctgctagatagtattgtgaagaacataggtggggaatatgtagagcattttgcaattaggttgcaaagtgtatttgttgatgcatactacagagttcatccaaaccagtatgcttcaatgaggcgcctctttcgtacctggtggccagtgtttccttcttctgtgcttcacagcattgaggatgaccttcaattttcgccctcagagaataaccgtcccaccacatcgacaaatgtgcatcaaacagagtcgttatctcctagaccatctcatggcatacatgtaaatcctaaatacctagaagcacaacataagttcaagcgggtcaatgtggcgcaccagtcagcagctcaggacactaggcaaatgtctgatgtgcaggaggatctgataaatggactaacatcgaatagttcacaaggacggccttcagtgtttcagaaatcttctttacagtatgctgatgatcctggtcaacaagagatgtttcgacctcttgctggagcaataagggcaacatcgccacatctcttgagaacacatgcatctgatgtgaatctagatgggccattagccaattcaaggagaaacttgtccagatcaccacctcttgatgtgttccctaggaatgtttccccaaagagaccactagagaggctaccaccatctcattctgtattgggacctgatcccagaaaattgcctgatcgaaatggcaggttaaggtgggctttggacgatggtgcacagtggcctacaataagtatgcttgatgaagagtacaggaagcaaagtgcaagggaacttattgatgcatatggaaattgtcaaggacgagatgctgatgaacgacttcctaaagtacagcgcctggattcaaatggtatgactagcaaatctggtgcacgaaattggttaacttcagaggaagagtattcatgggaggatatgagtccaactttgactgatcgagtcagaagcagcatgccatcttttcctcctggaaccatgagaattggatttcctggggcaaatgcagggctactggaatctgatgttgggaggcacaatttcctaagccaagctactagatcatcagttgatgtttcaccatttaatattgaagataggatttcagctgcaagtgtatgcatgttgacatttccacaaggagatatccaagcaattttggtgttcagaatggagctcttttggagtaccagaattctgaacatactctaaatcatgggagaattgctaccatgccagctccaccttggcaacagcctattggtcttccattgcgaatacaaggacctgaacatccttcagtacttggtagaataccacagcctgtcgacggtgaaatgccagtcaagaggttggacattagtggcacgtacaatggtttgaatgtagataaacccttggtgaagcataggtcatcacctgctcctgccccgacagaatggctcccccttcaccatgcccaatcacaaactttaccactaattccacctgataccaaacatgttagaagtgcatcagatagtttagaaattagttcttttgttagccatggaggtagttcatcagtatttgttccacggcatcagtatgatgccgtggatcggaaaacaggtaccagtaacttagctcaaccaccatcaccatatcagaaccaagatttgttgccatcaagtcaacaaaatcaaggtacaattttgggaaaccaagctcatcctcatcgtcccctaaagttacatccccatgctcatcctcaccatcaggagacctttagaagctttgcacctggcatgtctgtatctccattccaaggacaaggaggtaatgcaaccatgacaccagtttctgttctgccaacgtctttttctgtacctcctgctgtgccaccctatggcgtgctgtctgcacctgggtttcctatgccaccattaccgcctggaccaccagcacctgtctcactgcagatgggttcatcatcatcacaagttggtggcccccaaccatttgtctctggactgttgagtaaccttatgcggcacggtgtaatttcactggaaccacctagtcaatcccaggattctgttggagttgacttcaatgtagacctcaaggtacggaatgaatctgtcaccaatgctttgtatcaggatcttccaaggcagtgcaaaacttgtggtcttcgatttaaatgccaagaggagcatcgtgctcacatggactggcatgttacaaagaacaggaattcaaagaatcgtaagaaatcttcacgtaaatattttgtcaccgctgttgaatggttaagagcagcagaaacagtaggaaacgatggagttcctgcttttgtgctctcagacccagtcccagacagacaggaagagaaagaaattgctgttcctgcggatgaggagcaaacatcctgtgcattatgtcaagagccatttgaagatttctacagtgatgagactgacgagtggatgtacagaggtgcagtttatatgaatgcaccagatggtaatatcgatggtttggaatggtcacagttgggacctattgtccatgctaaatgtcgatctgggcccggcaatacttcttagggtgggcatagctgggatgatttgatagtttttttttcccgttgcggctgtaggcatgacctgtaaactaatggagactcagattttgaatacatagcagttctctacgttggttggtagctttggaagnn

SEQ ID NO: 13565 - DNA, 2384 bp, Zea Mays
  misc_feature (2383)..(2384): n is a, c, g, or t
tttcagtcagttcgctccgctcccacatgcctcctccgcctccctctcgccgtcccggcatacccaatccctaggcaccccgccgaaaccctagattctcctctcctgctccgatggctggggcagcggcgtcccccgtggcggcccacgtggtggaacggttccgctcgcggctgcgcgaggaagcgggcagcggggagccgggcgcctccgcggtcgtgcgcttgtacgcggaggcgctccgcgagcttaccttcaactgcaagccggtcatcaccgagctcaccatcgtcgcaggccagcacgccgcgctcgccgccgggggaatcgccggcgccgtctgcgcccgcgtcgccgaggcgcaccagtcagcagctcaggacactaggcaaatgtctgatgtgcaggaggatctgataaatggactaacatcgaatagttcacaaggacggccttcagtgtttcagcatgttgacatttccacaaggagatatccaagcaattttggtgttcagaatggagctcttttggagtaccagaattctgaacatactctaaatcatgggagaattgctaccatgccagctccaccttggcaacagcctattggtcttccattgcgaatacaaggacctgaacatccttcagtacttggtagaataccacagcctgtcgacggtgaaatgccagtcaagaggttggacattagtggcacgtacaatggtttgaatgtagataaacccttggtgaagcataggtcatcacctgctcctgccccgacagaatggctcccccttcaccatgcccaatcacaaactttaccactaattccacctgataccaaacatgttagaagtgcatcagatagtttagaaattagttcttttgttagccatggaggtagttcatcagtatttgttccacggcatcagtatgatgccgtggatcggaaaacaggtaccagtaacttagctcaaccaccatcaccatatcagaaccaagatttgttgccatcaagtcaacaaaatcaaggtacaattttgggaaaccaagctcatcctcatcgtcccctaaagttacatccccatgctcatcctcaccatcaggagacctttagaagctttgcacctggcatgtctgtatctccattccaaggacaaggaggtaatgcaaccatgacaccagtttctgttctgccaacgtctttttctgtacctcctgctgtgccaccctatggcgtgctgtctgcacctgggtttcctatgccaccattaccgcctggaccaccagcacctgtctcactgcagatgggttcatcatcatcacaagttggtggcccccaaccatttgtctctggactgttgagtaaccttatgcggcacggtgtaatttcactggaaccacctagtcaatcccaggattctgttggagttgacttcaatgtagacctcaaggtacggaatgaatctgtcaccaatgctttgtatcaggatcttccaaggcagtgcaaaacttgtggtcttcgatttaaatgccaagaggagcatcgtgctcacatggactggcatgttacaaagaacaggaattcaaagaatcgtaagaaatcttcacgtaaatattttgtcaccgctgttgaatggttaagagcagcagaaacagtaggaaacgatggagttcctgcttttgtgctctcagacccagtcccagacagacaggaagagaaagaaattgctgttcctgcggatgaggagcaaacatcctgtgcattatgtcaagagccatttgaagatttctacagtgatgagactgacgagtggatgtacagaggtgcagtttatatgaatgcaccagatggtaatatcgatggtttggaatggtcacagttgggacctattgtccatgctaaatgtcgatctgggcccggcaatacttcttagggtgggcatagctgggatgatttgatagtttttttttcccgttgcggctgtaggcatgacctgtaaactaatggagactcagattttggtatggttagcttcttttccatctggctcccttaatagccagtgcatagaatgttttttggaacaaaaaggcaggagccagtgcatagaatgtcaatgtgacaatagtgtataactgtaaaatttttgtgtaattcagttgcacagtgctgctttttcattacaactatagtgtgatctatactgaagcttcatgtttagggtttctgcagcacagttgttgacaacggtatatgtatatgtaaccatggtttcactggacatgggaaacaatatatttcaatagtcctgttttcttccgttaatatcttgtgcagaatacatagcagttctctacgttggttggtagctttggaagnn

SEQ ID NO: 13566 - DNA, 2434 bp, Zea Mays
  misc_feature (2433)..(2434): n is a, c, g, or t
tttcagtcagttcgctccgctcccacatgcctcctccgcctccctctcgccgtcccggcatacccaatccctaggcaccccgccgaaaccctagattctcctctcctgctccgatggctggggcagcggcgtcccccgtggcggcccacgtggtggaacggttccgctcgcggctgcgcgaggaagcgggcagcggggagccgggcgcctccgcggtcgtgcgcttgtacgcggaggcgctccgcgagcttaccttcaactgcaagccggtcatcaccgagctcaccatcgtcgcaggccagcacgccgcgctcgccgccgggggaatcgccggcgccgtctgcgcccgcgtcgccgaggtgccacctgatcagatattaccatctttgtatctgctagatagtattgtgaagaacataggtggggaatatgtagagcattttgcaattaggttgcaaagtgtatttgttgatgcatactacagagttcatccaaaccagtatgcttcaatgaggcgcctctttcgtacctggtggccagtgtttccttcttctgtgcttcacagcattgaggatgaccttcaattttcgccctcagagaataaccgtcccaccacatcgacaaatgtgcatcaaacagagtcgttatctcctagaccatctcatggcatacatgtaaatcctaaatacctagaagcacaacataagttcaagcgggtcaatgtggcgcaccagtcagcagctcaggacactaggcaaatgtctgatgtgcaggaggatctgataaatggactaacatcgaatagttcacaaggacggccttcagtgtttcagcatgttgacatttccacaaggagatatccaagcaattttggtgttcagaatggagctcttttggagtaccagaattctgaacatactctaaatcatgggagaattgctaccatgccagctccaccttggcaacagcctattggtcttccattgcgaatacaaggacctgaacatccttcagtacttggtagaataccacagcctgtcgacggtgaaatgccagtcaagaggttggacattagtggcacgtacaatggtttgaatgtagataaacccttggtgaagcataggtcatcacctgctcctgccccgacagaatggctcccccttcaccatgcccaatcacaaactttaccactaattccacctgataccaaacatgttagaagtgcatcagatagtttagaaattagttcttttgttagccatggaggtagttcatcagtatttgttccacggcatcagtatgatgccgtggatcggaaaacaggtaccagtaacttagctcaaccaccatcaccatatcagaaccaagatttgttgccatcaagtcaacaaaatcaaggtacaattttgggaaaccaagctcatcctcatcgtcccctaaagttacatccccatgctcatcctcaccatcaggagacctttagaagctttgcacctggcatgtctgtatctccattccaaggacaaggaggtaatgcaaccatgacaccagtttctgttctgccaacgtctttttctgtacctcctgctgtgccaccctatggcgtgctgtctgcacctgggtttcctatgccaccattaccgcctggaccaccagcacctgtctcactgcagatgggttcatcatcatcacaagttggtggcccccaaccatttgtctctggactgttgagtaaccttatgcggcacggtgtaatttcactggaaccacctagtcaatcccaggattctgttggagttgacttcaatgtagacctcaaggtacggaatgaatctgtcaccaatgctttgtatcaggatcttccaaggcagtgcaaaacttgtggtcttcgatttaaatgccaagaggagcatcgtgctcacatggactggcatgttacaaagaacaggaattcaaagaatcgtaagaaatcttcacgtaaatattttgtcaccgctgttgaatggttaagagcagcagaaacagtaggaaacgatggagttcctgcttttgtgctctcagacccagtcccagacagacaggaagagaaagaaattgctgttcctgcggatgaggagcaaacatcctgtgcattatgtcaagagccatttgaagatttctacagtgatgagactgacgagtggatgtacagaggtgcagtttatatgaatgcaccagatggtaatatcgatggtttggaatggtcacagttgggacctattgtccatgctaaatgtcgatctgggcccggcaatacttcttagggtgggcatagctgggatgatttgatagtttttttttcccgttgcggctgtaggcatgacctgtaaactaatggagactcagattttgaatacatagcagttctctacgttggttggtagctttggaagnn

SEQ ID NO: 13567 - DNA, 3192 bp, Zea Mays
  misc_feature (3191)..(3192): n is a, c, g, or t
tttcagtcagttcgctccgctcccacatgcctcctccgcctccctctcgccgtcccggcatacccaatccctaggcaccccgccgaaaccctagattctcctctcctgctccgatggctggggcagcggcgtcccccgtggcggcccacgtggtggaacggttccgctcgcggctgcgcgaggaagcgggcagcggggagccgggcgcctccgcggtcgtgcgcttgtacgcggaggcgctccgcgagcttaccttcaactgcaagccggtcatcaccgagctcaccatcgtcgcaggccagcacgccgcgctcgccgccgggggaatcgccggcgccgtctgcgcccgcgtcgccgaggtgccacctgatcagatattaccatctttgtatctgctagatagtattgtgaagaacataggtggggaatatgtagagcattttgcaattaggttgcaaagtgtatttgttgatgcatactacagagttcatccaaaccagtatgcttcaatgaggcgcctctttcgtacctggtggccagtgtttccttcttctgtgcttcacagcattgaggatgaccttcaattttcgccctcagagaataaccgtcccaccacatcgacaaatgtgcatcaaacagagtcgttatctcctagaccatctcatggcatacatgtaaatcctaaatacctagaagcacaacataagttcaagcgggtcaatgtggcgcaccagtcagcagctcaggacactaggcaaatgtctgatgtgcaggaggatctgataaatggactaacatcgaatagttcacaaggacggccttcagtgtttcagaaatcttctttacagtatgctgatgatcctggtcaacaagagatgtttcgacctcttgctggagcaataagggcaacatcgccacatctcttgagaacacatgcatctgatgtgaatctagatgggccattagccaattcaaggagaaacttgtccagatcaccacctcttgatgtgttccctaggaatgtttccccaaagagaccactagagaggctaccaccatctcattctgtattgggacctgatcccagaaaattgcctgatcgaaatggcaggttaaggtgggctttggacgatggtgcacagtggcctacaataagtatgcttgatgaagagtacaggaagcaaagtgcaagggaacttattgatgcatatggaaattgtcaaggacgagatgctgatgaacgacttcctaaagtacagcgcctggattcaaatgcatgttgacatttccacaaggagatatccaagcaattttggtgttcagaatggagctcttttggagtaccagaattctgaacatactctaaatcatgggagaattgctaccatgccagctccaccttggcaacagcctattggtcttccattgcgaatacaaggacctgaacatccttcagtacttggtagaataccacagcctgtcgacggtgaaatgccagtcaagaggttggacattagtggcacgtacaatggtttgaatgtagataaacccttggtgaagcataggtcatcacctgctcctgccccgacagaatggctcccccttcaccatgcccaatcacaaactttaccactaattccacctgataccaaacatgttagaagtgcatcagatagtttagaaattagttcttttgttagccatggaggtagttcatcagtatttgttccacggcatcagtatgatgccgtggatcggaaaacaggtaccagtaacttagctcaaccaccatcaccatatcagaaccaagatttgttgccatcaagtcaacaaaatcaaggtacaattttgggaaaccaagctcatcctcatcgtcccctaaagttacatccccatgctcatcctcaccatcaggagacctttagaagctttgcacctggcatgtctgtatctccattccaaggacaaggaggtaatgcaaccatgacaccagtttctgttctgccaacgtctttttctgtacctcctgctgtgccaccctatggcgtgctgtctgcacctgggtttcctatgccaccattaccgcctggaccaccagcacctgtctcactgcagatgggttcatcatcatcacaagttggtggcccccaaccatttgtctctggactgttgagtaaccttatgcggcacggtgtaatttcactggaaccacctagtcaatcccaggattctgttggagttgacttcaatgtagacctcaaggtacggaatgaatctgtcaccaatgctttgtatcaggatcttccaaggcagtgcaaaacttgtggtcttcgatttaaatgccaagaggagcatcgtgctcacatggactggcatgttacaaagaacaggaattcaaagaatcgtaagaaatcttcacgtaaatattttgtcaccgctgttgaatggttaagagcagcagaaacagtaggaaacgatggagttcctgcttttgtgctctcagacccagtcccagacagacaggaagagaaagaaattgctgttcctgcggatgaggagcaaacatcctgtgcattatgtcaagagccatttgaagatttctacagtgatgagactgacgagtggatgtacagaggtgcagtttatatgaatgcaccagatggtaatatcgatggtttggaatggtcacagttgggacctattgtccatgctaaatgtcgatctgggcccggcaatacttcttagggtgggcatagctgggatgatttgatagtttttttttcccgttgcggctgtaggcatgacctgtaaactaatggagactcagattttggtatggttagcttcttttccatctggctcccttaatagccagtgcatagaatgttttttggaacaaaaaggcaggagccagtgcatagaatgtcaatgtgacaatagtgtataactgtaaaatttttgtgtaattcagttgcacagtgctgctttttcattacaactatagtgtgatctatactgaagcttcatgtttagggtttctgcagcacagttgttgacaacggtatatgtatatgtaaccatggtttcactggacatgggaaacaatatatttcaatagtcctgttttcttccgttaatatcttgtgcagaatacatagcagttctctacgttggttggtagctttggaagnn

SEQ ID NO: 13568 - DNA, 3440 bp, Zea Mays
  misc_feature (3439)..(3440): n is a, c, g, or t
tttcagtcagttcgctccgctcccacatgcctcctccgcctccctctcgccgtcccggcatacccaatccctaggcaccccgccgaaaccctagattctcctctcctgctccgatggctggggcagcggcgtcccccgtggcggcccacgtggtggaacggttccgctcgcggctgcgcgaggaagcgggcagcggggagccgggcgcctccgcggtcgtgcgcttgtacgcggaggcgctccgcgagcttaccttcaactgcaagccggtcatcaccgagctcaccatcgtcgcaggccagcacgccgcgctcgccgccgggggaatcgccggcgccgtctgcgcccgcgtcgccgaggtgccacctgatcagatattaccatctttgtatctgctagatagtattgtgaagaacataggtggggaatatgtagagcattttgcaattaggttgcaaagtgtatttgttgatgcatactacagagttcatccaaaccagtatgcttcaatgaggcgcctctttcgtacctggtggccagtgtttccttcttctgtgcttcacagcattgaggatgaccttcaattttcgccctcagagaataaccgtcccaccacatcgacaaatgtgcatcaaacagagtcgttatctcctagaccatctcatggcatacatgtaaatcctaaatacctagaagcacaacataagttcaagcgggtcaatgtggcgcaccagtcagcagctcaggacactaggcaaatgtctgatgtgcaggaggatctgataaatggactaacatcgaatagttcacaaggacggccttcagtgtttcagtatgctgatgatcctggtcaacaagagatgtttcgacctcttgctggagcaataagggcaacatcgccacatctcttgagaacacatgcatctgatgtgaatctagatgggccattagccaattcaaggagaaacttgtccagatcaccacctcttgatgtgttccctaggaatgtttccccaaagagaccactagagaggctaccaccatctcattctgtattgggacctgatcccagaaaattgcctgatcgaaatggcaggttaaggtgggctttggacgatggtgcacagtggcctacaataagtatgcttgatgaagagtacaggaagcaaagtgcaagggaacttattgatgcatatggaaattgtcaaggacgagatgctgatgaacgacttcctaaagtacagcgcctggattcaaatggtatgactagcaaatctggtgcacgaaattggttaacttcagaggaagagtattcatgggaggatatgagtccaactttgactgatcgagtcagaagcagcatgccatcttttcctcctggaaccatgagaattggatttcctggggcaaatgcagggctactggaatctgatgttgggaggcacaatttcctaagccaagctactagatcatcagttgatgtttcaccatttaatattgaagataggatttcagctgcaagtcatgttgacatttccacaaggagatatccaagcaattttggtgttcagaatggagctcttttggagtaccagaattctgaacatactctaaatcatgggagaattgctaccatgccagctccaccttggcaacagcctattggtcttccattgcgaatacaaggacctgaacatccttcagtacttggtagaataccacagcctgtcgacggtgaaatgccagtcaagaggttggacattagtggcacgtacaatggtttgaatgtagataaacccttggtgaagcataggtcatcacctgctcctgccccgacagaatggctcccccttcaccatgcccaatcacaaactttaccactaattccacctgataccaaacatgttagaagtgcatcagatagtttagaaattagttcttttgttagccatggaggtagttcatcagtatttgttccacggcatcagtatgatgccgtggatcggaaaacaggtaccagtaacttagctcaaccaccatcaccatatcagaaccaagatttgttgccatcaagtcaacaaaatcaaggtacaattttgggaaaccaagctcatcctcatcgtcccctaaagttacatccccatgctcatcctcaccatcaggagacctttagaagctttgcacctggcatgtctgtatctccattccaaggacaaggaggtaatgcaaccatgacaccagtttctgttctgccaacgtctttttctgtacctcctgctgtgccaccctatggcgtgctgtctgcacctgggtttcctatgccaccattaccgcctggaccaccagcacctgtctcactgcagatgggttcatcatcatcacaagttggtggcccccaaccatttgtctctggactgttgagtaaccttatgcggcacggtgtaatttcactggaaccacctagtcaatcccaggattctgttggagttgacttcaatgtagacctcaaggtacggaatgaatctgtcaccaatgctttgtatcaggatcttccaaggcagtgcaaaacttgtggtcttcgatttaaatgccaagaggagcatcgtgctcacatggactggcatgttacaaagaacaggaattcaaagaatcgtaagaaatcttcacgtaaatattttgtcaccgctgttgaatggttaagagcagcagaaacagtaggaaacgatggagttcctgcttttgtgctctcagacccagtcccagacagacaggaagagaaagaaattgctgttcctgcggatgaggagcaaacatcctgtgcattatgtcaagagccatttgaagatttctacagtgatgagactgacgagtggatgtacagaggtgcagtttatatgaatgcaccagatggtaatatcgatggtttggaatggtcacagttgggacctattgtccatgctaaatgtcgatctgggcccggcaatacttcttagggtgggcatagctgggatgatttgatagtttttttttcccgttgcggctgtaggcatgacctgtaaactaatggagactcagattttggtatggttagcttcttttccatctggctcccttaatagccagtgcatagaatgttttttggaacaaaaaggcaggagccagtgcatagaatgtcaatgtgacaatagtgtataactgtaaaatttttgtgtaattcagttgcacagtgctgctttttcattacaactatagtgtgatctatactgaagcttcatgtttagggtttctgcagcacagttgttgacaacggtatatgtatatgtaaccatggtttcactggacatgggaaacaatatatttcaatagtcctgttttcttccgttaatatcttgtgcagaatacatagcagttctctacgttggttggtagctttggaagnn

SEQ ID NO: 13569 - DNA, 680 bp, Zea Mays
cccatctctccccgtcggtggacgaacaacaactccggcatgcagggatggtggttgcacccgattcggccacaccaccgggtacttgaacccgcgtccctcgcctctcgccataccttgcaaccttccttgagttctcctatgcttcgtgtgtgtttcaccggtgtgaggggagagattggtgagcgatccgccgccataaaggctctgattcaccgtcgttgcggcgtccggtttgggccggagatcttcgtccggttccaggggcctattccatggcgtcgcgagggtgcatgtgacgatagggatgctgggattgctcgtcggtgtcaagaaccctcgcggagccgccaaaccccgtcgtcggccctcagcaccgatctatcaccggtcaaggacaggtaccctaggatgaggaacatgaaggatggcgtgatgtgttcgtgagaggtctaggtcgtcgtctcccagtcaactttgggttgctggattgttgtcttcgtatgatgtaattatttattattttgtacagaactccattatatagtaatgttgtgacattcgtttttgtaccatgagtcatcatatgtgtaagacttggtcctagcacacttggtggttatttcacgcccgggttttggtgccccaagaactcatgtgtgacaactaatgagactgct

SEQ ID NO: 13570 - DNA, 2447 bp, Zea Mays
ctacctctcccgtcgcacctcgccctctcccttgccctgccccagatctcggcctccagtcctcgctgccgccgcgacttgctcgccccgtctccctccggccctgcctcatcgcggccgtggtggccaaggaacacgagctcattggaaacactcttaaataaagcttcaatgaacaagacaggagctcgacttcgcctagctccgaacaagcggttgacgaggcggaggtctcgcgtcctacggatggcaaccgatagtgaagcctcgaaggcagctgaggttgtggttgactggcataaacaggacagcaagaggatgctccatgcagtttaccgtgttggggatctggaccgcacaatcaagtactacacagaatgctttgggatgaaactgctgaggaaaagggatgttcctgatgagaagtacaccaacgccttccttggctttgggccagagaacaccaactttgcagttgaattgaccaactttgcggaggtctcgcgtcctacgtgcgtcgcgccgttgcctggctccgtcctcgccgttcctctgtagaagctggccgctgacccccgccgtggtggccgtcgcgccgttttttattagatgaagaatgaatcaacccttgtagaagctaaagatagaagataacactactctgtttttgaatgtctgaagtgtaattttgcagccttgcaactataaaacaaacaatgtatggctaaattattgcagttgcacagtgtgaagatttaaaattgaagtgctatgaagagatggataagaggaagaaactttataatattgttcaagagacaaaaggaaattatcagggttttttgtcgatgccgacccttaagcaaaaatgaggtgtcatcaggcctgaatgcaaatggcggaacaactaaaaagacatttaagtttgatagagtattcacgccgaaggatgatcaaggtgtgggcgtctccggcggcccgactatacgaagcgagggcgtatcggggctaaggacacgaaaggccaagcgcaaagggcgtacggcagtaagcccgcctgcaccgcaccagaccgccacccgcgacgtgcccatgtcatgacgccacggtggcggcacgctgacccatcgacgtcaccctcttcctcgcttccgctcgacagcctccagtttcctggtcagtcttcgtgccgcctctctaccacacaccgtctctcagagatggaatcaccacccctcacggttgaagcgaccgcttttaccgagaaaatgatggacatgactttggaggatataatcaagatgtgaaagaaaaagaatcctggaggcaagaaaccccctaggcggccggtaaactctaagtctgaaggtttagggttttcatgctctcgactctgatagctaactcaggaacgaaccaatggtaacaattttcttcatttaatggtggattaaatgaaactatcttcggtctttggtacttgctcaacatctacaataagtaggtcagtggaacatatgtcctgtcaccgttagattgggcgatcgaaccatgaactgatattcaatgtaaaatattcagtgtgatagaaaaaagaagattagtcgagtatgatctttatttcaatctgccaatgctcttggtaattccagtttgcctaatagtcaacttgtttttttgtaatgttcgagcattcgctgaaattactgatcgtattcaaaattgttgctaaattgacgattaacccttgtttccatggatagcgagaggtgtgacgtggtatgtttatagctattgtgcagtatacaccttgcttacaggttgccacaactccgccggttggatccactaaacttccaatgtgtcctgtttgcattggtgtgcttacagttttgtatttttgtttcttagggcccacgccaccatgatgtcacatttcaattcattttgtgacctctgatgaagagatttaaacacatctgttctatcctatccatagttttaacttcaaatattgttctatttaatgccacaacaacatatatctttactatgtcatattatatatgattttgttggcttacaacctctcgatagggcgcccgaatgggcgcctcatgttctagttatatttatgacgtatcttatataattttccctccgtaatccatgcagcgtgtcaatggatgtttgcaaagacaacagatgccaatgcagactggcttcttcctaacaacaaacctcaacaagccaagagagacgacaattggcgacgtaggaaaaaagacgcattaatcaataacgtgtggattcctggcagtggcgtagacaaggggctctaaggtttgtacaaacatataaatacatattaattactactattttttaaatagttaagtatataaaaacagtgactgattcaataaagatttgttatttcttttgtt

SEQ ID NO: 13571 - DNA, 2763 bp, Zea Mays
ctacctctcccgtcgcacctcgccctctcccttgccctgccccagatctcggcctccagtcctcgctgccgccgcgacttgctcgccccgtctccctccggccctgcctcatcgcggccgtggtggccaaggaacacgagctcattggaaacactcttaaataaagcttcaatgaacaagacaggagctcgacttcgcctagctccgaacaagcggttgacgaggcggaggtctcgcgtcctacgtgcgtcgcgccgttgcctggctccgtcctcgccgttcctctgtagaagctggccgctgacccccgcccgcctccgcttggccgtctggccgccccccgcgtggtcacctagatggctggccgcgcccctagatttgggttcctaccttgttaggacttccatcttcgttcattttgctgtgtgtccgtcggatagatgactaatgcatcctcaaagttctccaaggcggagccttgcatctttgtgtgtttgatttggttgagctgcaacccgtgctgctgtccttttcagtataaaaaaagatttagatgtaggttggcattcggatgaaaaatggaccgtgaaaaaaaaggaggtccattcaccttgtgttctgtcatttgagcacggatcctttagtgtataggaaagcgtgatatttctgataatcttctgcttttcagagaaaagctttgagtaattgagatgtatattcctctattgaaagaaaaagaggggttttcaagcaatatgaaagcttgatgctttcgttcttcgttttatttaagatcactttcctcccttgttcttatgaaatgtgcaactctttaatcagggatggcaaccgatagtgaagcctcgaaggcagctgaggttgtggttgactggcataaacaggacagcaagaggatgctccatgcagtttaccgtgttggggatctggaccgcacaatcaagtactacacagaatgctttgggatgaaactgctgaggaaaagggatgttcctgatgagaagtacaccaacgccttccttggctttgggccagagaacaccaactttgcagttgaattgaccaactttgcggaggtctcgcgtcctacgtgcgtcgcgccgttgcctggctccgtcctcgccgttcctctgtagaagctggccgctgacccccgccgtggtggccgtcgcgccgttttttattagatgaagaatgaatcaacccttgtagaagctaaagatagaagataacactactctgtttttgaatgtctgaagtgtaattttgcagccttgcaactataaaacaaacaatgtatggctaaattattgcagttgcacagtgtgaagatttaaaattgaagtgctatgaagagatggataagaggaagaaactttataatattgttcaagagacaaaaggaaattatcagggttttttgtcgatgccgacccttaagcaaaaatgaggtgtcatcaggcctgaatgcaaatggcggaacaactaaaaagacatttaagtttgatagagtattcacgccgaaggatgatcaaggtgtgggcgtctccggcggcccgactatacgaagcgagggcgtatcggggctaaggacacgaaaggccaagcgcaaagggcgtacggcagtaagcccgcctgcaccgcaccagaccgccacccgcgacgtgcccatgtcatgacgccacggtggcggcacgctgacccatcgacgtcaccctcttcctcgcttccgctcgacagcctccagtttcctggtcagtcttcgtgccgcctctctaccacacaccgtctctcagagatggaatcaccacccctcacggttgaagcgaccgcttttaccgagaaaatgatggacatgactttggaggatataatcaagatgtgaaagaaaaagaatcctggaggcaagaaaccccctaggcggccggtaaactctaaggtctataactctggatgtgtggtggtgttgaaattagttttgtgtataactgttccaacttcaaatagcttcgttttaggtgctatgtttgggaataaattttccagttaaaagtacatgacgtccacgatggactttcttggttttccaaggctcagttacttgctgcgatatattcctttggtgaagttttgccgtgcaccatgtgtgtatcttcaagattaaactaaattttgcattattcatcggttttcttaattcttgtagttgaatagctttaacctgaaacaatacaccagtcgctttcgctgttgtttactttggtggatagtttctattgggaagtgatttgacaccagcaaaggcatttacttctcttttttatttgtagtctgaaggtttagggttttcatgctctcgactctgatagctaactcaggaacgaaccaatggtaacaattttcttcatttaatggtggattaaatgaaactatcttcggtctttggtacttgctcaacatctacaataagtagcgtgtcaatggatgtttgcaaagacaacagatgccaatgcagactggcttcttcctaacaacaaacctcaacaagccaagagagacgacaattggcgacgtaggaaaaaagacgcattaatcaataacgtgtggattcctggcagtggcgtagacaaggggctctaaggtttgtacaaacatataaatacatattaattactactattttttaaatagttaagtatataaaaacagtgactgattcaataaagatttgttatttcttttgtt

SEQ ID NO: 13572 - DNA, 3043 bp, Zea Mays
ctacctctcccgtcgcacctcgccctctcccttgccctgccccagatctcggcctccagtcctcgctgccgccgcgacttgctcgccccgtctccctccggccctgcctcatcgcggccgtggtggccaaggaacacgagctcattggaaacactcttaaataaagcttcaatgaacaagacaggagctcgacttcgcctagctccgaacaagcggttgacgaggcggaggtctcgcgtcctacgtgcgtcgcgccgttgcctggctccgtcctcgccgttcctctgtagaagctggccgctgacccccgcccgcctccgcttggccgtctggccgccccccgcgtggtcacctagatggctggccgcgcccctagatttgggttcctaccttgttaggacttccatcttcgttcattttgctgtgtgtccgtcggatagatgactaatgcatcctcaaagttctccaaggcggagccttgcatctttgtgtgtttgatttggttgagctgcaacccgtgctgctgtccttttcagtataaaaaaagatttagatgtaggttggcattcggatgaaaaatggaccgtgaaaaaaaaggaggtccattcaccttgtgttctgtcatttgagcacggatcctttagtgtataggaaagcgtgatatttctgataatcttctgcttttcagagaaaagctttgagtaattgagatgtatattcctctattgaaagaaaaagaggggttttcaagcaatatgaaagcttgatgctttcgttcttcgttttatttaagatcactttcctcccttgttcttatgaaatgtgcaactctttaatcagggatggcaaccgatagtgaagcctcgaaggcagctgaggttgtggttgactggcataaacaggacagcaagaggatgctccatgcagtttaccgtgttggggatctggaccgcacaatcaagtactacacagaatgctttgggatgaaactgctgaggaaaagggatgttcctgatgagaagtacaccaacgccttccttggctttgggccagagaacaccaactttgcagttgaattgaccaactttgcggaggtctcgcgtcctacgtgcgtcgcgccgttgcctggctccgtcctcgccgttcctctgtagaagctggccgctgacccccgccgtggtggccgtcgcgccgttttttattagatgaagaatgaatcaacccttgtagaagctaaagatagaagataacactactctgtttttgaatgtctgaagtgtaattttgcagccttgcaactataaaacaaacaatgtatggctaaattattgcagttgcacagtgtgaagatttaaaattgaagtgctatgaagagatggataagaggaagaaactttataatattgttcaagagacaaaaggaaattatcagggttttttgtcgatgccgacccttaagcaaaaatgaggtgtcatcaggcctgaatgcaaatggcggaacaactaaaaagacatttaagtttgatagagtattcacgccgaaggatgatcaaggtgtgggcgtctccggcggcccgactatacgaagcgagggcgtatcggggctaaggacacgaaaggccaagcgcaaagggcgtacggcagtaagcccgcctgcaccgcaccagaccgccacccgcgacgtgcccatgtcatgacgccacggtggcggcacgctgacccatcgacgtcaccctcttcctcgcttccgctcgacagcctccagtttcctggtcagtcttcgtgccgcctctctaccacacaccgtctctcagagatggaatcaccacccctcacggttgaagcgaccgcttttaccgagaaaatgatggacatgactttggaggatataatcaagatgtgaaagaaaaagaatcctggaggcaagaaaccccctaggcggccggtaaactctaagtctgaaggtttagggttttcatgctctcgactctgatagctaactcaggaacgaaccaatggtaacaattttcttcatttaatggtggattaaatgaaactatcttcggtctttggtacttgctcaacatctacaataagtaggtcagtggaacatatgtcctgtcaccgttagattgggcgatcgaaccatgaactgatattcaatgtaaaatattcagtgtgatagaaaaaagaagattagtcgagtatgatctttatttcaatctgccaatgctcttggtaattccagtttgcctaatagtcaacttgtttttttgtaatgttcgagcattcgctgaaattactgatcgtattcaaaattgttgctaaattgacgattaacccttgtttccatggatagcgagaggtgtgacgtggtatgtttatagctattgtgcagtatacaccttgcttacaggttgccacaactccgccggttggatccactaaacttccaatgtgtcctgtttgcattggtgtgcttacagttttgtatttttgtttcttagggcccacgccaccatgatgtcacatttcaattcattttgtgacctctgatgaagagatttaaacacatctgttctatcctatccatagttttaacttcaaatattgttctatttaatgccacaacaacatatatctttactatgtcatattatatatgattttgttggcttacaacctctcgatagggcgcccgaatgggcgcctcatgttctagttatatttatgacgtatcttatataattttccctccgtaatccatgcagcgtgtcaatggatgtttgcaaagacaacagatgccaatgcagactggcttcttcctaacaacaaacctcaacaagccaagagagacgacaattggcgacgtaggaaaaaagacgcattaatcaataacgtgtggattcctggcagtggcgtagacaaggggctctaaggtttgtacaaacatataaatacatattaattactactattttttaaatagttaagtatataaaaacagtgactgattcaataaagatttgttatttcttttgtt

SEQ ID NO: 13573 - DNA, 3003 bp, Zea Mays
ctacctctcccgtcgcacctcgccctctcccttgccctgccccagatctcggcctccagtcctcgctgccgccgcgacttgctcgccccgtctccctccggccctgcctcatcgcggccgtggtggccaaggaacacgagctcattggaaacactcttaaataaagcttcaatgaacaagacaggagctcgacttcgcctagctccgaacaagcggttgacgaggcggaggtctcgcgtcctacgtgcgtcgcgccgttgcctggctccgtcctcgccgttcctctgtagaagctggccgctgacccccgcccgcctccgcttggccgtctggccgccccccgcgtggtcacctagatggctggccgcgcccctagatttgggttcctaccttgttaggacttccatcttcgttcattttgctgtgtgtccgtcggatagatgactaatgcatcctcaaagttctccaaggcggagccttgcatctttgtgtgtttgatttggttgagctgcaacccgtgctgctgtccttttcagtataaaaaaagatttagatgtaggttggcattcggatgaaaaatggaccgtgaaaaaaaaggaggtccattcaccttgtgttctgtcatttgagcacggatcctttagtgtataggaaagcgtgatatttctgataatcttctgcttttcagagaaaagctttgagtaattgagatgtatattcctctattgaaagaaaaagaggggttttcaagcaatatgaaagcttgatgctttcgttcttcgttttatttaagatcactttcctcccttgttcttatgaaatgtgcaactctttaatcagggatggcaaccgatagtgaagcctcgaaggcagctgaggttgtggttgactggcataaacaggacagcaagaggatgctccatgcagtttaccgtgttggggatctggaccgcacaatcaagtactacacagaatgctttgggatgaaactgctgaggaaaagggatgttcctgatgagaagtacaccaacgccttccttggctttgggccagagaacaccaactttgcagttgaattgaccaactttgcggaggtctcgcgtcctacgtgcgtcgcgccgttgcctggctccgtcctcgccgttcctctgtagaagctggccgctgacccccgccgtggtggccgtcgcgccgttttttattagatgaagaatgaatcaacccttgtagaagctaaagatagaagataacactactctgtttttgaatgtctgaagtgtaattttgcagccttgcaactataaaacaaacaatgtatggctaaattattgcagttgcacagtgtgaagatttaaaattgaagtgctatgaagagatggataagaggaagaaactttataatattgttcaagagacaaaaggaaattatcagggttttttgtcgatgccgacccttaagcaaaaatgaggtgtcatcaggcctgaatgcaaatggcggaacaactaaaaagacatttaagtttgatagagtattcacgccgaaggatgatcaaggtgtgggcgtctccggcggcccgactatacgaagcgagggcgtatcggggctaaggacacgaaaggccaagcgcaaagggcgtacggcagtaagcccgcctgcaccgcaccagaccgccacccgcgacgtgcccatgtcatgacgccacggtggcggcacgctgacccatcgacgtcaccctcttcctcgcttccgctcgacagcctccagtttcctggtcagtcttcgtgccgcctctctaccacacaccgtctctcagagatggaatcaccacccctcacggttgaagcgaccgcttttaccgagaaaatgatggacatgactttggaggatataatcaagatgtgaaagaaaaagaatcctggaggcaagaaaccccctaggcggccggtaaactctaaggtctataactctggatgtgtggtggtgttgaaattagttttgtgtataactgttccaacttcaaatagcttcgttttaggtgctatgtttgggaataaattttccagttaaaagtacatgacgtccacgatggactttcttggttttccaaggctcagttacttgctgcgatatattcctttggtgaagttttgccgtgcaccatgtgtgtatcttcaagattaaactaaattttgcattattcatcggttttcttaattcttgtagttgaatagctttaacctgaaacaatacaccagtcgctttcgctgttgtttactttggtggatagtttctattgggaagtgatttgacaccagcaaaggcatttacttctcttttttatttgtagtctgaaggtttagggttttcatgctctcgactctgatagctaactcaggaacgaaccaatggtaacaattttcttcatttaatggtggattaaatgaaactatcttcggtctttggtacttgctcaacatctacaataagtaggtcagtggaacatatgtcctgtcaccgttagattgggcgatcgaaccatggtacatcagtcaccttctttaatgatttttttgttctacttactaatctgctgctttactcttccctggtgtttgtactgacctttttaggaaatcttgcagaactgatattcaatgtaaaatattcagtgtgatagaaaaaagaagattagtcgagtatgatctttatttcaatctgccaatgctcttgcgtgtcaatggatgtttgcaaagacaacagatgccaatgcagactggcttcttcctaacaacaaacctcaacaagccaagagagacgacaattggcgacgtaggaaaaaagacgcattaatcaataacgtgtggattcctggcagtggcgtagacaaggggctctaaggtttgtacaaacatataaatacatattaattactactattttttaaatagttaagtatataaaaacagtgactgattcaataaagatttgttatttcttttgtt

SEQ ID NO: 13574 - DNA, 2422 bp, Zea Mays
ctacctctcccgtcgcacctcgccctctcccttgccctgccccagatctcggcctccagtcctcgctgccgccgcgacttgctcgccccgtctccctccggccctgcctcatcgcggccgtggtggccaaggaacacgagctcattggaaacactcttaaataaagcttcaatgaacaagacaggagctcgacttcgcctagctccgaacaagcggttgacgaggcggaggtctcgcgtcctacgtgcgtcgcgccgttgcctggctccgtcctcgccgttcctctgtagaagctggccgctgacccccgcccgcctccgcttggccgtctggccgccccccgcgtggtcacctagatggctggccgcgcccctagatttgggttcctaccttgttaggacttccatcttcgttcattttgctgtgtgtccgtcggatagatgactaatgcatcctcaaagttctccaaggcggagccttgcatctttgtgtgtttgatttggttgagctgcaacccgtgctgctgtccttttcagtataaaaaaagatttagatgtaggttggcattcggatgaaaaatggaccgtgaaaaaaaaggaggtccattcaccttgtgttctgtcatttgagcacggatcctttagtgtataggaaagcgtgatatttctgataatcttctgcttttcagagaaaagctttgagtaattgagatgtatattcctctattgaaagaaaaagaggggttttcaagcaatatgaaagcttgatgctttcgttcttcgttttatttaagatcactttcctcccttgttcttatgaaatgtgcaactctttaatcagggatggcaaccgatagtgaagcctcgaaggcagctgaggttgtggttgactggcataaacaggacagcaagaggatgctccatgcagtttaccgtgttggggatctggaccgcacaatcaagtactacacagaatgctttgggatgaaactgctgaggaaaagggatgttcctgatgagaagtacaccaacgccttccttggctttgggccagagaacaccaactttgcagttgaattgaccaactttgcggaggtctcgcgtcctacgtgcgtcgcgccgttgcctggctccgtcctcgccgttcctctgtagaagctggccgctgacccccgccgtggtggccgtcgcgccgttttttattagatgaagaatgaatcaacccttgtagaagctaaagatagaagataacactactctgtttttgaatgtctgaagtgtaattttgcagccttgcaactataaaacaaacaatgtatggctaaattattgcagttgcacagtgtgaagatttaaaattgaagtgctatgaagagatggataagaggaagaaactttataatattgttcaagagacaaaaggaaattatcagggttttttgtcgatgccgacccttaagcaaaaatgaggtgtcatcaggcctgaatgcaaatggcggaacaactaaaaagacatttaagtttgatagagtattcacgccgaaggatgatcaaggtgtgggcgtctccggcggcccgactatacgaagcgagggcgtatcggggctaaggacacgaaaggccaagcgcaaagggcgtacggcagtaagcccgcctgcaccgcaccagaccgccacccgcgacgtgcccatgtcatgacgccacggtggcggcacgctgacccatcgacgtcaccctcttcctcgcttccgctcgacagcctccagtttcctggtcagtcttcgtgccgcctctctaccacacaccgtctctcagagatggaatcaccacccctcacggttgaagcgaccgcttttaccgagaaaatgatggacatgactttggaggatataatcaagatgtgaaagaaaaagaatcctggaggcaagaaaccccctaggcggccggtaaactctaagtctgaaggtttagggttttcatgctctcgactctgatagctaactcaggaacgaaccaatggtaacaattttcttcatttaatggtggattaaatgaaactatcttcggtctttggtacttgctcaacatctacaataagtaggtcagtggaacatatgtcctgtcaccgttagattgggcgatcgaaccatgcgtgtcaatggatgtttgcaaagacaacagatgccaatgcagactggcttcttcctaacaacaaacctcaacaagccaagagagacgacaattggcgacgtaggaaaaaagacgcattaatcaataacgtgtggattcctggcagtggcgtagacaaggggctctaaggtttgtacaaacatataaatacatattaattactactattttttaaatagttaagtatataaaaacagtgactgattcaataaagatttgttatttcttttgtt

SEQ ID NO: 13575 - DNA, 2442 bp, Zea Mays
ctacctctcccgtcgcacctcgccctctcccttgccctgccccagatctcggcctccagtcctcgctgccgccgcgacttgctcgccccgtctccctccggccctgcctcatcgcggccgtggtggccaaggaacacgagctcattggaaacactcttaaataaagcttcaatgaacaagacaggagctcgacttcgcctagctccgaacaagcggttgacgaggcggaggtctcgcgtcctacgtgcgtcgcgccgttgcctggctccgtcctcgccgttcctctgtagaagctggccgctgacccccgcccgcctccgcttggccgtctggccgccccccgcgtggtcacctagatggctggccgcgcccctagatttgggttcctaccttgttaggacttccatcttcgttcattttgctgtgtgtccgtcggatagatgactaatgcatcctcaaagttctccaaggcggagccttgcatctttgtgtgtttgatttggttgagctgcaacccgtgctgctgtccttttcagtataaaaaaagatttagatgtaggttggcattcggatgaaaaatggaccgtgaaaaaaaaggaggtccattcaccttgtgttctgtcatttgagcacggatcctttagtgtataggaaagcgtgatatttctgataatcttctgcttttcagagaaaagctttgagtaattgagatgtatattcctctattgaaagaaaaagaggggttttcaagcaatatgaaagcttgatgctttcgttcttcgttttatttaagatcactttcctcccttgttcttatgaaatgtgcaactctttaatcagggatggcaaccgatagtgaagcctcgaaggcagctgaggttgtggttgactggcataaacaggacagcaagaggatgctccatgcagtttaccgtgttggggatctggaccgcacaatcaagtactacacagaatgctttgggatgaaactgctgaggaaaagggatgttcctgatgagaagtacaccaacgccttccttggctttgggccagagaacaccaactttgcagttgaattgaccaactttgcggaggtctcgcgtcctacttgcacagtgtgaagatttaaaattgaagtgctatgaagagatggataagaggaagaaactttataatattgttcaagagacaaaaggaaattatcagggttttttgtcgatgccgacccttaagcaaaaatgaggtgtcatcaggcctgaatgcaaatggcggaacaactaaaaagacatttaagtttgatagagtattcacgccgaaggatgatcaaggtgtgggcgtctccggcggcccgactatacgaagcgagggcgtatcggggctaaggacacgaaaggccaagcgcaaagggcgtacggcagtaagcccgcctgcaccgcaccagaccgccacccgcgacgtgcccatgtcatgacgccacggtggcggcacgctgacccatcgacgtcaccctcttcctcgcttccgctcgacagcctccagtttcctggtcagtcttcgtgccgcctctctaccacacaccgtctctcagagatggaatcaccacccctcacggttgaagcgaccgcttttaccgagaaaatgatggacatgactttggaggatataatcaagatgtgaaagaaaaagaatcctggaggcaagaaaccccctaggcggccggtaaactctaagtctgaaggtttagggttttcatgctctcgactctgatagctaactcaggtatgtacaacattatcttattttcctattattaaattatctataaagctgctaggaaattacgcaacatttatatttctatatagagtagcttcttatgtccttaattgtaattagttatttaatttgatgattaccatcttgtaatatttgtataggaacgaaccaatggtaacaattttcttcatttaatggtggattaaatgaaactatcttcggtctttggtacttgctcaacatctacaataagtaggtcagtggaacatatgtcctgtcaccgttagattgggcgatcgaaccatgaactgatattcaatgtaaaatattcagtgtgatagaaaaaagaagattagtcgagtatgatctttatttcaatctgccaatgctcttgcgtgtcaatggatgtttgcaaagacaacagatgccaatgcagactggcttcttcctaacaacaaacctcaacaagccaagagagacgacaattggcgacgtaggaaaaaagacgcattaatcaataacgtgtggattcctggcagtggcgtagacaaggggctctaaggtttgtacaaacatataaatacatattaattactactattttttaaatagttaagtatataaaaacagtgactgattcaataaagatttgttatttcttttgtt

SEQ ID NO: 13576 - DNA, 1914 bp, Zea Mays
ctacctctcccgtcgcacctcgccctctcccttgccctgccccagatctcggcctccagtcctcgctgccgccgcgacttgctcgccccgtctccctccggccctgcctcatcgcggccgtggtggccaaggaacacgagctcattggaaacactcttaaataaagcttcaatgaacaagacaggagctcgacttcgcctagctccgaacaagcggttgacgaggcggaggtctcgcgtcctacggatggcaaccgatagtgaagcctcgaaggcagctgaggttgtggttgactggcataaacaggacagcaagaggatgctccatgcagtttaccgtgttggggatctggaccgcacaatcaagtactacacagaatgctttgggatgaaactgctgaggaaaagggatgttcctgatgagaagtacaccaacgccttccttggctttgggccagagaacaccaactttgcagttgaattgaccaactttgcggaggtctcgcgtcctacgtgcgtcgcgccgttgcctggctccgtcctcgccgttcctctgtagaagctggccgctgacccccgccgtggtggccgtcgcgccgttttttattagatgaagaatgaatcaacccttgtagaagctaaagatagaagataacactactctgtttttgaatgtctgaagtgtaattttgcagccttgcaactataaaacaaacaatgtatggctaaattattgcagttgcacagtgtgaagatttaaaattgaagtgctatgaagagatggataagaggaagaaactttataatattgttcaagagacaaaaggaaattatcagggttttttgtcgatgccgacccttaagcaaaaatgaggtgtcatcaggcctgaatgcaaatggcggaacaactaaaaagacatttaagtttgatagagtattcacgccgaaggatgatcaaggtgtgggcgtctccggcggcccgactatacgaagcgagggcgtatcggggctaaggacacgaaaggccaagcgcaaagggcgtacggcagtaagcccgcctgcaccgcaccagaccgccacccgcgacgtgcccatgtcatgacgccacggtggcggcacgctgacccatcgacgtcaccctcttcctcgcttccgctcgacagcctccagtttcctggtcagtcttcgtgccgcctctctaccacacaccgtctctcagagatggaatcaccacccctcacggttgaagcgaccgcttttaccgagaaaatgatggacatgactttggaggatataatcaagatgtgaaagaaaaagaatcctggaggcaagaaaccccctaggcggccggtaaactctaagtctgaaggtttagggttttcatgctctcgactctgatagctaactcaggaacgaaccaatggtaacaattttcttcatttaatggtggattaaatgaaactatcttcggtctttggtacttgctcaacatctacaataagtaggtcagtggaacatatgtcctgtcaccgttagattgggcgatcgaaccatgaactgatattcaatgtaaaatattcagtgtgatagaaaaaagaagattagtcgagtatgatctttatttcaatctgccaatgctcttgcgtgtcaatggatgtttgcaaagacaacagatgccaatgcagactggcttcttcctaacaacaaacctcaacaagccaagagagacgacaattggcgacgtaggaaaaaagacgcattaatcaataacgtgtggattcctggcagtggcgtagacaaggggctctaaggtttgtacaaacatataaatacatattaattactactattttttaaatagttaagtatataaaaacagtgactgattcaataaagatttgttatttcttttgtt

SEQ ID NO: 13577 - DNA, 2558 bp, Zea Mays
ctacctctcccgtcgcacctcgccctctcccttgccctgccccagatctcggcctccagtcctcgctgccgccgcgacttgctcgccccgtctccctccggccctgcctcatcgcggccgtggtggccaaggaacacgagctcattggaaacactcttaaataaagcttcaatgaacaagacaggagctcgacttcgcctagctccgaacaagcggttgacgaggcggaggtctcgcgtcctacgtgcgtcgcgccgttgcctggctccgtcctcgccgttcctctgtagaagctggccgctgacccccgcccgcctccgcttggccgtctggccgccccccgcgtggtcacctagatggctggccgcgcccctagatttgggttcctaccttgttaggacttccatcttcgttcattttgctgtgtgtccgtcggatagatgactaatgcatcctcaaagttctccaaggcggagccttgcatctttgtgtgtttgatttggttgagctgcaacccgtgctgctgtccttttcagtataaaaaaagatttagatgtaggttggcattcggatgaaaaatggaccgtgaaaaaaaaggaggtccattcaccttgtgttctgtcatttgagcacggatcctttagtgtataggaaagcgtgatatttctgataatcttctgcttttcagagaaaagctttgagtaattgagatgtatattcctctattgaaagaaaaagaggggttttcaagcaatatgaaagcttgatgctttcgttcttcgttttatttaagatcactttcctcccttgttcttatgaaatgtgcaactctttaatcagggatggcaaccgatagtgaagcctcgaaggcagctgaggttgtggttgactggcataaacaggacagcaagaggatgctccatgcagtttaccgtgttggggatctggaccgcacaatcaagtactacacagaatgctttgggatgaaactgctgaggaaaagggatgttcctgatgagaagtacaccaacgccttccttggctttgggccagagaacaccaactttgcagttgaattgaccaactttgcggaggtctcgcgtcctacgtgcgtcgcgccgttgcctggctccgtcctcgccgttcctctgtagaagctggccgctgacccccgccgtggtggccgtcgcgccgttttttattagatgaagaatgaatcaacccttgtagaagctaaagatagaagataacactactctgtttttgaatgtctgaagtgtaattttgcagccttgcaactataaaacaaacaatgtatggctaaattattgcagttgcacagtgtgaagatttaaaattgaagtgctatgaagagatggataagaggaagaaactttataatattgttcaagagacaaaaggaaattatcagggttttttgtcgatgccgacccttaagcaaaaatgaggtgtcatcaggcctgaatgcaaatggcggaacaactaaaaagacatttaagtttgatagagtattcacgccgaaggatgatcaaggtgtgggcgtctccggcggcccgactatacgaagcgagggcgtatcggggctaaggacacgaaaggccaagcgcaaagggcgtacggcagtaagcccgcctgcaccgcaccagaccgccacccgcgacgtgcccatgtcatgacgccacggtggcggcacgctgacccatcgacgtcaccctcttcctcgcttccgctcgacagcctccagtttcctgagatggaatcaccacccctcacggttgaagcgaccgcttttaccgagaaaatgatggacatgactttggaggatataatcaagatgtgaaagaaaaagaatcctggaggcaagaaaccccctaggcggccgtctgaaggtttagggttttcatgctctcgactctgatagctaactcaggaacgaaccaatggtaacaattttcttcatttaatggtggattaaatgaaactatcttcggtctttggtacttgctcaacatctacaataagtaggtcagtggaacatatgtcctgtcaccgttagattgggcgatcgaaccatggtacatcagtcaccttctttaatgatttttttgttctacttactaatctgctgctttactcttccctggtgtttgtactgacctttttaggaaatcttgcagaactgatattcaatgtaaaatattcagtgtgatagaaaaaagaagattagtcgagtatgatctttatttcaatctgccaatgctcttgcgtgtcaatggatgtttgcaaagacaacagatgccaatgcagactggcttcttcctaacaacaaacctcaacaagccaagagagacgacaattggcgacgtaggaaaaaagacgcattaatcaataacgtgtggattcctggcagtggcgtagacaaggggctctaaggtttgtacaaacatataaatacatattaattactactattttttaaatagttaagtatataaaaacagtgactgattcaataaagatttgttatttcttttgtt

SEQ ID NO: 13578 - DNA, 2696 bp, Zea Mays
ctacctctcccgtcgcacctcgccctctcccttgccctgccccagatctcggcctccagtcctcgctgccgccgcgacttgctcgccccgtctccctccggccctgcctcatcgcggccgtggtggccaaggaacacgagctcattggaaacactcttaaataaagcttcaatgaacaagacaggagctcgacttcgcctagctccgaacaagcggttgacgaggcggaggtctcgcgtcctacggatggcaaccgatagtgaagcctcgaaggcagctgaggttgtggttgactggcataaacaggacagcaagaggatgctccatgcagtttaccgtgttggggatctggaccgcacaatcaaaatgctttgggatgaaactgctgaggaaaagggatgttcctgatgagaagtacaccaacgccttccttggctttgggccagagaacaccaactttgcagttgaattgaccaactttgcggaggtctcgcgtcctacgtgcgtcgcgccgttgcctggctccgtcctcgccgttcctctgtagaagctggccgctgacccccgccgtggtggccgtcgcgccgttttttattagatgaagaatgaatcaacccttgtagaagctaaagatagaagataacactactctgtttttgaatgtctgaagtgtaattttgcagccttgcaactataaaacaaacaatgtatggctaaattattgcagttgcacagtgtgaagatttaaaattgaagtgctatgaagagatggataagaggaagaaactttataatattgttcaagagacaaaaggaaattatcagggttttttgtcgatgccgacccttaagcaaaaatgaggtgtcatcaggcctgaatgcaaatggcggaacaactaaaaagacatttaagtttgatagagtattcacgccgaaggatgatcaaggtgtgggcgtctccggcggcccgactatacgaagcgagggcgtatcggggctaaggacacgaaaggccaagcgcaaagggcgtacggcagtaagcccgcctgcaccgcaccagaccgccacccgcgacgtgcccatgtcatgacgccacggtggcggcacgctgacccatcgacgtcaccctcttcctcgcttccgctcgacagcctccagtttcctggtcagtcttcgtgccgcctctctaccacacaccgtctctcagagatggaatcaccacccctcacggttgaagcgaccgcttttaccgagaaaatgatggacatgactttggaggatataatcaagatgtgaaagaaaaagaatcctggaggcaagaaaccccctaggcggccggtaaactctaagtctgaaggtttagggttttcatgctctcgactctgatagctaactcaggtatgtacaacattatcttattttcctattattaaattatctataaagctgctaggaaattacgcaacatttatatttctatatagagtagcttcttatgtccttaattgtaattagttatttaatttgatgattaccatcttgtaatatttgtataggaacgaaccaatggtaacaattttcttcatttaatggtggattaaatgaaactatcttcggtctttggtacttgctcaacatctacaataagtaggtcagtggaacatatgtcctgtcaccgttagattgggcgatcgaaccatggtacatcagtcaccttctttaatgatttttttgttctacttactaatctgctgctttactcttccctggtgtttgtactgacctttttaggaaatcttgcagaactgatattcaatgtaaaatattcagtgtgatagaaaaaagaagattagtcgagtatgatctttatttcaatctgccaatgctcttggtaattccagtttgcctaatagtcaacttgtttttttgtaatgttcgagcattcgctgaaattactgatcgtattcaaaattgttgctaaattgacgattaacccttgtttccatggatagcgagaggtgtgacgtggtatgtttatagctattgtgcagtatacaccttgcttacaggttgccacaactccgccggttggatccactaaacttccaatgtgtcctgtttgcattggtgtgcttacagttttgtatttttgtttcttagggcccacgccaccatgatgtcacatttcaattcattttgtgacctctgatgaagagatttaaacacatctgttctatcctatccatagttttaacttcaaatattgttctatttaatgccacaacaacatatatctttactatgtcatattatatatgattttgttggcttacaacctctcgatagggcgcccgaatgggcgcctcatgttctagttatatttatgacgtatcttatataattttccctccgtaatccatgcagcgtgtcaatggatgtttgcaaagacaacagatgccaatgcagactggcttcttcctaacaacaaacctcaacaagccaagagagacgacaattggcgacgtaggaaaaaagacgcattaatcaataacgtgtggattcctggcagtggcgtagacaaggggctctaaggtttgtacaaacatataaatacatattaattactactattttttaaatagttaagtatataaaaacagtgactgattcaataaagatttgttatttcttttgtt

SEQ ID NO: 13579 - DNA, 1900 bp, Zea Mays
ctacctctcccgtcgcacctcgccctctcccttgccctgccccagatctcggcctccagtcctcgctgccgccgcgacttgctcgccccgtctccctccggccctgcctcatcgcggccgtggtggccaaggaacacgagctcattggaaacactcttaaataaagcttcaatgaacaagacaggagctcgacttcgcctagctccgaacaagcggttgacgaggcggagggatggcaaccgatagtgaagcctcgaaggcagctgaggttgtggttgactggcataaacaggacagcaagaggatgctccatgcagtttaccgtgttggggatctggaccgcacaatcaagtactacacagaatgctttgggatgaaactgctgaggaaaagggatgttcctgatgagaagtacaccaacgccttccttggctttgggccagagaacaccaactttgcagttgaattgaccaactttgcggaggtctcgcgtcctacgtgcgtcgcgccgttgcctggctccgtcctcgccgttcctctgtagaagctggccgctgacccccgccgtggtggccgtcgcgccgttttttattagatgaagaatgaatcaacccttgtagaagctaaagatagaagataacactactctgtttttgaatgtctgaagtgtaattttgcagccttgcaactataaaacaaacaatgtatggctaaattattgcagttgcacagtgtgaagatttaaaattgaagtgctatgaagagatggataagaggaagaaactttataatattgttcaagagacaaaaggaaattatcagggttttttgtcgatgccgacccttaagcaaaaatgaggtgtcatcaggcctgaatgcaaatggcggaacaactaaaaagacatttaagtttgatagagtattcacgccgaaggatgatcaaggtgtgggcgtctccggcggcccgactatacgaagcgagggcgtatcggggctaaggacacgaaaggccaagcgcaaagggcgtacggcagtaagcccgcctgcaccgcaccagaccgccacccgcgacgtgcccatgtcatgacgccacggtggcggcacgctgacccatcgacgtcaccctcttcctcgcttccgctcgacagcctccagtttcctggtcagtcttcgtgccgcctctctaccacacaccgtctctcagagatggaatcaccacccctcacggttgaagcgaccgcttttaccgagaaaatgatggacatgactttggaggatataatcaagatgtgaaagaaaaagaatcctggaggcaagaaaccccctaggcggccggtaaactctaagtctgaaggtttagggttttcatgctctcgactctgatagctaactcaggaacgaaccaatggtaacaattttcttcatttaatggtggattaaatgaaactatcttcggtctttggtacttgctcaacatctacaataagtaggtcagtggaacatatgtcctgtcaccgttagattgggcgatcgaaccatgaactgatattcaatgtaaaatattcagtgtgatagaaaaaagaagattagtcgagtatgatctttatttcaatctgccaatgctcttgcgtgtcaatggatgtttgcaaagacaacagatgccaatgcagactggcttcttcctaacaacaaacctcaacaagccaagagagacgacaattggcgacgtaggaaaaaagacgcattaatcaataacgtgtggattcctggcagtggcgtagacaaggggctctaaggtttgtacaaacatataaatacatattaattactactattttttaaatagttaagtatataaaaacagtgactgattcaataaagatttgttatttcttttgtt

SEQ ID NO: 13580 - DNA, 2940 bp, Zea Mays
ctacctctcccgtcgcacctcgccctctcccttgccctgccccagatctcggcctccagtcctcgctgccgccgcgacttgctcgccccgtctccctccggccctgcctcatcgcggccgtggtggccaaggaacacgagctcattggaaacactcttaaataaagcttcaatgaacaagacaggagctcgacttcgcctagctccgaacaagcggttgacgaggcggaggtctcgcgtcctacggatggcaaccgatagtgaagcctcgaaggcagctgaggttgtggttgactggcataaacaggacagcaagaggatgctccatgcagtttaccgtgttggggatctggaccgcacaatcaagtactacacagaatgctttgggatgaaactgctgaggaaaagggatgttcctgatgagaagtacaccaacgccttccttggctttgggccagagaacaccaactttgcagttgaattgaccaactttgcggaggtctcgcgtcctacgtgcgtcgcgccgttgcctggctccgtcctcgccgttcctctgtagaagctggccgctgacccccgccgtggtggccgtcgcgccgttttttattagatgaagaatgaatcaacccttgtagaagctaaagatagaagataacactactctgtttttgaatgtctgaagtgtaattttgcagccttgcaactataaaacaaacaatgtatggctaaattattgcagttgcacagtgtgaagatttaaaattgaagtgctatgaagagatggataagaggaagaaactttataatattgttcaagagacaaaaggaaattatcagggttttttgtcgatgccgacccttaagcaaaaatgaggtgtcatcaggcctgaatgcaaatggcggaacaactaaaaagacatttaagtttgatagagtattcacgccgaaggatgatcaaggtgtgggcgtctccggcggcccgactatacgaagcgagggcgtatcggggctaaggacacgaaaggccaagcgcaaagggcgtacggcagtaagcccgcctgcaccgcaccagaccgccacccgcgacgtgcccatgtcatgacgccacggtggcggcacgctgacccatcgacgtcaccctcttcctcgcttccgctcgacagcctccagtttcctggtcagtcttcgtgccgcctctctaccacacaccgtctctcagagatggaatcaccacccctcacggttgaagcgaccgcttttaccgagaaaatgatggacatgactttggaggatataatcaagatgtgaaagaaaaagaatcctggaggcaagaaaccccctaggcggccggtaaactctaaggtctataactctggatgtgtggtggtgttgaaattagttttgtgtataactgttccaacttcaaatagcttcgttttaggtgctatgtttgggaataaattttccagttaaaagtacatgacgtccacgatggactttcttggttttccaaggctcagttacttgctgcgatatattcctttggtgaagttttgccgtgcaccatgtgtgtatcttcaagattaaactaaattttgcattattcatcggttttcttaattcttgtagttgaatagctttaacctgaaacaatacaccagtcgctttcgctgttgtttactttggtggatagtttctattgggaagtgatttgacaccagcaaaggcatttacttctcttttttatttgtagtctgaaggtttagggttttcatgctctcgactctgatagctaactcaggaacgaaccaatggtaacaattttcttcatttaatggtggattaaatgaaactatcttcggtctttggtacttgctcaacatctacaataagtaggtcagtggaacatatgtcctgtcaccgttagattgggcgatcgaaccatggtacatcagtcaccttctttaatgatttttttgttctacttactaatctgctgctttactcttccctggtgtttgtactgacctttttaggaaatcttgcagaactgatattcaatgtaaaatattcagtgtgatagaaaaaagaagattagtcgagtatgatctttatttcaatctgccaatgctcttggtaattccagtttgcctaatagtcaacttgtttttttgtaatgttcgagcattcgctgaaattactgatcgtattcaaaattgttgctaaattgacgattaacccttgtttccatggatagcgagaggtgtgacgtggtatgtttatagctattgtgcagtatacaccttgcttacaggttgccacaactccgccggttggatccactaaacttccaatgtgtcctgtttgcattggtgtgcttacagttttgtatttttgtttcttagggcccacgccaccatgatgtcacatttcaattcattttgtgacctctgatgaagagatttaaacacatctgttctatcctatccatagttttaacttcaaatattgttctatttaatgccacaacaacatatatctttactatgtcatattatatatgattttgttggcttacaacctctcgatagggcgcccgaatgggcgcctcatgttctagttatatttatgacgtatcttatataattttccctccgtaatccatgcagcgtgtcaatggatgtttgcaaagacaacagatgccaatgcagactggcttcttcctaacaacaaacctcaacaagccaagagagacgacaattggcgacgtaggaaaaaagacgcattaatcaataacgtgtggattcctggcagtggcgtagacaaggggctctaaggtttgtacaaacatataaatacatattaattactactattttttaaatagttaagtatataaaaacagtgactgattcaataaagatttgttatttcttttgtt

SEQ ID NO: 13581 - DNA, 3103 bp, Zea Mays
ctacctctcccgtcgcacctcgccctctcccttgccctgccccagatctcggcctccagtcctcgctgccgccgcgacttgctcgccccgtctccctccggccctgcctcatcgcggccgtggtggccaaggaacacgagctcattggaaacactcttaaataaagcttcaatgaacaagacaggagctcgacttcgcctagctccgaacaagcggttgacgaggcggaggtctcgcgtcctacgtgcgtcgcgccgttgcctggctccgtcctcgccgttcctctgtagaagctggccgctgacccccgcccgcctccgcttggccgtctggccgccccccgcgtggtcacctagatggctggccgcgcccctagatttgggttcctaccttgttaggacttccatcttcgttcattttgctgtgtgtccgtcggatagatgactaatgcatcctcaaagttctccaaggcggagccttgcatctttgtgtgtttgatttggttgagctgcaacccgtgctgctgtccttttcagtataaaaaaagatttagatgtaggttggcattcggatgaaaaatggaccgtgaaaaaaaaggaggtccattcaccttgtgttctgtcatttgagcacggatcctttagtgtataggaaagcgtgatatttctgataatcttctgcttttcagagaaaagctttgagtaattgagatgtatattcctctattgaaagaaaaagaggggttttcaagcaatatgaaagcttgatgctttcgttcttcgttttatttaagatcactttcctcccttgttcttatgaaatgtgcaactctttaatcagggatggcaaccgatagtgaagcctcgaaggcagctgaggttgtggttgactggcataaacaggacagcaagaggatgctccatgcagtttaccgtgttggggatctggaccgcacaatcaagtactacacagaatgctttgggatgaaactgctgaggaaaagggatgttcctgatgagaagtacaccaacgccttccttggctttgggccagagaacaccaactttgcagttgaattgaccaactttgcggaggtctcgcgtcctacgtgcgtcgcgccgttgcctggctccgtcctcgccgttcctctgtagaagctggccgctgacccccgccgtggtggccgtcgcgccgttttttattagatgaagaatgaatcaacccttgtagaagctaaagatagaagataacactactctgtttttgaatgtctgaagtgtaattttgcagccttgcaactataaaacaaacaatgtatggctaaattattgcagttgcacagtgtgaagatttaaaattgaagtgctatgaagagatggataagaggaagaaactttataatattgttcaagagacaaaaggaaattatcagggttttttgtcgatgccgacccttaagcaaaaatgaggtgtcatcaggcctgaatgcaaatggcggaacaactaaaaagacatttaagtttgatagagtattcacgccgaaggatgatcaaggtgtgggcgtctccggcggcccgactatacgaagcgagggcgtatcggggctaaggacacgaaaggccaagcgcaaagggcgtacggcagtaagcccgcctgcaccgcaccagaccgccacccgcgacgtgcccatgtcatgacgccacggtggcggcacgctgacccatcgacgtcaccctcttcctcgcttccgctcgacagcctccagtttcctgagatggaatcaccacccctcacggttgaagcgaccgcttttaccgagaaaatgatggacatgactttggaggatataatcaagatgtgaaagaaaaagaatcctggaggcaagaaaccccctaggcggccggtaaactctaagtctgaaggtttagggttttcatgctctcgactctgatagctaactcaggaacgaaccaatggtaacaattttcttcatttaatggtggattaaatgaaactatcttcggtctttggtacttgctcaacatctacaataagtaggtcagtggaacatatgtcctgtcaccgttagattgggcgatcgaaccatggtacatcagtcaccttctttaatgatttttttgttctacttactaatctgctgctttactcttccctggtgtttgtactgacctttttaggaaatcttgcagaactgatattcaatgtaaaatattcagtgtgatagaaaaaagaagattagtcgagtatgatctttatttcaatctgccaatgctcttggtaattccagtttgcctaatagtcaacttgtttttttgtaatgttcgagcattcgctgaaattactgatcgtattcaaaattgttgctaaattgacgattaacccttgtttccatggatagcgagaggtgtgacgtggtatgtttatagctattgtgcagtatacaccttgcttacaggttgccacaactccgccggttggatccactaaacttccaatgtgtcctgtttgcattggtgtgcttacagttttgtatttttgtttcttagggcccacgccaccatgatgtcacatttcaattcattttgtgacctctgatgaagagatttaaacacatctgttctatcctatccatagttttaacttcaaatattgttctatttaatgccacaacaacatatatctttactatgtcatattatatatgattttgttggcttacaacctctcgatagggcgcccgaatgggcgcctcatgttctagttatatttatgacgtatcttatataattttccctccgtaatccatgcagcgtgtcaatggatgtttgcaaagacaacagatgccaatgcagactggcttcttcctaacaacaaacctcaacaagccaagagagacgacaattggcgacgtaggaaaaaagacgcattaatcaataacgtgtggattcctggcagtggcgtagacaaggggctctaaggtttgtacaaacatataaatacatattaattactactattttttaaatagttaagtatataaaaacagtgactgattcaataaagatttgttatttcttttgtt

SEQ ID NO: 13582 - DNA, 2695 bp, Zea Mays
ctacctctcccgtcgcacctcgccctctcccttgccctgccccagatctcggcctccagtcctcgctgccgccgcgacttgctcgccccgtctccctccggccctgcctcatcgcggccgtggtggccaaggaacacgagctcattggaaacactcttaaataaagcttcaatgaacaagacaggagctcgacttcgcctagctccgaacaagcggttgacgaggcggaggtctcgcgtcctacggatggcaaccgatagtgaagcctcgaaggcagctgaggttgtggttgactggcataaacaggacagcaagaggatgctccatgcagtttaccgtgttggggatctggaccgcacaatcaagtactacacagaatgctttgggatgaaactgctgaggaaaagggatgttcctgatgagaagtacaccaacgccttccttggctttgggccagagaacaccaactttgcagttgaattgaccaactttgcggaggtctcgcgtcctacgtgcgtcgcgccgttgcctggctccgtcctcgccgttcctctgtagaagctggccgctgacccccgccgtggtggccgtcgcgccgttttttattagatgaagaatgaatcaacccttgtagaagctaaagatagaagataacactactctgtttttgaatgtctgaagtgtaattttgcagccttgcaactataaaacaaacaatgtatggctaaattattgcagttgcacagtgtgaagatttaaaattgaagtgctatgaagagatggataagaggaagaaactttataatattgttcaagagacaaaaggaaattatcagggttttttgtcgatgccgacccttaagcaaaaatgaggtgtcatcaggcctgaatgcaaatggcggaacaactaaaaagacatttaagtttgatagagtattcacgccgaaggatgatcaaggtgtgggcgtctccggcggcccgactatacgaagcgagggcgtatcggggctaaggacacgaaaggccaagcgcaaagggcgtacggcagtaagcccgcctgcaccgcaccagaccgccacccgcgacgtgcccatgtcatgacgccacggtggcggcacgctgacccatcgacgtcaccctcttcctcgcttccgctcgacagcctccagtttcctggtcagtcttcgtgccgcctctctaccacacaccgtctctcagagatggaatcaccacccctcacggttgaagcgaccgcttttaccgagaaaatgatggacatgactttggaggatataatcaagatgtgaaagaaaaagaatcctggaggcaagaaaccccctaggcggccgtctgaaggtttagggttttcatgctctcgactctgatagctaactcaggtatgtacaacattatcttattttcctattattaaattatctataaagctgctaggaaattacgcaacatttatatttctatatagagtagcttcttatgtccttaattgtaattagttatttaatttgatgattaccatcttgtaatatttgtataggaacgaaccaatggtaacaattttcttcatttaatggtggattaaatgaaactatcttcggtctttggtacttgctcaacatctacaataagtaggtcagtggaacatatgtcctgtcaccgttagattgggcgatcgaaccatggtacatcagtcaccttctttaatgatttttttgttctacttactaatctgctgctttactcttccctggtgtttgtactgacctttttaggaaatcttgcagaactgatattcaatgtaaaatattcagtgtgatagaaaaaagaagattagtcgagtatgatctttatttcaatctgccaatgctcttggtaattccagtttgcctaatagtcaacttgtttttttgtaatgttcgagcattcgctgaaattactgatcgtattcaaaattgttgctaaattgacgattaacccttgtttccatggatagcgagaggtgtgacgtggtatgtttatagctattgtgcagtatacaccttgcttacaggttgccacaactccgccggttggatccactaaacttccaatgtgtcctgtttgcattggtgtgcttacagttttgtatttttgtttcttagggcccacgccaccatgatgtcacatttcaattcattttgtgacctctgatgaagagatttaaacacatctgttctatcctatccatagttttaacttcaaatattgttctatttaatgccacaacaacatatatctttactatgtcatattatatatgattttgttggcttacaacctctcgatagggcgcccgaatgggcgcctcatgttctagttatatttatgacgtatcttatataattttccctccgtaatccatgcagcgtgtcaatggatgtttgcaaagacaacagatgccaatgcagactggcttcttcctaacaacaaacctcaacaagccaagagagacgacaattggcgacgtaggaaaaaagacgcattaatcaataacgtgtggattcctggcagtggcgtagacaaggggctctaaggtttgtacaaacatataaatacatattaattactactattttttaaatagttaagtatataaaaacagtgactgattcaataaagatttgttatttcttttgtt

SEQ ID NO: 13583 - DNA, 1903 bp, Zea Mays
ctacctctcccgtcgcacctcgccctctcccttgccctgccccagatctcggcctccagtcctcgctgccgccgcgacttgctcgccccgtctccctccggccctgcctcatcgcggccgtggtggccaaggaacacgagctcattggaaacactcttaaataaagcttcaatgaacaagacaggagctcgacttcgcctagctccgaacaagcggttgacgaggcggaggtctcgcgtcctacggatggcaaccgatagtgaagcctcgaaggcagctgaggttgtggttgactggcataaacaggacagcaagaggatgctccatgcagtttaccgtgttggggatctggaccgcacaatcaaaatgctttgggatgaaactgctgaggaaaagggatgttcctgatgagaagtacaccaacgccttccttggctttgggccagagaacaccaactttgcagttgaattgaccaactttgcggaggtctcgcgtcctacgtgcgtcgcgccgttgcctggctccgtcctcgccgttcctctgtagaagctggccgctgacccccgccgtggtggccgtcgcgccgttttttattagatgaagaatgaatcaacccttgtagaagctaaagatagaagataacactactctgtttttgaatgtctgaagtgtaattttgcagccttgcaactataaaacaaacaatgtatggctaaattattgcagttgcacagtgtgaagatttaaaattgaagtgctatgaagagatggataagaggaagaaactttataatattgttcaagagacaaaaggaaattatcagggttttttgtcgatgccgacccttaagcaaaaatgaggtgtcatcaggcctgaatgcaaatggcggaacaactaaaaagacatttaagtttgatagagtattcacgccgaaggatgatcaaggtgtgggcgtctccggcggcccgactatacgaagcgagggcgtatcggggctaaggacacgaaaggccaagcgcaaagggcgtacggcagtaagcccgcctgcaccgcaccagaccgccacccgcgacgtgcccatgtcatgacgccacggtggcggcacgctgacccatcgacgtcaccctcttcctcgcttccgctcgacagcctccagtttcctggtcagtcttcgtgccgcctctctaccacacaccgtctctcagagatggaatcaccacccctcacggttgaagcgaccgcttttaccgagaaaatgatggacatgactttggaggatataatcaagatgtgaaagaaaaagaatcctggaggcaagaaaccccctaggcggccggtaaactctaagtctgaaggtttagggttttcatgctctcgactctgatagctaactcaggaacgaaccaatggtaacaattttcttcatttaatggtggattaaatgaaactatcttcggtctttggtacttgctcaacatctacaataagtaggtcagtggaacatatgtcctgtcaccgttagattgggcgatcgaaccatgaactgatattcaatgtaaaatattcagtgtgatagaaaaaagaagattagtcgagtatgatctttatttcaatctgccaatgctcttgcgtgtcaatggatgtttgcaaagacaacagatgccaatgcagactggcttcttcctaacaacaaacctcaacaagccaagagagacgacaattggcgacgtaggaaaaaagacgcattaatcaataacgtgtggattcctggcagtggcgtagacaaggggctctaaggtttgtacaaacatataaatacatattaattactactattttttaaatagttaagtatataaaaacagtgactgattcaataaagatttgttatttcttttgtt

SEQ ID NO: 13584 - DNA, 2939 bp, Zea Mays
ctacctctcccgtcgcacctcgccctctcccttgccctgccccagatctcggcctccagtcctcgctgccgccgcgacttgctcgccccgtctccctccggccctgcctcatcgcggccgtggtggccaaggaacacgagctcattggaaacactcttaaataaagcttcaatgaacaagacaggagctcgacttcgcctagctccgaacaagcggttgacgaggcggaggtctcgcgtcctacggatggcaaccgatagtgaagcctcgaaggcagctgaggttgtggttgactggcataaacaggacagcaagaggatgctccatgcagtttaccgtgttggggatctggaccgcacaatcaagtactacacagaatgctttgggatgaaactgctgaggaaaagggatgttcctgatgagaagtacaccaacgccttccttggctttgggccagagaacaccaactttgcagttgaattgaccaactttgcggaggtctcgcgtcctacgtgcgtcgcgccgttgcctggctccgtcctcgccgttcctctgtagaagctggccgctgacccccgccgtggtggccgtcgcgccgttttttattagatgaagaatgaatcaacccttgtagaagctaaagatagaagataacactactctgtttttgaatgtctgaagtgtaattttgcagccttgcaactataaaacaaacaatgtatggctaaattattgcagttgcacagtgtgaagatttaaaattgaagtgctatgaagagatggataagaggaagaaactttataatattgttcaagagacaaaaggaaattatcagggttttttgtcgatgccgacccttaagcaaaaatgaggtgtcatcaggcctgaatgcaaatggcggaacaactaaaaagacatttaagtttgatagagtattcacgccgaaggatgatcaaggtgtgggcgtctccggcggcccgactatacgaagcgagggcgtatcggggctaaggacacgaaaggccaagcgcaaagggcgtacggcagtaagcccgcctgcaccgcaccagaccgccacccgcgacgtgcccatgtcatgacgccacggtggcggcacgctgacccatcgacgtcaccctcttcctcgcttccgctcgacagcctccagtttcctggtcagtcttcgtgccgcctctctaccacacaccgtctctcagagatggaatcaccacccctcacggttgaagcgaccgcttttaccgagaaaatgatggacatgactttggggatataatcaagatgtgaaagaaaaagaatcctggaggcaagaaaccccctaggcggccggtaaactctaaggtctataactctggatgtgtggtggtgttgaaattagttttgtgtataactgttccaacttcaaatagcttcgttttaggtgctatgtttgggaataaattttccagttaaaagtacatgacgtccacgatggactttcttggttttccaaggctcagttacttgctgcgatatattcctttggtgaagttttgccgtgcaccatgtgtgtatcttcaagattaaactaaattttgcattattcatcggttttcttaattcttgtagttgaatagctttaacctgaaacaatacaccagtcgctttcgctgttgtttactttggtggatagtttctattgggaagtgatttgacaccagcaaaggcatttacttctcttttttatttgtagtctgaaggtttagggttttcatgctctcgactctgatagctaactcaggaacgaaccaatggtaacaattttcttcatttaatggtggattaaatgaaactatcttcggtctttggtacttgctcaacatctacaataagtaggtcagtggaacatatgtcctgtcaccgttagattgggcgatcgaaccatggtacatcagtcaccttctttaatgatttttttgttctacttactaatctgctgctttactcttccctggtgtttgtactgacctttttaggaaatcttgcagaactgatattcaatgtaaaatattcagtgtgatagaaaaaagaagattagtcgagtatgatctttatttcaatctgccaatgctcttggtaattccagtttgcctaatagtcaacttgtttttttgtaatgttcgagcattcgctgaaattactgatcgtattcaaaattgttgctaaattgacgattaacccttgtttccatggatagcgagaggtgtgacgtggtatgtttatagctattgtgcagtatacaccttgcttacaggttgccacaactccgccggttggatccactaaacttccaatgtgtcctgtttgcattggtgtgcttacagttttgtatttttgtttcttagggcccacgccaccatgatgtcacatttcaattcattttgtgacctctgatgaagagatttaaacacatctgttctatcctatccatagttttaacttcaaatattgttctatttaatgccacaacaacatatatctttactatgtcatattatatatgattttgttggcttacaacctctcgatagggcgcccgaatgggcgcctcatgttctagttatatttatgacgtatcttatataattttccctccgtaatccatgcagcgtgtcaatggatgtttgcaaagacaacagatgccaatgcagactggcttcttcctaacaacaaacctcaacaagccaagagagacgacaattggcgacgtaggaaaaaagacgcattaatcaataacgtgtggattcctggcagtggcgtagacaaggggctctaaggtttgtacaaacatataaatacatattaattactactattttttaaatagttaagtatataaaaacagtgactgattcaataaagatttgttatttcttttgtt

SEQ ID NO: 13585 - DNA, 1894 bp, Zea Mays
gtcaggttaacagtgtggctaagtcatatgaaaaaatataactcaaaagataaccccagtttcttgcaatattaccttcctgtgtatgttctaggtataatacctgactttggtaatacatagttattctgttttaactgaaatagtttgtcgatttttgcgtgggaacaacaaatacatgatggtaccccttccatccaaaaaatgcaaggcctctatttgacaaacagtcgaactcttagtagaggcggtccagaggtcgttagtggatagtcaagaagagattcacagttgatgtcgaacaaataaaggaatccaataaacttactgcaacattgagaagggaaaatcctacatcagctacatgtataatcgaattatttgtataaacaagataggtacaggcagagcaattcggtagagagaagggagggtgcatgcttgcagcctcattagattactcagttactattttaggctgtcttattgcgccttcatagttggaagtagtatagattttaatcttctctgtatgagcttaatatacttttatttagcttcttgcaagcttgaatttcctggtgctcaaatgccacctgccacttttgtagtctctgctcggaactgtgttttcttactctaattatacatatacgttcatatagagatggaatcaccacccctcacggttgaagcgaccgcttttaccgagaaaatgatggacatgactttggaggatataatcaagatgtgaaagaaaaagaatcctggaggcaagaaaccccctaggcggccggtaaactctaagtctgaaggtttagggttttcatgctctcgactctgatagctaactcaggaacgaaccaatggtaacaattttcttcatttaatggtggattaaatgaaactatcttcggtctttggtacttgctcaacatctacaataagtaggtcagtggaacatatgtcctgtcaccgttagattgggcgatcgaaccatgaactgatattcaatgtaaaatattcagtgtgatagaaaaaagaagattagtcgagtatgatctttatttcaatctgccaatgctcttggtaattccagtttgcctaatagtcaacttgtttttttgtaatgttcgagcattcgctgaaattactgatcgtattcaaaattgttgctaaattgacgattaacccttgtttccatggatagcgagaggtgtgacgtggtatgtttatagctattgtgcagtatacaccttgcttacaggttgccacaactccgccggttggatccactaaacttccaatgtgtcctgtttgcattggtgtgcttacagttttgtatttttgtttcttagggcccacgccaccatgatgtcacatttcaattcattttgtgacctctgatgaagagatttaaacacatctgttctatcctatccatagttttaacttcaaatattgttctatttaatgccacaacaacatatatctttactatgtcatattatatatgattttgttggcttacaacctctcgatagggcgcccgaatgggcgcctcatgttctagttatatttatgacgtatcttatataattttccctccgtaatccatgcagcgtgtcaatggatgtttgcaaagacaacagatgccaatgcagactggcttcttcctaacaacaaacctcaacaagccaagagagacgacaattggcgacgtaggaaaaaagacgcattaatcaataacgtgtggattcctggcagtggcgtagacaaggggctctaaggtttgtacaaacatataaatacatattaattactactattttttaaatagttaagtatataaaaacagtgactgattcaataaagatttgttatttcttttgtt

SEQ ID NO: 13586 - DNA, 1223 bp, Zea Mays
gtcaggttaacagtgtggctaagtcatatgaaaaaatataactcaaaagataaccccagtttcttgcaatattaccttcctgtgtatgttctaggtataatacctgactttggtaatacatagttattctgttttaactgaaatagtttgtcgatttttgcgtgggaacaacaaatacatgatggtaccccttccatccaaaaaatgcaaggcctctatttgacaaacagtcgaactcttagtagaggcggtccagaggtcgttagtggatagtcaagaagagattcacagttgatgtcgaacaaataaaggaatccaataaacttactgcaacattgagaagggaaaatcctacatcagctacatgtataatcgaattatttgtataaacaagataggtacaggcagagcaattcggtagagagaagggagggtgcatgcttgcagcctcattagattactcagttactattttaggctgtcttattgcgccttcatagttggaagtagtatagattttaatcttctctgtatgagcttaatatacttttatttagcttcttgcaagcttgaatttcctggtgctcaaatgccacctgccacttttgtagtctctgctcggaactgtgttttcttactctaattatacatatacgttcatatagagatggaatcaccacccctcacggttgaagcgaccgcttttaccgagaaaatgatggacatgactttggaggatataatcaagatgtgaaagaaaaagaatcctggaggcaagaaaccccctaggcggccggtaaactctaagtctgaaggtttagggttttcatgctctcgactctgatagctaactcaggaacgaaccaatggtaacaattttcttcatttaatggtggattaaatgaaactatcttcggtctttggtacttgctcaacatctacaataagtagcgtgtcaatggatgtttgcaaagacaacagatgccaatgcagactggcttcttcctaacaacaaacctcaacaagccaagagagacgacaattggcgacgtaggaaaaaagacgcattaatcaataacgtgtggattcctggcagtggcgtagacaaggggctctaaggtttgtacaaacatataaatacatattaattactactattttttaaatagttaagtatataaaaacagtgactgattcaataaagatttgttatttcttttgtt

SEQ ID NO: 13587 - DNA, 1530 bp, Zea Mays
ccccagtttcttgcaatattaccttcctgtgtatgttctagagatggaatcaccacccctcacggttgaagcgaccgcttttaccgagaaaatgatggacatgactttggaggatataatcaagatgtgaaagaaaaagaatcctggaggcaagaaaccccctaggcggccggtaaactctaagtctgaaggtttagggttttcatgctctcgactctgatagctaactcaggtatgtacaacattatcttattttcctattattaaattatctataaagctgctaggaaattacgcaacatttatatttctatatagagtagcttcttatgtccttaattgtaattagttatttaatttgatgattaccatcttgtaatatttgtataggaacgaaccaatggtaacaattttcttcatttaatggtggattaaatgaaactatcttcggtctttggtacttgctcaacatctacaataagtaggtcagtggaacatatgtcctgtcaccgttagattgggcgatcgaaccatggtacatcagtcaccttctttaatgatttttttgttctacttactaatctgctgctttactcttccctggtgtttgtactgacctttttaggaaatcttgcagaactgatattcaatgtaaaatattcagtgtgatagaaaaaagaagattagtcgagtatgatctttatttcaatctgccaatgctcttggtaattccagtttgcctaatagtcaacttgtttttttgtaatgttcgagcattcgctgaaattactgatcgtattcaaaattgttgctaaattgacgattaacccttgtttccatggatagcgagaggtgtgacgtggtatgtttatagctattgtgcagtatacaccttgcttacaggttgccacaactccgccggttggatccactaaacttccaatgtgtcctgtttgcattggtgtgcttacagttttgtatttttgtttcttagggcccacgccaccatgatgtcacatttcaattcattttgtgacctctgatgaagagatttaaacacatctgttctatcctatccatagttttaacttcaaatattgttctatttaatgccacaacaacatatatctttactatgtcatattatatatgattttgttggcttacaacctctcgatagggcgcccgaatgggcgcctcatgttctagttatatttatgacgtatcttatataattttccctccgtaatccatgcagcgtgtcaatggatgtttgcaaagacaacagatgccaatgcagactggcttcttcctaacaacaaacctcaacaagccaagagagacgacaattggcgacgtaggaaaaaagacgcattaatcaataacgtgtggattcctggcagtggcgtagacaaggggctctaaggtttgtacaaacatataaatacatattaattactactattttttaaatagttaagtatataaaaacagtgactgattcaataaagatttgttatttcttttgtt

SEQ ID NO: 13588 - DNA, 1914 bp, Zea Mays
attaccttcctgtgtatgttctaggtataatacctgactttggtaatacatagttattctgttttaactgaaatagtttgtcgatttttgcgtgggaacaacaaatacatgatggtaccccttccatccaaaaaatgcaaggcctctatttgacaaacagtcgaactcttagtagaggcggtccagaggtcgttagtggatagtcaagaagagattcacagttgatgtcgaacaaataaaggaatccaataaacttactgcaacattgagaagggaaaatcctacatcagctacatgtataatcgaattatttgtataaacaagataggtacaggcagagcaattcggtagagagaagggagggtgcatgcttgcagcctcattagattactcagttactattttaggctgtcttattgcgccttcatagttggaagtagtatagattttaatcttctctgtatgagcttaatatacttttatttagcttcttgcaagcttgaatttcctggtgctcaaatgccacctgccacttttgtagtctctgctcggaactgtgttttcttactctaattatacatatacgttcatatagagatggaatcaccacccctcacggttgaagcgaccgcttttaccgagaaaatgatggacatgactttggaggatataatcaagatgtgaaagaaaaagaatcctggaggcaagaaaccccctaggcggccgtctgaaggtttagggttttcatgctctcgactctgatagctaactcaggaacgaaccaatggtaacaattttcttcatttaatggtggattaaatgaaactatcttcggtctttggtacttgctcaacatctacaataagtaggtcagtggaacatatgtcctgtcaccgttagattgggcgatcgaaccatggtacatcagtcaccttctttaatgatttttttgttctacttactaatctgctgctttactcttccctggtgtttgtactgacctttttaggaaatcttgcagaactgatattcaatgtaaaatattcagtgtgatagaaaaaagaagattagtcgagtatgatctttatttcaatctgccaatgctcttggtaattccagtttgcctaatagtcaacttgtttttttgtaatgttcgagcattcgctgaaattactgatcgtattcaaaattgttgctaaattgacgattaacccttgtttccatggatagcgagaggtgtgacgtggtatgtttatagctattgtgcagtatacaccttgcttacaggttgccacaactccgccggttggatccactaaacttccaatgtgtcctgtttgcattggtgtgcttacagttttgtatttttgtttcttagggcccacgccaccatgatgtcacatttcaattcattttgtgacctctgatgaagagatttaaacacatctgttctatcctatccatagttttaacttcaaatattgttctatttaatgccacaacaacatatatctttactatgtcatattatatatgattttgttggcttacaacctctcgatagggcgcccgaatgggcgcctcatgttctagttatatttatgacgtatcttatataattttccctccgtaatccatgcagcgtgtcaatggatgtttgcaaagacaacagatgccaatgcagactggcttcttcctaacaacaaacctcaacaagccaagagagacgacaattggcgacgtaggaaaaaagacgcattaatcaataacgtgtggattcctggcagtggcgtagacaaggggctctaaggtttgtacaaacatataaatacatattaattactactattttttaaatagttaagtatataaaaacagtgactgattcaataaagatttgttatttcttttgtt

SEQ ID NO: 13589 - DNA, 2309 bp, Zea Mays
cctgtgtatgttctaggtataatacctgactttggtaatacatagttattctgttttaactgaaatagtttgtcgatttttgcgtgggaacaacaaatacatgatggtaccccttccatccaaaaaatgcaaggcctctatttgacaaacagtcgaactcttagtagaggcggtccagaggtcgttagtggatagtcaagaagagattcacagttgatgtcgaacaaataaaggaatccaataaacttactgcaacattgagaagggaaaatcctacatcagctacatgtataatcgaattatttgtataaacaagataggtacaggcagagcaattcggtagagagaagggagggtgcatgcttgcagcctcattagattactcagttactattttaggctgtcttattgcgccttcatagttggaagtagtatagattttaatcttctctgtatgagcttaatatacttttatttagcttcttgcaagcttgaatttcctggtgctcaaatgccacctgccacttttgtagtctctgctcggaactgtgttttcttactctaattatacatatacgttcatatagagatggaatcaccacccctcacggttgaagcgaccgcttttaccgagaaaatgatggacatgactttggaggatataatcaagatgtgaaagaaaaagaatcctggaggcaagaaaccccctaggcggccggtaaactctaaggtctataactctggatgtgtggtggtgttgaaattagttttgtgtataactgttccaacttcaaatagcttcgttttaggtgctatgtttgggaataaattttccagttaaaagtacatgacgtccacgatggactttcttggttttccaaggctcagttacttgctgcgatatattcctttggtgaagttttgccgtgcaccatgtgtgtatcttcaagattaaactaaattttgcattattcatcggttttcttaattcttgtagttgaatagctttaacctgaaacaatacaccagtcgctttcgctgttgtttactttggtggatagtttctattgggaagtgatttgacaccagcaaaggcatttacttctcttttttatttgtagtctgaaggtttagggttttcatgctctcgactctgatagctaactcaggaacgaaccaatggtaacaattttcttcatttaatggtggattaaatgaaactatcttcggtctttggtacttgctcaacatctacaataagtaggtcagtggaacatatgtcctgtcaccgttagattgggcgatcgaaccatggtacatcagtcaccttctttaatgatttttttgttctacttactaatctgctgctttactcttccctggtgtttgtactgacctttttaggaaatcttgcagaactgatattcaatgtaaaatattcagtgtgatagaaaaaagaagattagtcgagtatgatctttatttcaatctgccaatgctcttggtaattccagtttgcctaatagtcaacttgtttttttgtaatgttcgagcattcgctgaaattactgatcgtattcaaaattgttgctaaattgacgattaacccttgtttccatggatagcgagaggtgtgacgtggtatgtttatagctattgtgcagtatacaccttgcttacaggttgccacaactccgccggttggatccactaaacttccaatgtgtcctgtttgcattggtgtgcttacagttttgtatttttgtttcttagggcccacgccaccatgatgtcacatttcaattcattttgtgacctctgatgaagagatttaaacacatctgttctatcctatccatagttttaacttcaaatattgttctatttaatgccacaacaacatatatctttactatgtcatattatatatgattttgttggcttacaacctctcgatagggcgcccgaatgggcgcctcatgttctagttatatttatgacgtatcttatataattttccctccgtaatccatgcagcgtgtcaatggatgtttgcaaagacaacagatgccaatgcagactggcttcttcctaacaacaaacctcaacaagccaagagagacgacaattggcgacgtaggaaaaaagacgcattaatcaataacgtgtggattcctggcagtggcgtagacaaggggctctaaggtttgtacaaacatataaatacatattaattactactattttttaaatagttaagtatataaaaacagtgactgattcaataaagatttgttatttcttttgtt

SEQ ID NO: 13590 - DNA, 1332 bp, Zea Mays
caaaagctaaatgacaaaatccagctatggcgattctttaaaacggacgccgctgtaactggtttatactagctactatataattataaaaagagaagaatgcagatgttagcccacaggcacagcacgcaacgcaaacggtgagcgcacagcacgcagcaaaccagatctcggtcgcccgccggctctccagacggagcgagcccgttccgtcgccgtcacccagcgcgccgatggagcagcagatggtaccactctgtgtgaagagtgtgaagcgaaagaggaaaagggttgaccacagcaatattattctagcattaccagctatatatccatttccacaaaagaaaacggtggcaagtgctgcaggaaagaaaagggcagcaaccaagaaaaacactacaggaagaaacaagacgcgcaacaaggctgcacgtgcacccaagcaaggactgaggaaaggtaaaagaaagaatgctaaggctgctcatgcacccaatgacgatgcactaacggaaggacgtataggttctgtagacatatcaaatggtgcaagcaatgaacatcctgtccaagaggatcaaaaagacctcatacggcaacaacacaacttctcaaacactggagacgacattattgtggatgatcgttcaggtgatgcaaatgaaccaaaaattgttagcaatgaacaatatatttccgatgaagaagcaggcacagtgcagctaccgaaccctgccaaacaagacattctggaagcggattctgcagtggaacaaccatatgttatcaacaacgaacaacagattatggaggaacaaccaggtgtggagaaccaacaaaatgttgcagttaatcagcaacacaaaccagacgaacaagcaggcataatgcaagaacaaaacattggaaatgctttagaagaaaatgtgccagaggatcctacaggcacaatgaaggtgtacgccaaagccagcaacttcgatgtcgaaaagcttcacatgcgaagctaagggactcggaagacttgttctgcaagaaagaagaatgaggaaggacgacattgcccctgttatatttgtaaaccatatgtgtaaactttattggcatacttgtaatttcatacaaagttgtacctctcccctataaatggaggaattgtgccatgcataaattcaccgttcgagggcccaaagctttgactagctcagcctttgaggtaccttcgtgctatcatttgtgtaaagccgaaggtatatttgtaattgtcaattacattgcaaggaatgaaatgataagtgtggaaatacgaagttgagttacacatctcac

SEQ ID NO: 13591 - DNA, 1400 bp, Zea Mays
aaaagctaaatgacaaaatccagctatggcgattctttaaaacggacgccgctgtaactggtttatactagctactatataattataaaaagagaagaatgcagatgttagcccacaggcacagcacgcaacgcaaacggtgagcgcacagcacgcagcaaaccagatctcggtcgcccgccggctctccagacggagcgagcccgttccgtcgccgtcacccagcgcgccgatggagcagcagatggtaccactctgtgtgaagagtgtgaagcgaaagaggaaaagggttgaccacagcaatattattctagcattaccagctatatatccatttccacaaaagaaaacggtggcaagtgctgcaggaaagaaaagggcagcaaccaagaaaaacactacaggaagaaacaagacgcgcaacaaggctgcacgtgcacccaagcaaggactgaggaaaggtaaaagaaagaatgctaaggctgctcatgcacccaatgacgatgcactaacggaaggacgtataggttctgtagacatatcaaatggtgcaagcaatgaacatcctgtccaagaggatcaaaaagacctcatacggcaacaacacaacttctcaaacactggagacgacattattgtggatgatcgttcaggtgatgcaaatgaaccaaaaattgttagcaatgaacaatatatttccgatgaagaagcaggcacagtgcagctaccgaaccctgccaaacaagacattctggaagcggattctgcagtggaacaaccatatgttatcaacaacgaacaacagattatggaggaacaaccaggtgtggagaaccaacaaaatgttgcagttaatcagcaacacaaaccagacgaacaagcaggcataatgcaagaacaaaacattggaaatgctttagaagaaaatgtgccagaggatcctacaggagaaaggtggaggatgaagacccaaactttggaaggtatatatgccacaagtacaaagggaagagccttcaaacctcctagcaatatgcattgaggtagacaatgtgtcacataggtgggcttcatgaggattttcacattgacgatgcttgagcaagcaggaggagatgatgatgtgttttttaatagctagtcgacagctagatggccttagggtttagttcggatggatggcctagatttgattcacattgatacatgatacttattccagactacaaaaaacattactatatgcggtgtacgacatgcatatcaccatactttatggtgttgtactaatacgagtaaacgatcaataaccttcgctggatgaaatgggcatgggagttgtgacatcgatataatatattgtgtgcactagagaaataaatcaatttacaaacagaatc

SEQ ID NO: 13592 - DNA, 928 bp, Zea Mays
ctggtttatactagctactatataattataaaaagagaagaatgcagatgttagcccacaggcacagcacgcaacgcaaacggtgagcgcacagcacgcagcaaaccagatctcggtcgcccgccggctctccagacggagcgagcccgttccgtcgccgtcacccagcgcgccgatggagcagcagatggtaccactctgtgtgaagagtgtgaagcgaaagaggaaaagggttgaccacagcaatattattctagcattaccagctatatatccatttccacaaaagaaaacggtggcaagtgctgcaggaaagaaaagggcagcaaccaagaaaaacactacaggaagaaacaagacgcgcaacaaggctgcacgtgcacccaagcaaggactgaggaaaggtaaaagaaagaatgctaaggctgctcatgcacccaatgacgatgcactaacggaaggacgtataggttctgtagacatatcaaatggtgcaagcaatgaacatcctgtccaagaggatcaaaaagacctcatacggcaacaacacaacttctcaaacactggagacgacattattgtggatgatcgttcaggtgatgcaaatgaaccaaaaattgttagcaatgaacaatatatttccgatgaagaagcaggcacagtgcagctaccgaaccctgccaaacaagacattctggaagcggattctgcagtggaacaaccatatgttatcaacaacgaacaacagattatggaggaacaaccaggtgtggagaaccaacaaaatgttgcagttaatcagcaacacaaaccagacgaacaagcaggcataatgcaagaacaaaacattggaaatgctttagaagaaaatgtgccagaggatcctacaggtacccaaaactatcagtcatttataaggaggatgttt

SEQ ID NO: 13593 - DNA, 1291 bp, Zea Mays
atactagctactatataattataaaaagagaagaatgcagatgttagcccacaggcacagcacgcaacgcaaacggtgagcgcacagcacgcagcaaaccagatctcggtcgcccgccggctctccagacggagcgagcccgttccgtcgccgtcacccagcgcgccgatggagcagcagatggtaccactctgtgtgaagagtgtgaagcgaaagaggaaaagggttgaccacagcaatattattctagcattaccagctatatatccatttccacaaaagaaaacggtggcaagtgctgcaggaaagaaaagggcagcaaccaagaaaaacactacagtatatatattttcacttgtttcaggaagaaacaagacgcgcaacaaggctgcacgtgcacccaagcaaggactgaggaaaggtaaaagaaagaatgctaaggctgctcatgcacccaatgacgatgcactaacggaaggacgtataggttctgtagacatatcaaatggtgcaagcaatgaacatcctgtccaagaggatcaaaaagacctcatacggcaacaacacaacttctcaaacactggagacgacattattgtggatgatcgttcaggtgatgcaaatgaaccaaaaattgttagcaatgaacaatatatttccgatgaagaagcaggcacagtgcagctaccgaaccctgccaaacaagacattctggaagcggattctgcagtggaacaaccatatgttatcaacaacgaacaacagattatggaggaacaaccaggtgtggagaaccaacaaaatgttgcagttaatcagcaacacaaaccagacgaacaagcaggcataatgcaagaacaaaacattggaaatgctttagaagaaaatgtgccagaggatcctacaggcacaatgaaggtgtacgccaaagccagcaacttcgatgtcgaaaagcttcacatgcgaagctaagggactcggaagacttgttctgcaagaaagaagaatgaggaaggacgacattgcccctgttatatttgtaaaccatatgtgtaaactttattggcatacttgtaatttcatacaaagttgtacctctcccctataaatggaggaattgtgccatgcataaattcaccgttcgagggcccaaagctttgactagctcagcctttgaggtaccttcgtgctatcatttgtgtaaagccgaaggtatatttgtaattgtcaattacattgcaaggaatgaaatgataagtgtggaaatacgaagttgagttacacatctcac

SEQ ID NO: 13594 - DNA, 1296 bp, Zea Mays
agaatgcagatgttagcccacaggcacagcacgcaacgcaaacggtgagcgcacagcacgcagcaaaccagatctcggtcgcccgccggctctccagacggagcgagcccgttccgtcgccgtcacccagcgcgccgatggagcagcagatggtaccactctgtgtgaagagtgtgaagcgaaagaggaaaagggttgaccacagcaatattattctagcattaccagctatatatccatttccacaaaagaaaacggtggcaagtgctgcaggaaagaaaagggcagcaaccaagaaaaacactacaggaagaaacaagacgcgcaacaaggctgcacgtgcacccaagcaaggactgaggaaaggtaaaagaaagaatgctaaggctgctcatgcacccaatgacgatgcactaacggaaggacgtataggttctgtagacatatcaaatggtgcaagcaatgaacatcctgtccaagaggatcaaaaagacctcatacggcaacaacacaacttctcaaacactggagacgacattattgtggatgatcgttcaggtgatgcaaatgaaccaaaaattgttagcaatgaacaatatatttccgatgaagaagcaggcacagtgcagctaccgaaccctgccaaacaagacattctggaagcggattctgcagtggaacaaccatatgttatcaacaacgaacaacagattatggaggaacaaccaggtgtggagaaccaacaaaatgttgcagttaatcagcaacacaaaccagacgaacaagcaggcataatgcaagaacaaaacattggaaatgctttagaagaaaatgtgccagaggatcctacagtttttgctgatatattcaactttccgctgaataatgaactcatggatctctcaaacattgaagacaatctggaggattcaacaggagttcaggatgaacaaactataatgaataatcaacaactgattccggaccaacaagcaggattagtgcaccaacagaaccctgaaaacgccatagaaaaagttgttgcagaggacgaccctgcagctttcctttgagtaatcaacttatggacctggactaaggttctgcatagccaatcgccatgggaattgcgttgctgatttatttttttccaagataatgacatgaacctgtatttcaacattctctggtccaaatctgttttgttatcgtgaacataatgctgtatatacaagcgtatcgtcttctctgattattatatatacatggtatatatatatagatgttccagctgca

SEQ ID NO: 13595 - DNA, 2355 bp, Zea Mays
ctctcctcgcgcccgtctcatgcggcgggtggcatttattgctcaggccatgggcgcgttgcttgtgatgcacacatcccaatcccgctcatgtgatctgctcctggctcattgaatcatcggtgtgccgtgcaattaagcacgcacggatgtacctcgctaggattcttgatgtgggagtaaccagcctgtctcctgcggctacccgcacctgcttgtggtgcttgagtgcctttgctatttactggagtctctactgcttcctttccaagtgacatgtgttcagttcccacttgagcttcttggttgcaatggcactgccattcatgcatataccgagacatctacaagctcacctcctgcgcaagaatcctcttacttaccaccgtagtttcaaaaaagacatttcaagccccaactccgtcctggagccacatagtgaagagctccacaagatacatcttggtctttcctctggtgtggaggatgcaacaaaatgggagcatataaacataaagagcatagaaccagatggtgcctatgtgattgctagccaactaaatctcgttgaggaacagcaagggggtagctatgttgctagccttgagttggagcttcagcaggcacgggatagagtgagcaagctagaagctgagcggttttcagccaagaagcaactgaatcacttgttcaagaaacttgcagaggagaaagcagcttggcggaacagagagcacaagaaagttcaagccattcttgaagatatgaaggctgatctggagcatgagaaaaagaaccggaggcagttggagactattaacttcaagcttgttgatgagttgaaagaggtcaaaatggccgcgaagcagctattgcaagagtatgacaacgagcagaagacgcgggaactcacggatgaggtgtgcaacaagctagtgagggagatagaggaacacaagtcagagatcgaagccttgaagcaggattctgtcaaactacgcggcgacctggatgaggataggaaattgctacagatggctgaggtgtggcgtgaggagcgagtgcagatgaaacttgtcgatgccaagctcactcttgaggccaaatatgaacagttgagcaaactgcaggaggaggtggaggctttcattttgactttcagctcttccaaaggagacagcacaattgttgaagccgcacacaacattgtacaggccattgggtcggccagagaccaagaggttgaattcacatatgagccaccaagagcatcagaagatatactggccatctttgaagagctacgcccaagtgaagagatggagaaaaaggaaaccgaaccatgcctaaagcaagaaatccaagaagctagcccaacagctgatatatttctggaaaatcgagccagattgttcccagatggaagccattctgatgagagcgataaggaagatggaagcagctgggagaccatgagccatgaagagatgcaaggctcaagccattcgccgtatgaaagtgaacattcagtcaacaagatctttgacagaatttcgtggaccagtggaaatgattctgagggtgagcaggccaacaaactgtgtgatgacttgagcagtgtgtacctgacggacatggaacagtccaagaagaaagagtccgccatatcaaagctgtggaagtcatctccactgaaaaactgtgaattccgtacaaaagatgttgcggatatgataaatgggagattatcaagtgcaagtcttccaaatggtgtgtactctactgccaaaggcttgaatctagatatgggggacagcacccctagcaccacgcaatggagctcaccggattcgatgaacagccagctcaaccggggtttcagaggttgcatggagatggttcagaggcagagcctgaaggcgaagctccttgaagctcggatggagagccagaagattcagctccgccatgtgctcaaccagaaaacttaagttagaaccgcactgtgtcgaaataaaattccaagcattggatttattacatttcccttgtccattgtagtatgtagcttaatctcatgtgtttctgcttcatagaactatatagctagctatagccttgtaggctgacctggccatggttgatgcagctgtctaattgtggcagtacatttgacaggttatgtgcccgtctttatgtgtaatgtggcagtaaactgtaaaccagaagcattattcagactaactgtaccagtactgtagcaggctggcaacaaacaaaatgcatcgttcagacaaactgtaccattggcagtgaagaattttaaaacatctgagaacgtgtttccatcagaag

SEQ ID NO: 13596 - DNA, 4383 bp, Zea Mays
ctcatgagctagggaacccacagttggacaaacaaaacattggacccccccaagccaaggtgacacgtccagctcttatacaggacaaccacacttcacaggaaaaaacaaggcgtgaaagaaagaaccgattttgttctgtttaaatggcatttccggagaggtgttgtgctattcatttgcgtcttgtgaagtgattctagttcagagaaagaaagaagttgagaatgagaagcaagtgaggcgcgtttgctgggaagtggttcttgtgaggtttaggagttcacccttcttttcttccccttctagaaatggagatggtcctacggtcgcagagccctctctgccttcggagtgggccggtgctcatttttcgaccaaccgtcgcgggcggaggagggggcactcagtctttgttgaggactaccagatttgcgagaagaagggtcattcgatgcgttgtagcaagtccaggttgtcctaataggaaatctaggacagcgtctcccaacgtaaaagtagctgcttatagcaactatgcgccaagactcctcgttgagtcaagctccaagaagagcgaacaccatgatagcagcagacaccgtgaagaaactattgatacatacaatgggctgtcaggttctgatgcagcagaattgacaagtaatagagatgtagaaattgaagtggatttgcagcacatttctgaggaggaattgccaggaaaagtatcgattaatgcatcattaggagaaatggaaacagtggatgaagctgaggtcgaggaggataagtttgaggtagatacctcaggaattgtattgcgcaatgttgcagttcgggaagtggatccaaaggatgaacataatgctaaagatgtatttgtggtagattcgtcaggaactgcaccagataatgctgcagtggaggaagtggtagatgaagctgaggttgaagaggatatggttgatgtggatatcttgggacttgacttgaataatgcaacgatcgaggaaattgatttgatggaagaggctttactggagaacttcgacgtggattcaccaggcaatgcttctagtggtcgaacctatgggggtgtggatgagttgggtgagctgccttcaacatccgtggattgcatcgccattaacggaaaacgtagaagtttgaagcctaagcccttgccaattgtcaggttccaggaacaagaacagatagttttaagcattgttgacgaagaagggttgattgctagttcatgtgaagaaggccaaccggtggtagattacgataagcaagaggaaaactctaccgctttcgatgaacagaagcaattaactgatgatttccctgaagaaggcatatctatagttcacttccctgagccaaacaatgatattgttggatcctcaaaattcttggagcaaaaacaagaattggatggttcttataaacaagatcgatcaaccactggattgcatgaacaagatcagtctgttgttagttcacacggacaagataaatcaattgttggtgtgcctcagcaaatccagtacaatgatcaatctattgctggttctcatagacaagatcaatcaattgccggtgcacctgagcaaatccaatccgttgctggctatataaaaccaaatcaatctattgttggttcttgtaaacaacatgaattgattattcctgagcctaagaaaatcgaatccatcatcagttacaatgaaatagatcaatctattgttggttctcacaaacaagacaaatctgttgttagtgtgcctgagcaaatccaatccattgttagtcacagcaaaccaaatcaatctactgttgattcttatagacaagctgaatcaattattggtgtgcctgagaaagtccaatccatcaccagttacgataaactagaccagtccattgttggttctcttaaacaagatgagcctattattagcgtgcctgagaaaatccaatccattgtccattacactaaaccaaatcagtctattgttggcttgcccaaacaacaacaatcaattgttcatatcgttgaaccaaaacagtccatagatggtttccctaaacaagatctatcaatcgttggtatctccaatgagtttcaaacaaagcaactggctactgttgggactcatgatggattgcttatgaagggtgtggaagctaaggagacatctcaaaagactgaaggggatacacttcaggcaacgttcaatgtcgacaacttgtcacagaaacaggaaggcttaactaaagaagcagacgagataacaattattgagaaaatcaatgatgaagaccttgtgatgattgaagaacagaaaagcatagccatgaatgaagaacagacgattgttaccgaagaagacattccaatggctaaggttgagataggaattgacaaggccaaatttttacatctgctttctgaagaagagagttcatgggatgaaaatgaagtgggaataattgaggctgatgaacagtatgaagtcgatgagacatctatgtccactgaacaagatatccaggaatcacctaatgatgatttggatccacaagcactatggagtatgcttcaagagcttgctgaaaaaaattattcgctgggaaacaagttgtttacttatccagatgtattgaaagctgattcaacaattgatctctatttcaatcgtgatctatcagctgtggccaatgagcctgatgtacttatcaaaggagcattcaatgggtggaagtggagatttttcactgaaaaattgcacaagagcgagctggcaggggactggtggtgctgcaaactatacattcctaagcaggcatacagaatggactttgtgttttttaacggacacacggtatatgaaaataataacaataatgatttcgtgatacaaatagaaagcaccatggatgaaaatttatttgaggatttcttggctgaagaaaagcaacgagaacttgagaaccttgcaaatgaggaagctgaaaggaggagacaaactgatgagcagcggcgaatggaggaagaaagggccgcagataaagctgacagggtacaagccaaggttgaggtagagacgaagaagaataaattgtgcaatgtattgggtttagccagagctcctgttgataatttatggtacattgagcccatcacgactggacaagaggctactgtcagattgtattataacataaactcaagacctctagttcacagtactgagatatggatgcatggtggctataacaattggattgatggactctcttttgctgaaaggcttgttcatcatcatgacaaagattgtgattggtggtttgtagatgttgtcgtgcctgaaagaacatatgtattggactgggtttttgctgacggcccaccagggagtgcaaggaattatgacaacaatggaggacatgattttcatgctacccttccaaataacatgactgaggaagagtattggatggaagaagaacaaaggatctatacaaggcttcaacaagagaggagggaaagggaggaggctattaaaaggaaggctgagagaaatgcaaaaatgaaagctgagatgaaggaaaagactatgagaatgttcctggtttctcagaaacacattgtttacaccgaaccacttgaaatacatgctggaactactattgatgtgctttataatccttctaatacagttctaactggaaagccagaggtttggtttcgatgttcatttaatcgttggatgtatccaggtggggtgttgccacctcagaagatggtacaagcagaaaatggttcacacctaaaagtaacagtttacgttccacgagatgcctatatgatggactttgttttctcggagtcagaagaaggtggaatttatgataacagaaatgggttagactatcatattcctgtttttgggtcaattgcaaaggaaccacctatgcacattgtccacatcgctgttgagatggcaccaatcgcaaaggttggaggtcttggtgatgttgtcactagtctttcacgtgctgtgcaagatttaggacacaatgtggaggttattcttccaaagtacggttgcttgaatctaagcaatgtcaagaatctacacatccatcagagtttttcttggggtggttctgaaataaaagtgtggcgtggactagtcgaaggcctttgtgtttacttcctggaacctcaaaatgggatgtttggagtcggatatgtatatggcagggacgatgaccgccgatttggcttcttctgtcgttctgctctagagtttctcctccaaagtggatcttctcctcgaagttgcactgttagcttctcgttaaaac

SEQ ID NO: 13597 - DNA, 4282 bp, Zea Mays
cacagttggacaaacaaaacattggacccccccaagccaaggtgacacgtccagctcttatacaggacaaccacacttcacaggaaaaaacaaggcgtgaaagaaagaaccgattttgttctgtttaaatggcatttccggagaggtgttgtgctattcatttgcgtcttgtgaagtgattctagttcagagaaagaaagaagttgagaatgagaagcaagtgaggcgcgtttgctgggaagtggttcttgtgaggtttaggagttcacccttcttttcttccccttctagaaatggagatggtcctacggtcgcagagccctctctgccttcggagtgggccggtgctcatttttcgaccaaccgtcgcgggcggaggagggggcactcagtctttgttgaggactaccagatttgcgagaagaagggtcattcgatgcgttgtagcaagtccaggttgtcctaataggaaatctaggacagcgtctcccaacgtaaaagtagctgcttatagcaactatgcgccaagactcctcgttgagtcaagctccaagaagagcgaacaccatgatagcagcagacaccgtgaagaaactattgatacatacaatgggctgtcaggttctgatgcagcagaattgacaagtaatagagatgtagaaattgaagtggatttgcagcacatttctgaggaggaattgccaggaaaagtatcgattaatgcatcattaggagaaatggaaacagtggatgaagctgaggtcgaggaggataagtttgaggtagatacctcaggaattgtattgcgcaatgttgcagttcgggaagtggatccaaaggatgaacataatgctaaagatgtatttgtggtagattcgtcaggaactgcaccagataatgctgcagtggaggaagtggtagatgaagctgaggttgaagaggatatggttgatgtggatatcttgggacttgacttgaataatgcaacgatcgaggaaattgatttgatggaagaggctttactggagaacttcgacgtggattcaccaggcaatgcttctagtggtcgaacctatgggggtgtggatgagttgggtgagctgccttcaacatccgtggattgcatcgccattaacggaaaacgtagaagtttgaagcctaagcccttgccaattgtcaggttccaggaacaagaacagatagttttaagcattgttgacgaagaagggttgattgctagttcatgtgaagaaggccaaccggtggtagattacgataagcaagaggaaaactctaccgctttcgatgaacagaagcaattaactgatgatttccctgaagaaggcatatctatagttcacttccctgagccaaacaatgatattgttggatcctcaaaattcttggagcaaaaacaagaattggatggttcttataaacaagatcgatcaaccactggattgcatgaacaagatcagtctgttgttagttcacacggacaagataaatcaattgttggtgtgcctcagcaaatccagtacaatgatcaatctattgctggttctcatagacaagatcaatcaattgccggtgcacctgagcaaatccaatccgttgctggctatataaaaccaaatcaatctattgttggttcttgtaaacaacatgaattgattattcctgagcctaagaaaatcgaatccatcatcagttacaatgaaatagatcaatctattgttggttctcacaaacaagacaaatctgttgttagtgtgcctgagcaaatccaatccattgttagtcacagcaaaccaaatcaatctactgttgattcttatagacaagctgaatcaattattggtgtgcctgagaaagtccaatccatcaccagttacgataaactagaccagtccattgttggttctcttaaacaagatgagcctattattagcgtgcctgagaaaatccaatccattgtccattacactaaaccaaatcagtctattgttggcttgcccaaacaacaacaatcaattgttcatatcgttgaaccaaaacagtccatagatggtttccctaaacaagatctatcaatcgttggtatctccaatgagtttcaaacaaagcaactggctactgttgggactcatgatggattgcttatgaagggtgtggaagctaaggagacatctcaaaagactgaaggggatacacttcaggcaacgttcaatgtcgacaacttgtcacagaaacaggaaggcttaactaaagaagcagacgagataacaattattgagaaaatcaatgatgaagaccttgtgatgattgaagaacagaaaagcatagccatgaatgaagaacagacgattgttaccgaagaagacattccaatggctaaggttgagataggaattgacaaggccaaatttttacatctgctttctgaagaagagagttcatgggatgaaaatgaagtgggaataattgaggctgatgaacagtatgaagtcgatgagacatctatgtccactgaacaagatatccaggaatcacctaatgatgatttggatccacaagcactatggagtatgcttcaagagcttgctgaaaaaaattattcgctgggaaacaagttgtttacttatccagatgtattgaaagctgattcaacaattgatctctatttcaatcgtgatctatcagctgtggccaatgagcctgatgtacttatcaaaggagcattcaatgggtggaagtggagatttttcactgaaaaattgcacaagagcgagctggcaggggactggtggtgctgcaaactatacattcctaagcaggcatacagaatggactttgtgttttttaacggacacacggtatatgaaaataataacaataatgatttcgtgatacaaatagaaagcaccatggatgaaaatttatttgaggatttcttggctgaagaaaagcaacgagaacttgagaaccttgcaaatgaggaagctgaaaggaggagacaaactgatgagcagcggcgaatggaggaagaaagggccgcagataaagctgacagggtacaagccaaggttgaggtagagacgaagaagaataaattgtgcaatgtattgggtttagccagagctcctgttgataatttatggtacattgagcccatcacgactggacaagaggctactgtcagattgtattataacataaactcaagacctctagttcacagtactgagatatggatgcatggtggctataacaattggattgatggactctcttttgctgaaaggcttgttcatcatcatgacaaagattgtgattggtggtttgtagatgttgtcgtgcctgaaagaacatatgtattggactgggtttttgctgacggcccaccagggagtgcaaggaattatgacaacaatggaggacatgattttcatgctacccttccaaataacatgactgaggaagagtattggatggaagaagaacaaaggatctatacaaggcttcaacaagagaggagggaaagggaggaggctattaaaaggaaggctgagagaaatgcaaaaatgaaagctgagatgaaggaaaagactatgagaatgttcctggtttctcagaaacacattgtttacaccgaaccacttgaaatacatgctggaactactattgatgtgctttataatccttctaatacagttctaactggaaagccagaggtttggtttcgatgttcatttaatcgttggatgtatccaggtggggtgttgccacctcagaagatggtacaagcagaaaatggttcacacctaaaagtaacagtttacgttccacgagatgcctatatgatggactttgttttctcggagtcagaagaaggtggaatttatgataacagaaatgggttagactatcatattcctgtttttgggtcaattgcaaaggaaccacctatgcacattgtccacatcgctgttgagatggcaccaatcgcaaaggttggaggtcttggtgatgttgtcactagtctttcacgtgctgtgcaagatttaggacacaatgtggaggttattcttccaaagtacggttgcttgaatctaagcaatgtcaagaatctacacatccatcagagtttttcttggggtggttctgaaataaaagtgtggcgtggactagtcgaaggcctttgtgtttacttcctggaacctcaaaatggccccaatattaccatgagtcttagagctgctgatgaggaaagaaaaaaatg

SEQ ID NO: 13598 - DNA, 6162 bp, Zea Mays
caaaacattggacccccccaagccaaggtgacacgtccagctcttatacaggacaaccacacttcacaggaaaaaacaaggcgtgaaagaaagaaccgattttgttctgtttaaatggcatttccggagaggtgttgtgctattcatttgcgtcttgtgaagtgattctagttcagagaaagaaagaagttgagaatgagaagcaagtgaggcgcgtttgctgggaagtggttcttgtgaggtttaggagttcacccttcttttcttccccttctagaaatggagatggtcctacggtcgcagagccctctctgccttcggagtgggccggtgctcatttttcgaccaaccgtcgcgggcggaggagggggcactcagtctttgttgaggactaccagatttgcgagaagaagggtcattcgatgcgttgtagcaagtccaggttgtcctaataggaaatctaggacagcgtctcccaacgtaaaagtagctgcttatagcaactatgcgccaagactcctcgttgagtcaagctccaagaagagcgaacaccatgatagcagcagacaccgtgaagaaactattgatacatacaatgggctgtcaggttctgatgcagcagaattgacaagtaatagagatgtagaaattgaagtggatttgcagcacatttctgaggaggaattgccaggaaaagtatcgattaatgcatcattaggagaaatggaaacagtggatgaagctgaggtcgaggaggataagtttgaggtagatacctcaggaattgtattgcgcaatgttgcagttcgggaagtggatccaaaggatgaacataatgctaaagatgtatttgtggtagattcgtcaggaactgcaccagataatgctgcagtggaggaagtggtagatgaagctgaggttgaagaggatatggttgatgtggatatcttgggacttgacttgaataatgcaacgatcgaggaaattgatttgatggaagaggctttactggagaacttcgacgtggattcaccaggcaatgcttctagtggtcgaacctatgggggtgtggatgagttgggtgagctgccttcaacatccgtggattgcatcgccattaacggaaaacgtagaagtttgaagcctaagcccttgccaattgtcaggttccaggaacaagaacagatagttttaagcattgttgacgaagaagggttgattgctagttcatgtgaagaaggccaaccggtggtagattacgataagcaagaggaaaactctaccgctttcgatgaacagaagcaattaactgatgatttccctgaagaaggcatatctatagttcacttccctgagccaaacaatgatattgttggatcctcaaaattcttggagcaaaaacaagaattggatggttcttataaacaagatcgatcaaccactggattgcatgaacaagatcagtctgttgttagttcacacggacaagataaatcaattgttggtgtgcctcagcaaatccagtacaatgatcaatctattgctggttctcatagacaagatcaatcaattgccggtgcacctgagcaaatccaatccgttgctggctatataaaaccaaatcaatctattgttggttcttgtaaacaacatgaattgattattcctgagcctaagaaaatcgaatccatcatcagttacaatgaaatagatcaatctattgttggttctcacaaacaagacaaatctgttgttagtgtgcctgagcaaatccaatccattgttagtcacagcaaaccaaatcaatctactgttgattcttatagacaagctgaatcaattattggtgtgcctgagaaagtccaatccatcaccagttacgataaactagaccagtccattgttggttctcttaaacaagatgagcctattattagcgtgcctgagaaaatccaatccattgtccattacactaaaccaaatcagtctattgttggcttgcccaaacaacaacaatcaattgttcatatcgttgaaccaaaacagtccatagatggtttccctaaacaagatctatcaatcgttggtatctccaatgagtttcaaacaaagcaactggctactgttgggactcatgatggattgcttatgaagggtgtggaagctaaggagacatctcaaaagactgaaggggatacacttcaggcaacgttcaatgtcgacaacttgtcacagaaacaggaaggcttaactaaagaagcagacgagataacaattattgagaaaatcaatgatgaagaccttgtgatgattgaagaacagaaaagcatagccatgaatgaagaacagacgattgttaccgaagaagacattccaatggctaaggttgagataggaattgacaaggccaaatttttacatctgctttctgaagaagagagttcatgggatgaaaatgaagtgggaataattgaggctgatgaacagtatgaagtcgatgagacatctatgtccactgaacaagatatccaggaatcacctaatgatgatttggatccacaagcactatggagtatgcttcaagagcttgctgaaaaaaattattcgctgggaaacaagttgtttacttatccagatgtattgaaagctgattcaacaattgatctctatttcaatcgtgatctatcagctgtggccaatgagcctgatgtacttatcaaaggagcattcaatgggtggaagtggagatttttcactgaaaaattgcacaagagcgagctggcaggggactggtggtgctgcaaactatacattcctaagcaggcatacagaatggactttgtgttttttaacggacacacggtatatgaaaataataacaataatgatttcgtgatacaaatagaaagcaccatggatgaaaatttatttgaggatttcttggctgaagaaaagcaacgagaacttgagaaccttgcaaatgaggaagctgaaaggaggagacaaactgatgagcagcggcgaatggaggaagaaagggccgcagataaagctgacagggtacaagccaaggttgaggtagagacgaagaagaataaattgtgcaatgtattgggtttagccagagctcctgttgataatttatggtacattgagcccatcacgactggacaagaggctactgtcagattgtattataacataaactcaagacctctagttcacagtactgagatatggatgcatggtggctataacaattggattgatggactctcttttgctgaaaggcttgttcatcatcatgacaaagattgtgattggtggtttgtagatgttgtcgtgcctgaaagaacatatgtattggactgggtttttgctgacggcccaccagggagtgcaaggaattatgacaacaatggaggacatgattttcatgctacccttccaaataacatgactgaggaagagtattggatggaagaagaacaaaggatctatacaaggcttcaacaagagaggagggaaagggaggaggctattaaaaggaaggctgagagaaatgcaaaaatgaaagctgagatgaaggaaaagactatgagaatgttcctggtttctcagaaacacattgtttacaccgaaccacttgaaatacatgctggaactactattgatgtgctttataatccttctaatacagttctaactggaaagccagaggtttggtttcgatgttcatttaatcgttggatgtatccaggtggggtgttgccacctcagaagatggtacaagcagaaaatggttcacacctaaaagtaacagtttacgttccacgagatgcctatatgatggactttgttttctcggagtcagaagaaggtggaatttatgataacagaaatgggttagactatcatattcctgtttttgggtcaattgcaaaggaaccacctatgcacattgtccacatcgctgttgagatggcaccaatcgcaaaggttggaggtcttggtgatgttgtcactagtctttcacgtgctgtgcaagatttaggacacaatgtggaggttattcttccaaagtacggttgcttgaatctaagcaatgtcaagaatctacacatccatcagagtttttcttggggtggttctgaaataaaagtgtggcgtggactagtcgaaggcctttgtgtttacttcctggaacctcaaaatgggatgtttggagtcggatatgtatatggcagggacgatgaccgccgatttggcttcttctgtcgttctgctctagagtttctcctccaaagtggatcttctcctaacataatacattgccatgattggtcaagtgctcctgttgcctggctacacaaggaaaactacgcgaagtctagcttggcaaatgcacgggtggtattcaccatccacaatcttgaatttggagcgcatcatattggcaaagcaatgagatattgtgataaagccacaactgtctctaatacatattcaaaggaagtgtcaggtcatggtgccatcgttcctcatcttgggaaattctatggcattctgaatggaattgatccagatatatgggatccgtacaatgacaactttatcccggtccactacacttgtgagaatgtggttgaaggcaagagggctgctaagagggcactgcagcagaagtttgggttacagcaaatcgatgtccccgtcgtaggaatcgtcactcgcctgacagcccaaaaggggatccacctgatcaagcatgcgattcaccgtacactcgaacggaacggacaggtggttttgcttggttcagcgccggactctcgaatccaagctgattttgtcaacctggcgaataagctccacggcgtaaaccatgggcaagtgaggctttccttgacctacgacgagcctctctcgcatctgatatacgctggctctgacttcattctggtcccatctatatttgagccttgcggcctaactcagctcgtcgccatgcggtatgggaccatcccgattgtccgcaagactggagggctcttcgacactgtcttcgatgtggacaatgacaaggaacgagcccgagatcgaggccttgagcccaacgggtttagctttgacggagctgatagcaacggtgttgactacgcgctgaacagcttggttcgatgcccggagctggttccactccctttgcaagagagtcatggagcaggactggtcgtggaaccgacctgccctcgactacatcgagctctaccgttcagcgtccaaattgtaataatccaaccaacggccaatgtagtgtgttgtctgcaggtctcagatgcagccattcagcttttgcaggttcctgggcattgctgtacagcctccttgtctttagttagctccattccccgaggagcacagtgcaattttttatcctcagttattatgcatagattgtctcagtagaatgctttcttcgggcatgtatgtttgtttcctctgttgttgaattctggtgttaagtcgtgtataggaatctacaggaaatgaaaaagtccatttcctgcttcaaccttttagggctaccatgcacatgagacctttcaaatgcaaagaatattaggactagactactagtctgtgaactctatttttttccaaggatttctattttttcaaggaaaaataaactaatttttcttcggaaaatggaaatctttttaaaaaatggggttcccaaactagcccgtagagtatagatctagaattggtctagtggtttctcaagaaaaaaaaacatacgccttttcttgtcatatgcttatttaagtttattttgtacaaactttgagatccttcaaaaacaccccaatggctggtgtagtgaccagtgaaataaagaggatcaatggggaggaatcccccacctctctcccgcagatgtcacccagcaccggccaacctcacctgtccagtgaaattaaggttggttgcgacgacagcccatcaatggaaaccaacctcgccccgtgtcgggatctaccttcctcaccaccacgccgatctcaccttccataggagctacctaggcactgttacctattataggtacatgacattgtacatctttgtatgaacttacatcaatgccaaaaatcc

SEQ ID NO: 13599 - DNA, 6051 bp, Zea Mays
cagctcttatacaggacaaccacacttcacaggaaaaaacaaggcgtgaaagaaagaaccgattttgttctgtttaaatggcatttccggagaggtgttgtgctattcatttgcgtcttgtgaagtgattctagttcagagaaagaaagaagttgagaatgagaagcaagtgaggcgcgtttgctgggaagtggttcttgtgaggtttaggagttcacccttcttttcttccccttctagaaatggagatggtcctacggtcgcagagccctctctgccttcggagtgggccggtgctcatttttcgaccaaccgtcgcgggcggaggagggggcactcagtctttgttgaggactaccagatttgcgagaagaagggtcattcgatgcgttgtagcaagtccaggttgtcctaataggaaatctaggacagcgtctcccaacgtaaaagtagctgcttatagcaactatgcgccaagactcctcgttgagtcaagctccaagaagagcgaacaccatgatagcagcagacaccgtgaagaaactattgatacatacaatgggctgtcaggttctgatgcagcagaattgacaagtaatagagatgtagaaattgaagtggatttgcagcacatttctgaggaggaattgccaggaaaagtatcgattaatgcatcattaggagaaatggaaacagtggatgaagctgaggtcgaggaggataagtttgaggtagatacctcaggaattgtattgcgcaatgttgcagttcgggaagtggatccaaaggatgaacataatgctaaagatgtatttgtggtagattcgtcaggaactgcaccagataatgctgcagtggaggaagtggtagatgaagctgaggttgaagaggatatggttgatgtggatatcttgggacttgacttgaataatgcaacgatcgaggaaattgatttgatggaagaggctttactggagaacttcgacgtggattcaccaggcaatgcttctagtggtcgaacctatgggggtgtggatgagttgggtgagctgccttcaacatccgtggattgcatcgccattaacggaaaacgtagaagtttgaagcctaagcccttgccaattgtcaggttccaggaacaagaacagatagttttaagcattgttgacgaagaagggttgattgctagttcatgtgaagaaggccaaccggtggtagattacgataagcaagaggaaaactctaccgctttcgatgaacagaagcaattaactgatgatttccctgaagaaggcatatctatagttcacttccctgagccaaacaatgatattgttggatcctcaaaattcttggagcaaaaacaagaattggatggttcttataaacaagatcgatcaaccactggattgcatgaacaagatcagtctgttgttagttcacacggacaagataaatcaattgttggtgtgcctcagcaaatccagtacaatgatcaatctattgctggttctcatagacaagatcaatcaattgccggtgcacctgagcaaatccaatccgttgctggctatataaaaccaaatcaatctattgttggttcttgtaaacaacatgaattgattattcctgagcctaagaaaatcgaatccatcatcagttacaatgaaatagatcaatctattgttggttctcacaaacaagacaaatctgttgttagtgtgcctgagcaaatccaatccattgttagtcacagcaaaccaaatcaatctactgttgattcttatagacaagctgaatcaattattggtgtgcctgagaaagtccaatccatcaccagttacgataaactagaccagtccattgttggttctcttaaacaagatgagcctattattagcgtgcctgagaaaatccaatccattgtccattacactaaaccaaatcagtctattgttggcttgcccaaacaacaacaatcaattgttcatatcgttgaaccaaaacagtccatagatggtttccctaaacaagatctatcaatcgttggtatctccaatgagtttcaaacaaagcaactggctactgttgggactcatgatggattgcttatgaagggtgtggaagctaaggagacatctcaaaagactgaaggggatacacttcaggcaacgttcaatgtcgacaacttgtcacagaaacaggaaggcttaactaaagaagcagacgagataacaattattgagaaaatcaatgatgaagaccttgtgatgattgaagaacagaaaagcatagccatgaatgaagaacagacgattgttaccgaagaagacattccaatggctaaggttgagataggaattgacaaggccaaatttttacatctgctttctgaagaagagagttcatgggatgaaaatgaagtgggaataattgaggctgatgaacagtatgaagtcgatgagacatctatgtccactgaacaagatatccaggaatcacctaatgatgatttggatccacaagcactatggagtatgcttcaagagcttgctgaaaaaaattattcgctgggaaacaagttgtttacttatccagatgtattgaaagctgattcaacaattgatctctatttcaatcgtgatctatcagctgtggccaatgagcctgatgtacttatcaaaggagcattcaatgggtggaagtggagatttttcactgaaaaattgcacaagagcgagctggcaggggactggtggtgctgcaaactatacattcctaagcaggcatacagaatggactttgtgttttttaacggacacacggtatatgaaaataataacaataatgatttcgtgatacaaatagaaagcaccatggatgaaaatttatttgaggatttcttggctgaagaaaagcaacgagaacttgagaaccttgcaaatgaggaagctgaaaggaggagacaaactgatgagcagcggcgaatggaggaagaaagggccgcagataaagctgacagggtacaagccaaggttgaggtagagacgaagaagaataaattgtgcaatgtattgggtttagccagagctcctgttgataatttatggtacattgagcccatcacgactggacaagaggctactgtcagattgtattataacataaactcaagacctctagttcacagtactgagatatggatgcatggtggctataacaattggattgatggactctcttttgctgaaaggcttgttcatcatcatgacaaagattgtgattggtggtttgtagatgttgtcgtgcctgaaagaacatatgtattggactgggtttttgctgacggcccaccagggagtgcaaggaattatgacaacaatggaggacatgattttcatgctacccttccaaataacatgactgaggaagagtattggatggaagaagaacaaaggatctatacaaggcttcaacaagagaggagggaaagggaggaggctattaaaaggaaggctgagagaaatgcaaaaatgaaagctgagatgaaggaaaagactatgagaatgttcctggtttctcagaaacacattgtttacaccgaaccacttgaaatacatgctggaactactattgatgtggggtgttgccacctcagaagatggtacaagcagaaaatggttcacacctaaaagtaacagtttacgttccacgagatgcctatatgatggactttgttttctcggagtcagaagaaggtggaatttatgataacagaaatgggttagactatcatattcctgtttttgggtcaattgcaaaggaaccacctatgcacattgtccacatcgctgttgagatggcaccaatcgcaaaggttggaggtcttggtgatgttgtcactagtctttcacgtgctgtgcaagatttaggacacaatgtggaggttattcttccaaagtacggttgcttgaatctaagcaatgtcaagaatctacacatccatcagagtttttcttggggtggttctgaaataaaagtgtggcgtggactagtcgaaggcctttgtgtttacttcctggaacctcaaaatgggatgtttggagtcggatatgtatatggcagggacgatgaccgccgatttggcttcttctgtcgttctgctctagagtttctcctccaaagtggatcttctcctaacataatacattgccatgattggtcaagtgctcctgttgcctggctacacaaggaaaactacgcgaagtctagcttggcaaatgcacgggtggtattcaccatccacaatcttgaatttggagcgcatcatattggcaaagcaatgagatattgtgataaagccacaactgtctctaatacatattcaaaggaagtgtcaggtcatggtgccatcgttcctcatcttgggaaattctatggcattctgaatggaattgatccagatatatgggatccgtacaatgacaactttatcccggtccactacacttgtgagaatgtggttgaaggcaagagggctgctaagagggcactgcagcagaagtttgggttacagcaaatcgatgtccccgtcgtaggaatcgtcactcgcctgacagcccaaaaggggatccacctgatcaagcatgcgattcaccgtacactcgaacggaacggacaggtggttttgcttggttcagcgccggactctcgaatccaagctgattttgtcaacctggcgaataagctccacggcgtaaaccatgggcaagtgaggctttccttgacctacgacgagcctctctcgcatctgatatacgctggctctgacttcattctggtcccatctatatttgagccttgcggcctaactcagctcgtcgccatgcggtatgggaccatcccgattgtccgcaagactggagggctcttcgacactgtcttcgatgtggacaatgacaaggaacgagcccgagatcgaggccttgagcccaacgggtttagctttgacggagctgatagcaacggtgttgactacgcgctgaacagggcgatctcagcttggttcgatgcccggagctggttccactccctttgcaagagagtcatggagcaggactggtcgtggaaccgacctgccctcgactacatcgagctctaccgttcagcgtccaaattgtaataatccaaccaacggccaatgtagtgtgttgtctgcaggtctcagatgcagccattcagcttttgcaggttcctgggcattgctgtacagcctccttgtctttagttagctccattccccgaggagcacagtgcaattttttatcctcagttattatgcatagattgtctcagtagaatgctttcttcgggcatgtatgtttgtttcctctgttgttgaattctggtgttaagtcgtgtataggaatctacaggaaatgaaaaagtccatttcctgcttcaaccttttagggctaccatgcacatgagacctttcaaatgcaaagaatattaggactagactactagtctgtgaactctatttttttccaaggatttctattttttcaaggaaaaataaactaatttttcttcggaaaatggaaatctttttaaaaaatggggttcccaaactagcccgtagagtatagatctagaattggtctagtggtttctcaagaaaaaaaaacatacgccttttcttgtcatatgcttatttaagtttattttgtacaaactttgagatccttcaaaaacaccccaatggctggtgtagtgaccagtgaaataaagaggatcaatggggaggaatcccccacctctctcccgcagatgtcacccagcaccggccaacctcacctgtccagtgaaattaaggttggttgcgacgacagcccatcaatggaaaccaacctcgccccgtgtcgggatctaccttcctcaccaccacgccgatctcaccttccataggagctacctaggcactgttacctattataggtacatgacattgtacatctttgtatgaacttacatcaatgccaaaaatcc

SEQ ID NO: 13600 - DNA, 1272 bp, Zea Mays
gcatctgatacgctggctctgacttcattctggtcccatctatatttgagccttgcggcctaactcagctcgtcgccatgcggtatgggaccatcccgattgtccgcaagactggagggctgatctctcgtgctgctgctcgtcagggctcttcgacactgtcttcgatgtggacaatgacaaggaacgagcccgagatcgaggccttgagcccaacgggtttagctttgacggagctgatagcaacggtgttgactacgcgctgaacagggcgatctcagcttggttcgatgcccggagctggttccactccctttgcaagagagtcatggagcaggactggtcgtggaaccgacctgccctcgactacatcgagctctaccgttcagcgtccaaattgtaataatccaaccaacggccaatgtagtgtgttgtctgcaggtctcagatgcagccattcagcttttgcaggttcctgggcattgctgtacagcctccttgtctttagttagctccattccccgaggagcacagtgcaattttttatcctcagttattatgcatagattgtctcagtagaatgctttcttcgggcatgtatgtttgtttcctctgttgttgaattctggtgttaagtcgtgtataggaatctacaggaaatgaaaaagtccatttcctgcttcaaccttttagggctaccatgcacatgagacctttcaaatgcaaagaatattaggactagactactagtctgtgaactctatttttttccaaggatttctattttttcaaggaaaaataaactaatttttcttcggaaaatggaaatctttttaaaaaatggggttcccaaactagcccgtagagtatagatctagaattggtctagtggtttctcaagaaaaaaaaacatacgccttttcttgtcatatgcttatttaagtttattttgtacaaactttgagatccttcaaaaacaccccaatggctggtgtagtgaccagtgaaataaagaggatcaatggggaggaatcccccacctctctcccgcagatgtcacccagcaccggccaacctcacctgtccagtgaaattaaggttggttgcgacgacagcccatcaatggaaaccaacctcgccccgtgtcgggatctaccttcctcaccaccacgccgatctcaccttccataggagctacctaggcactgttacctattataggtacatgacattgtacatctttgtatgaacttacatcaatgccaaaaatcc

SEQ ID NO: 13601 - DNA, 1184 bp, Zea Mays
catatgtcacatttaacacttaaacccttccaccaccagctcaataatctttataaaaaaacccctaacaaaccatgattatatctgtgattagatcgtaatctaatgaaccagatggtttacttgcacgcttgcaaagaaggactgcttgcatagcagtcgttgccgctaagattttaactaggctatttaaaatcttatggttaattttagatgctaaaaattatgtagaaagggtcaaacatgcccttagcttggtggggcccgcaaagccaatccattcgagagcaatccaaggaaaccaagtctcgtcccacctatccccgtgggattgtgtagtgggaaggggtacgttagcgtttgcgtgcgcgtagcaactccccacgcaaagccgccgccgttccctctcgtcttccccagttcccctacgccggtaatcccacgtcctatcagccgccgatccagccttgcttccatccatccatccatccatctcgtcgcttctctctgttccgcgtgcgatcgagtagatcaaaaggaggaggaggatggcgaggagttcgttcaagttggagcaccccttcgaaaggaggcaagctgaggctaaccgcatcagggagaaataccctgacagaatccctgtcattgttgagaaggccgagaggagtgacatcccagacattgacaagaaaaagtcagccatttcacgagtaccttgttcctgccgacctcacagtcggacagtttgtgtatgtggtacggaagcggatcaagctcagcgctgagaaggcaatcttcatcttcgtaaagaacaccctcccaccaacagctgctctgatgtccgccatctacgaggagaacaaggacgaggacggcttcctctacatgacgtacagcggcgagaacaccttcgggctgttctgagtgggagccgctatggatccacattgggcaatgcctcctgtaaatactaaacatgcatcacaagaatctgtgtccatagcataatctggtctgtctgtcattacgcaacttgacgtgcaatgctaaacacatttaagtaataatatatactactctgctttgggatgcttcagaaattatgttaccttctgtatcctccgtgtgcctgtcgacgtgacgaagtaacatgaaggcgtctgcggtggttccacccatttagg

SEQ ID NO: 13602 - DNA, 1004 bp, Zea Mays
catccatccatccattcatccattgatgcgctcatcgccgtccgcgtacgtgctggtgctgcaaaaggaaaggagccgcggctccatccatccatccatccatccatgcaagtcgtcttcctgccgaccggcctgcctgcctctagtacattcgggatcgatcgaggtgggtggctaactaaagctaattaatggcgatatcctcgtgcgtgcatgcacgcaatggccgcgagctagacggggtattgacgcggttcaattcgagagctcgagccctagcagaggccagggggggtggggctctgctctctgattgagccgtgccaatatcacgtcccactcgccctcgcgcgcggacgttgccgccgcggtgtccgtccgtatcacatccgttagttctttgcctcgctgaactctgcattaattaatgtgcgtatattatatcctcaacaatttcccctctttttactgatgacgtgttccagtcaatgtgaatgaatggaaaatggacgtgtttactgatgatcgatatgagctgacaagttattctgggaaccttttattagtagaagcaaatcaatggtcacacgcaacgccatgtctggaaaccagcaaaggaaagctagctggtcataaaccgttcgtacgtgcgagggcaactgatggccactgcaaagctttgtgtgtgtgtgtgtgtaattggagttaccacagagagagcgtccaaccaaaaggacaattgtgataagctctcacgcatgccacctacccccgcgtttacatgatctcccatttcagtctcattctagtaatggttgatgccaagtccttatacatgagcatgagcatgtttggatcgtaacatcccatttcaatctcattctaataaatgatcaatgcggggtgcttatacatgatcatgagagcatgtgttggatccgctggactagttgtagcccaaccaaagtgtaggtgactaaaacttaaatagtcctatgttgttt

SEQ ID NO: 13603 - DNA, 917 bp, Zea Mays
cgcaacgttatccgcatcacccccttccgtaggagaaacggactgaggtgctcagctgacgccggtcgcctcgcagtggcaagtgcccgagcgatgcagcagataatcagcgcctgcaagctgcctcacacgcaacgggccgccgcgttcctgccgccgaggccatcgctcaggcgccttccagtcccaggaggtgcgccgccgccgcggcgattggtggtcaggaggagatgccaggaagagaataagcagcagcaagaggccgaggagggaagcggcgctgacgagcaggagcagcagaagagaacgttcctgagcctggaggaggccgggctggtggagatgtccggactcagcacgcacgagcgcttcctctgccgcctcaccatatcgtctctgaacctcctgagagtgatctcggagcaggagggcgtcccgatagaggagctcaacgccgggcgcgtctgcgactggttcctcaaggacaagctcaagagagagcagaacgtcggcaccgccgtcttgcagtgggacgaccctggcttctagctagttccagcttcgttctgagccaatgatcatgctattctacactgcagcgcacgcaggggctatatatttcagggcttcaggcccttcacgggatgagcaaccaatgccacatgttcagtaatctcagaatttcagtttcaagaatgggcgcatcaatcctggccattccatttatatatctttcggtttggtttcatctttacaaattttctgtagcgacgaacatttttcctgtgcggaaaatgggaaaggaatttacgggtaaactgattttgggagatagatcgagtttcttgcaaataaattctgtcagctccaatttatctcctctgatcgttaatccggttattcaatcgaaaccaaag

SEQ ID NO: 13604 - DNA, 920 bp, Zea Mays
cgcaacgttatccgcatcacccccttccgtaggagaaacggactgaggtgctcagctgacgccggtcgcctcgcagtggcaagtgcccgagcgatgcagcagataatcagcgcctgcaagctgcctcacacgcaacgggccgccgcgttcctgccgccgaggccatcgctcaggcgccttccagtcccagcaggaggtgcgccgccgccgcggcgattggtggtcaggaggagatgccaggaagagaataagcagcagcaagaggccgaggagggaagcggcgctgacgagcaggagcagcagaagagaacgttcctgagcctggaggaggccgggctggtggagatgtccggactcagcacgcacgagcgcttcctctgccgcctcaccatatcgtctctgaacctcctgagagtgatctcggagcaggagggcgtcccgatagaggagctcaacgccgggcgcgtctgcgactggttcctcaaggacaagctcaagagagagcagaacgtcggcaccgccgtcttgcagtgggacgaccctggcttctagctagttccagcttcgttctgagccaatgatcatgctattctacactgcagcgcacgcaggggctatatatttcagggcttcaggcccttcacgggatgagcaaccaatgccacatgttcagtaatctcagaatttcagtttcaagaatgggcgcatcaatcctggccattccatttatatatctttcggtttggtttcatctttacaaattttctgtagcgacgaacatttttcctgtgcggaaaatgggaaaggaatttacgggtaaactgattttgggagatagatcgagtttcttgcaaataaattctgtcagctccaatttatctcctctgatcgttaatccggttattcaatcgaaaccaaag

SEQ ID NO: 13605 - DNA, 1419 bp, Zea Mays
atgaacaacatatatatcatcaacctcaatatctcacaaattcacactaataacatgaaattctgtttctctagaaggatcactaattcatgccgcctggatgacaatgttgccagtattgattacaagttagggtataagcaaatgcattatcctgaaaatgacagttataagtggttagacgatggcccttcccaattaaatgatgatatctcaagtgttaacccaacttgttggaaaaggcaaaggactgaaggtatattccatgagtatgcatattctgataatcttgtaatgatggaagatgtgccaactgaaggttattttgctcacaaacaagagactgagttgattggtccagaagttgaaataccagaatcttgcttcagggctctcaataagccaaatgaaatgacgtccgattttgtgcaaaataaaaccaacttgaaggcacaaacctcaggctaggatgtattatatgacaagtttgaaaagttaaatggggattgcttactcgataatggattttaacatgatggtggtagaacttccaggggcacctgtagagttttgagaaagtccagcaccagtaagaagttggggactgcaactggatgtgttgaagggctagaggttggtgctattgaccagatgaatttcccttatattcatgctctatggaacagtgacttgatagataggtcctccctcaaggatactttaaatcatttttctcacccatccttgttggttgatacaccttgcagtcatccaaggaccttgcacacacttaacaggacatcagataaatgttttcgttcttggaactatgaaaacattgacaacaatgttagatttagcaatgattcatctattatatttgaaggaactaaaatttttgattacatcaacaatgaaatacaaccgcttaattacttcaatgataagtgtggttcaaccgaccagcttggttctgaagaagacctgataacttggaaatcaaaatttgacatgaggttgtcagtcaatatttctcctgagacagcaggtgataatggttgtcatttgaatgttccttctttgaatatggcaaatggcaatctgtttactcaagatttgttgaatcaacacaactctggactaaatcagagacccaaaacttccaagtgtagtagatttagaagtcattctgctccaccattttatggagggagactaaaattctctagattaaatgtgccacttagcaaaccaagcacatatagcgataaagatatctgcgtcaataacccagaagacaatgcacctggacatgtggatatctcatgtataagttcaacccagcctattcctgagactggtagcagtgaatttctagaactaaatttcaggcgccaaaatcgaacagaaagaaagtga

SEQ ID NO: 13606 - DNA, 1633 bp, Zea Mays
atgaacaacatatatatcatcaacctcaatatctcacaaattcacactaataacatgaaatgtgtgtgcaactcaaaatagggataatttgtttcctaatatgctgccaatatttacaactgacaatggcatcctccgcagagaccaaccaaaaaaagttagcattccttgcagctacaggcgaatcaaacatttcttaacaggttcctcatcaatagataaaacccatctcgaagctgtttctagattattaatatgacatttgttttgcatagtctgtttctctagaaggatcactaattcatgccgcctggatgacaatgttgccagtattgattacaagttagggtataagcaaatgcattatcctgaaaatgacagttataagtggttagacgatggcccttcccaattaaatgatgatatctcaagtgttaacccaacttgttggaaaaggcaaaggactgaaggtatattccatgagtatgcatattctgataatcttgtaatgatggaagatgtgccaactgaaggttattttgctcacaaacaagagactgagttgattggtccagaagttgaaataccagaatcttgcttcagggctctcaataagccaaatgaaatgacgtccgattttgtgcaaaataaaaccaacttgaaggcacaaacctcaggctaggatgtattatatgacaagtttgaaaagttaaatggggattgcttactcgataatggattttaacatgatggtggtagaacttccaggggcacctgtagagttttgagaaagtccagcaccagtaagaagttggggactgcaactggatgtgttgaagggctagaggttggtgctattgaccagatgaatttcccttatattcatgctctatggaacagtgacttgatagataggtcctccctcaaggatactttaaatcatttttctcacccatccttgttggttgatacaccttgcagtcatccaaggaccttgcacacacttaacaggacatcagataaatgttttcgttcttggaactatgaaaacattgacaacaatgttagatttagcaatgattcatctattatatttgaaggaactaaaatttttgattacatcaacaatgaaatacaaccgcttaattacttcaatgataagtgtggttcaaccgaccagcttggttctgaagaagacctgataacttggaaatcaaaatttgacatgaggttgtcagtcaatatttctcctgagacagcaggtgataatggttgtcatttgaatgttccttctttgaatatggcaaatggcaatctgtttactcaagatttgttgaatcaacacaactctggactaaatcagagacccaaaacttccaagtgtagtagatttagaagtcattctgctccaccattttatggagggagactaaaattctctagattaaatgtgccacttagcaaaccaagcacatatagcgataaagatatctgcgtcaataacccagaagacaatgcacctggacatgtggatatctcatgtataagttcaacccagcctattcctgagactggtagcagtgaatttctagaactaaatttcaggcgccaaaatcgaacagaaagaaagtga

SEQ ID NO: 13607 - DNA, 1259 bp, Zea Mays
gctccattcccactgccctgttgggcggccttcaaaacacagcccctcctctctctctctaagacgggaaactgcagcacatattaattagtaactagctaggtagaagaagatgagctcgtcgatcagcatgatggaggcgagaatgcctccggggttcaggttccaccccagggatgacgagctcgtgatggactacctcctacaaaagctctccggccatggccaccatgccggcgctgccatcgtcgtcgacgtcgacctcaacaagtgcgagccatgggacctcccagattccgcgtgcgtgggtgggaaggagtggtacttcttcagcctgcgcgaccgcaagtacgcgacggggcagcgcactaaccgcgccacgcactccggctactggaaggccaccggcaaggaccgcgccgtcgtcgccggcggcgaggtggcggtggggatgcgcaagacgctggtcttctaccggggccgcgcgcccagggggaagaagacggagtgggtcatgcacgagttccgcctccacccccatgccgcgccgtgcctgctagcagcagctgcgccaaacaagggtgttctacaagagcagaacaaccagcccaaggccagaatctgaagacgcccgggacggcaccccatcagctgaaccgcaactgccggctgccctgccgcttgcgcccctcgctgacacctacgccgccccaacggttgcagagcaggtgtactgcttctccggtctgccggcactgccattcagaagaccagtgagccttggggaccttctggagttcgacgcctccgagaaggaatctgtcacgacagcgatgaccagtgtctcgaacaacactagttcagtgctggagctggctccaaattgcaactggaaccaggaaaatggcatgtcacggatgtggagcccccttgggatatgagatagatctgtgttgtttgctggatctggatgtatggagtgttagtactgagtggccagtagggttctgctgcttagatttgattagcagtgtgacttgcagattgtgtagattagattatccgttattggactaatggcttggcgtagtatttgtacatattactactgaaggaacagtgtccttatccttgtttggcgtagtatttgtacatagcacctgctaaacttcagacaatcagtgaaagacaaatgtgtacattgtaacatagtgttaagaaactctgagagttgctaagttttcaggctctaagttctg

SEQ ID NO: 13608 - DNA, 3046 bp, Zea Mays
cccaagaccgccgcccctgcacggctgcacgtcaagacctccacgaccacgactggaccgccgccgagcggcgacggcccctccctcctccattcccccgcgtccctctgccggatcctcccgtccccgccgctctccgcccgggcgcggacgttcgaaagattccttccgtgcaccttgttaactaaacaatgaggcagcagactggtaagcgtccctcccaacacagggaatatgaaagagaagaaaggaaggaccaacacaagaggccgtttccccgtgctcaggaaagctctaataatgatgggctggttctttaccgtatactctgtccagacagtttgattggtagtgtcataggaaagcatggcaatgtgataaatgctatcaggcatcagacaagtgccaaagtcaaggttgttgacccgtaccccggtgcagacaaaagggttatcttggtatattgctacgtcaagcatagagaccttgatgctgagggtgatgacaatgagcctgtttgtgcagctcaagatgcattacttagggtgcataatgcaattgttgatgcactgcagacattacataagaatcataaagactctgataagaagagcacagaggaagctaacattcttgtgccagctagtcaggcatcaaatgttataggaaaatctggtgctgtcatcaagcatcttcggtcaacatcaagagcattcattaaagtgagcccaaaagatccaagtgaccctacacattcatgtgctatgagttttgataattttgttcaggagaacttgagtttcgtgttttatgccctggtggaaaaattggcttggttattggaagaggtggggctaccataaagaatataaggcaagagagtggtgcaaggatagatgttgatgatgcaaagaatgacaaggaggaaagtatcattaccattatatccactgagtccaccgatgatgttaagtctgccgctgtggaagctgttttgctgcttcaagccaagatcaatgattctgaggatgatagaatgaatcttcgccttcttgtgccaaataaggttataggctgtcttattggcaggggtggttcaatagtcaatgacatgaggaagaagactaaggcaaacatcctcatttcgaagggcgataagccccggagagcatcttccagtgatgaacttgttgaggtatctggagaagcagacaagctgcgtgatgctcttgttcagataattttaagacttagggaagccgttctgaaagagagtgttgaaagccaaaattctgacagggatggccaactaactgttgctgcctctgattccttatatggaagcagtcttcctttgcctgcattattacctcacaaccaacaaattgcccccttgggctatgatagaagaggtgaacctgagcgagctctggaagtattccctcgtaccagttcgtatgggtatagttccatgcaggtcacggatgatggctatggaggacttccatcctatgcatcaaaggcatatgaagaacatgtaccacgtttggaaatgactgtacctgctagtggcatctcaaaagtaatgggaaaacatggcacaaacttggacaacattagaaagatttctggagctcacattgaaattattgaaccaaaatcctctcgtcatgagcatattgcttacatatctggaacctctgaacagaggcattcggctgagaatttgatcaaagctttcataatgtctacctaagattccttctgtggtctgagaacaccatttcatcaatttgatctcttttgacttctgctatccatagtttccctgggtttgtgaacatcaaacgtagtgttttctcccacctgtccgagttcccaatgaatactgggcatatctgagcaaggtgtactccagtggtagacaaggcactctatgttccttagatcttcaactgttacctatttatgttggcatacttatcataattcgcgtgtcttactctaaattatctcaatgactggaccagttgctgcttactgatatctctttctattgtcctgccaatactgagttgattattccttcacaactacagtagaggggcctgtttctcaacctcaacgtctgattcactttctgcttagtgtagctcttataatttcatcccatcagactgctatctgattcattaggttagtagtaccaatgccctatttggaatttggaatgcgagaatgaacctttcacgaaaggcttgtccaaaactccttgagattcctgtgtttcaaacactctttggaattcccagtgaatgctgttggctgattcatttggtgcttattgagtttttgtatctctactctgcctatgctgctagctgtgaccttagagaggatcttgttccttgtcaatctgactagttcacccattgcttgcttcggtagttcggttcttatatctttgtcatgtcattaccttactctttcatcatcggttccaaagagttgcttgtttttctgctaactctgctgaggaaccataagttctttgtaaacttgcctgaaaaccctagaggcctagacttttaggagcaaccatgtacataagcttagtcacgttcttggatcacaatatgcagatcaattttttagcattctgcaagtgttttgtgatcatgattggtgggcgtctagaaaactattctaacgtttcagttgtctgaaaaactatcttatctttgttgtagccctgcctatgctactaccagcttggatggggcttcttcctgctcagtctgtgactggttcacccattgtgctttgtcctgtcagtaatcgtctaattctttggttattgggttccaaagagtttcatgtttttctgcagtaattaattctactgtggaaccatatattaataagttctttcggaacctggattatagccatacattattcagaagcatccatattccataatcttattcaagcccccctccgtaaaaatctcttaagccctctatcaaactaaatccactccatc

SEQ ID NO: 13609 - DNA, 3117 bp, Zea Mays
gcacggctgcacgtcaagacctccacgaccacgactggaccgccgccgagcggcgacggcccctccctcctccattcccccgcgtccctctgccggatcctcccgtccccgccgctctccgcccgggcgcggacgttcgaaagattccttccgtgcaccttgttaactaaacaatgaggcagcagactggtaagcgtccctcccaacacagggaatatgaaagagaagaaaggaaggaccaacacaagaggccgtttccccgtgctcaggaaagctctaataatgatgggctggttctttaccgtatactctgtccagacagtttgattggtagtgtcataggaaagcatggcaatgtgataaatgctatcaggcatcagacaagtgccaaagtcaaggttgttgacccgtaccccggtgcagacaaaagggttatcttggtatattgctacgtcaagcatagagaccttgatgctgagggtgatgacaatgagcctgtttgtgcagctcaagatgcattacttagggtgcataatgcaattgttgatgcactgcagacattacataagaatcataaagactctgataagaagagcacagaggaagctaacattcttgtgccagctagtcaggcatcaaatgttataggaaaatctggtgctgtcatcaagcatcttcggtcaacatcaagagcattcattaaagtgagcccaaaagatccaagtgaccctacacattcatgtgctatgagttttgataattttgttcagataactggtggtgctgaagctgttaaaaaagcactgtttggagtatcaaccatcatttacaagcacccatcaaaagagaacattcctcttgaaacttcaattcctgatcctactccaagcattataatcccttcagaacttcctgtctatcctgctagtaacttttactcggccccagatgctgctataccttctgtacatccaagcatgtctgtcttagggtcaacacgtcatgttcccgaacttgctgtacctgccgatgatcatggagaacttgagtttcgtgttttatgccctggtggaaaaattggcttggttattggaagaggatgatagaatgaatcttcgccttcttgtgccaaataaggttataggctgtcttattggcaggggtggttcaatagtcaatgacatgaggaagaagactaaggcaaacatcctcatttcgaagggcgataagccccggagagcatcttccagtgatgaacttgttgaggtatctggagaagcagacaagctgcgtgatgctcttgttcagataattttaagacttagggaagccgttctgaaagagagtgttgaaagccaaaattctgacagggatggccaactaactgttgctgcctctgattccttatatggaagcagtcttcctttgcctgcattattacctcacaaccaacaaattgcccccttgggctatgatagaagaggtgaacctgagcgagctctggaagtattccctcgtaccagttcgtatgggtatagttccatgcaggtcacggatgatggctatggaggacttccatcctatgcatcaaaggcatatgaagaacatgtaccacgtttggaaatgactgtacctgctagtggcatctcaaaagtaatgggaaaacatggcacaaacttggacaacattagaaagatttctggagctcacattgaaattattgaaccaaaatcctctcgtcatgagcatattgcttacatatctggaacctctgaacagaggcattcggctgagaatttgatcaaagctttcataatgtctacctaagattccttctgtggtctgagaacaccatttcatcaatttgatctcttttgacttctgctatccatagtttccctgggtttgtgaacatcaaacgtagtgttttctcccacctgtccgagttcccaatgaatactgggcatatctgagcaaggtgtactccagtggtagacaaggcactctatgttccttagatcttcaactgttacctatttatgttggcatacttatcataattcgcgtgtcttactctaaattatctcaatgactggaccagttgctgcttactgatatctctttctattgtcctgccaatactgagttgattattccttcacaactacagtagaggggcctgtttctcaacctcaacgtctgattcactttctgcttagtgtagctcttataatttcatcccatcagactgctatctgattcattaggttagtagtaccaatgccctatttggaatttggaatgcgagaatgaacctttcacgaaaggcttgtccaaaactccttgagattcctgtgtttcaaacactctttggaattcccagtgaatgctgttggctgattcatttggtgcttattgagtttttgtatctctactctgcctatgctgctagctgtgaccttagagaggatcttgttccttgtcaatctgactagttcacccattgcttgcttcggtagttcggttcttatatctttgtcatgtcattaccttactctttcatcatcggttccaaagagttgcttgtttttctgctaactctgctgaggaaccataagttctttgtaaacttgcctgaaaaccctagaggcctagacttttaggagcaaccatgtacataagcttagtcacgttcttggatcacaatatgcagatcaattttttagcattctgcaagtgttttgtgatcatgattggtgggcgtctagaaaactattctaacgtttcagttgtctgaaaaactatcttatctttgttgtagccctgcctatgctactaccagcttggatggggcttcttcctgctcagtctgtgactggttcacccattgtgctttgtcctgtcagtaatcgtctaattctttggttattgggttccaaagagtttcatgtttttctgcagtaattaattctactgtggaaccatatattaataagttctttcggaacctggattatagccatacattattcagaagcatccatattccataatcttattcaagcccccctccgtaaaaatctcttaagccctctatcaaactaaatccactccatc

SEQ ID NO: 13610 - DNA, 3028 bp, Zea Mays
gcacggctgcacgtcaagacctccacgaccacgactggaccgccgccgagcggcgacggcccctccctcctccattcccccgcgtccctctgccggatcctcccgtccccgccgctctccgcccgggcgcggacgttcgaaagattccttccgtgcaccttgttaactaaacaatgaggcagcagactggtaagcgtccctcccaacacagggaatatgaaagagaagaaaggaaggaccaacacaagaggccgtttccccgtgctcaggaaagctctaataatgatgggctggttctttaccgtatactctgtccagacagtttgattggtagtgtcataggaaagcatggcaatgtgataaatgctatcaggcatcagacaagtgccaaagtcaaggttgttgacccgtaccccggtgcagacaaaagggttatcttggtatattgctacgtcaagcatagagaccttgatgctgagggtgatgacaatgagcctgtttgtgcagctcaagatgcattacttagggtgcataatgcaattgttgatgcactgcagacattacataagaatcataaagactctgataagaagagcacagaggaagctaacattcttgtgccagctagtcaggcatcaaatgttataggaaaatctggtgctgtcatcaagcatcttcggtcaacatcaagagcattcattaaagtgagcccaaaagatccaagtgaccctacacattcatgtgctatgagttttgataattttgttcaggagaacttgagtttcgtgttttatgccctggtggaaaaattggcttggttattggaagaggtggggctaccataaagaatataaggcaagagagtggtgcaaggatagatgttgatgatgcaaagaatgacaaggaggaaagtatcattaccattatatccactgagtccaccgatgatgttaagtctgccgctgtggaagctgttttgctgcttcaagccaagatcaatgattctgaggatgatagaatgaatcttcgccttcttgtgccaaataaggttataggctgtcttattggcaggggtggttcaatagtcaatgacatgaggaagaagactaaggcaaacatcctcatttcgaagggcgataagccccggagagcatcttccagtgatgaacttgttgaggtatctggagaagcagacaagctgcgtgatgctcttgttcagataattttaagacttagggaagccgttctgaaagagagtgttgaaagccaaaattctgacagggatggccaactaactgttgctgcctctgattccttatatggaagcagtcttcctttgcctgcattattacctcacaaccaacaaattgcccccttgggctatgatagaagaggtgaacctgagcgagctctggaagtattccctcgtaccagttcgtatgggtatagttccatgcaggtcacggatgatggctatggaggacttccatcctatgcatcaaaggcatatgaagaacatgtaccacgtttggaaatgactgtacctgctagtggcatctcaaaagtaatgggaaaacatggcacaaacttggacaacattagaaagatttctggagctcacattgaaattattgaaccaaaatcctctcgtcatgagcatattgcttacatatctggaacctctgaacagaggcattcggctgagaatttgatcaaagctttcataatgtctacctaagattccttctgtggtctgagaacaccatttcatcaatttgatctcttttgacttctgctatccatagtttccctgggtttgtgaacatcaaacgtagtgttttctcccacctgtccgagttcccaatgaatactgggcatatctgagcaaggtgtactccagtggtagacaaggcactctatgttccttagatcttcaactgttacctatttatgttggcatacttatcataattcgcgtgtcttactctaaattatctcaatgactggaccagttgctgcttactgatatctctttctattgtcctgccaatactgagttgattattccttcacaactacagtagaggggcctgtttctcaacctcaacgtctgattcactttctgcttagtgtagctcttataatttcatcccatcagactgctatctgattcattaggttagtagtaccaatgccctatttggaatttggaatgcgagaatgaacctttcacgaaaggcttgtccaaaactccttgagattcctgtgtttcaaacactctttggaattcccagtgaatgctgttggctgattcatttggtgcttattgagtttttgtatctctactctgcctatgctgctagctgtgaccttagagaggatcttgttccttgtcaatctgactagttcacccattgcttgcttcggtagttcggttcttatatctttgtcatgtcattaccttactctttcatcatcggttccaaagagttgcttgtttttctgctaactctgctgaggaaccataagttctttgtaaacttgcctgaaaaccctagaggcctagacttttaggagcaaccatgtacataagcttagtcacgttcttggatcacaatatgcagatcaattttttagcattctgcaagtgttttgtgatcatgattggtgggcgtctagaaaactattctaacgtttcagttgtctgaaaaactatcttatctttgttgtagccctgcctatgctactaccagcttggatggggcttcttcctgctcagtctgtgactggttcacccattgtgctttgtcctgtcagtaatcgtctaattctttggttattgggttccaaagagtttcatgtttttctgcagtaattaattctactgtggaaccatatattaataagttctttcggaacctggattatagccatacattattcagaagcatccatattccataatcttattcaagcccccctccgtaaaaatctcttaagccctctatcaaactaaatccactccatc

SEQ ID NO: 13611 - DNA, 3296 bp, Zea Mays
gcacggctgcacgtcaagacctccacgaccacgactggaccgccgccgagcggcgacggcccctccctcctccattcccccgcgtccctctgccggatcctcccgtccccgccgctctccgcccgggcgcggacgttcgaaagattccttccgtgcaccttgttaactaaacaatgaggcagcagactggtaagcgtccctcccaacacagggaatatgaaagagaagaaaggaaggaccaacacaagaggccgtttccccgtgctcaggaaagctctaataatgatgggctggttctttaccgtatactctgtccagacagtttgattggtagtgtcataggaaagcatggcaatgtgataaatgctatcaggcatcagacaagtgccaaagtcaaggttgttgacccgtaccccggtgcagacaaaagggttatcttggtatattgctacgtcaagcatagagaccttgatgctgagggtgatgacaatgagcctgtttgtgcagctcaagatgcattacttagggtgcataatgcaattgttgatgcactgcagacattacataagaatcataaagactctgataagaagagcacagaggaagctaacattcttgtgccagctagtcaggcatcaaatgttataggaaaatctggtgctgtcatcaagcatcttcggtcaacatcaagagcattcattaaaataactggtggtgctgaagctgttaaaaaagcactgtttggagtatcaaccatcatttacaagcacccatcaaaagagaacattcctcttgaaacttcaattcctgatcctactccaagcattataatcccttcagaacttcctgtctatcctgctagtaacttttactcggccccagatgctgctataccttctgtacatccaagcatgtctgtcttagggtcaacacgtcatgttcccgaacttgctgtacctgccgatgatcatggtcggctgcctatttatcaatctattcttccagttattcctacttatagtgccccaaaatgttcaggagaacttgagtttcgtgttttatgccctggtggaaaaattggcttggttattggaagaggtggggctaccataaagaatataaggcaagagagtggtgcaaggatagatgttgatgatgcaaagaatgacaaggaggaaagtatcattaccattatatccactgagtccaccgatgatgttaagtctgccgctgtggaagctgttttgctgcttcaagccaagatcaatgattctgaggatgatagaatgaatcttcgccttcttgtgccaaataaggttataggctgtcttattggcaggggtggttcaatagtcaatgacatgaggaagaagactaaggcaaacatcctcatttcgaagggcgataagccccggagagcatcttccagtgatgaacttgttgaggtatctggagaagcagacaagctgcgtgatgctcttgttcagataattttaagacttagggaagccgttctgaaagagagtgttgaaagccaaaattctgacagggatggccaactaactgttgctgcctctgattccttatatggaagcagtcttcctttgcctgcattattacctcacaaccaacaaattgcccccttgggctatgatagaagaggtgaacctgagcgagctctggaagtattccctcgtaccagttcgtatgggtatagttccatgcaggtcacggatgatggctatggaggacttccatcctatgcatcaaaggcatatgaagaacatgtaccacgtttggaaatgactgtacctgctagtggcatctcaaaagtaatgggaaaacatggcacaaacttggacaacattagaaagatttctggagctcacattgaaattattgaaccaaaatcctctcgtcatgagcatattgcttacatatctggaacctctgaacagaggcattcggctgagaatttgatcaaagctttcataatgtctacctaagattccttctgtggtctgagaacaccatttcatcaatttgatctcttttgacttctgctatccatagtttccctgggtttgtgaacatcaaacgtagtgttttctcccacctgtccgagttcccaatgaatactgggcatatctgagcaaggtgtactccagtggtagacaaggcactctatgttccttagatcttcaactgttacctatttatgttggcatacttatcataattcgcgtgtcttactctaaattatctcaatgactggaccagttgctgcttactgatatctctttctattgtcctgccaatactgagttgattattccttcacaactacagtagaggggcctgtttctcaacctcaacgtctgattcactttctgcttagtgtagctcttataatttcatcccatcagactgctatctgattcattaggttagtagtaccaatgccctatttggaatttggaatgcgagaatgaacctttcacgaaaggcttgtccaaaactccttgagattcctgtgtttcaaacactctttggaattcccagtgaatgctgttggctgattcatttggtgcttattgagtttttgtatctctactctgcctatgctgctagctgtgaccttagagaggatcttgttccttgtcaatctgactagttcacccattgcttgcttcggtagttcggttcttatatctttgtcatgtcattaccttactctttcatcatcggttccaaagagttgcttgtttttctgctaactctgctgaggaaccataagttctttgtaaacttgcctgaaaaccctagaggcctagacttttaggagcaaccatgtacataagcttagtcacgttcttggatcacaatatgcagatcaattttttagcattctgcaagtgttttgtgatcatgattggtgggcgtctagaaaactattctaacgtttcagttgtctgaaaaactatcttatctttgttgtagccctgcctatgctactaccagcttggatggggcttcttcctgctcagtctgtgactggttcacccattgtgctttgtcctgtcagtaatcgtctaattctttggttattgggttccaaagagtttcatgtttttctgcagtaattaattctactgtggaaccatatattaataagttctttcggaacctggattatagccatacattattcagaagcatccatattccataatcttattcaagcccccctccgtaaaaatctcttaagccctctatcaaactaaatccactccatc

SEQ ID NO: 13612 - DNA, 3349 bp, Zea Mays
ccttatccaaactatcggcgctggtcctgtcgccccgttctcaatcgattccgaattcctctttcttccattccaagagagttttgccccctccgctgagatggccgacgtggattccttctttgcgtgctcggcgcgctgctgattcgttaactaaacaatgaggcagcagactggtaagcgtccctcccaacacagggaatatgaaagagaagaaaggaaggaccaacacaagaggccgtttccccgtgctcaggaaagctctaataatgatgggctggttctttaccgtatactctgtccagacagtttgattggtagtgtcataggaaagcatggcaatgtgataaatgctatcaggcatcagacaagtgccaaagtcaaggttgttgacccgtaccccggtgcagacaaaagggttatcttggtatattgctacgtcaagcatagagaccttgatgctgagggtgatgacaatgagcctgtttgtgcagctcaagatgcattacttagggtgcataatgcaattgttgatgcactgcagacattacataagaatcataaagactctgataagaagagcacagaggaagctaacattcttgtgccagctagtcaggcatcaaatgttataggaaaatctggtgctgtcatcaagcatcttcggtcaacatcaagagcattcattaaagtgagcccaaaagatccaagtgaccctacacattcatgtgctatgagttttgataattttgttcagataactggtggtgctgaagctgttaaaaaagcactgtttggagtatcaaccatcatttacaagcacccatcaaaagagaacattcctcttgaaacttcaattcctgatcctactccaagcattataatcccttcagaacttcctgtctatcctgctagtaacttttactcggccccagatgctgctataccttctgtacatccaagcatgtctgtcttagggtcaacacgtcatgttcccgaacttgctgtacctgccgatgatcatggtcggctgcctatttatcaatctattcttccagttattcctacttatagtgccccaaaatgttcaggagaacttgagtttcgtgttttatgccctggtggaaaaattggcttggttattggaagaggtggggctaccataaagaatataaggcaagagagtggtgcaaggatagatgttgatgatgcaaagaatgacaaggaggaaagtatcattaccattatatccactgagtccaccgatgatgttaagtctgccgctgtggaagctgttttgctgcttcaagccaagatcaatgattctgaggatgatagaatgaatcttcgccttcttgtgccaaataaggttataggctgtcttattggcaggggtggttcaatagtcaatgacatgaggaagaagactaaggcaaacatcctcatttcgaagggcgataagccccggagagcatcttccagtgatgaacttgttgaggtatctggagaagcagacaagctgcgtgatgctcttgttcagataattttaagacttagggaagccgttctgaaagagagtgttgaaagccaaaattctgacagggatggccaactaactgttgctgcctctgattccttatatggaagcagtcttcctttgcctgcattattacctcacaaccaacaaattgcccccttgggctatgatagaagaggtgaacctgagcgagctctggaagtattccctcgtaccagttcgtatgggtatagttccatgcaggtcacggatgatggctatggaggacttccatcctatgcatcaaaggcatatgaagaacatgtaccacgtttggaaatgactgtacctgctagtggcatctcaaaagtaatgggaaaacatggcacaaacttggacaacattagaaagatttctggagctcacattgaaattattgaaccaaaatcctctcgtcatgagcatattgcttacatatctggaacctctgaacagaggcattcggctgagaatttgatcaaagctttcataatgtctacctaagattccttctgtggtctgagaacaccatttcatcaatttgatctcttttgacttctgctatccatagtttccctgggtttgtgaacatcaaacgtagtgttttctcccacctgtccgagttcccaatgaatactgggcatatctgagcaaggtgtactccagtggtagacaaggcactctatgttccttagatcttcaactgttacctatttatgttggcatacttatcataattcgcgtgtcttactctaaattatctcaatgactggaccagttgctgcttactgatatctctttctattgtcctgccaatactgagttgattattccttcacaactacagtagaggggcctgtttctcaacctcaacgtctgattcactttctgcttagtgtagctcttataatttcatcccatcagactgctatctgattcattaggttagtagtaccaatgccctatttggaatttggaatgcgagaatgaacctttcacgaaaggcttgtccaaaactccttgagattcctgtgtttcaaacactctttggaattcccagtgaatgctgttggctgattcatttggtgcttattgagtttttgtatctctactctgcctatgctgctagctgtgaccttagagaggatcttgttccttgtcaatctgactagttcacccattgcttgcttcggtagttcggttcttatatctttgtcatgtcattaccttactctttcatcatcggttccaaagagttgcttgtttttctgctaactctgctgaggaaccataagttctttgtaaacttgcctgaaaaccctagaggcctagacttttaggagcaaccatgtacataagcttagtcacgttcttggatcacaatatgcagatcaattttttagcattctgcaagtgttttgtgatcatgattggtgggcgtctagaaaactattctaacgtttcagttgtctgaaaaactatcttatctttgttgtagccctgcctatgctactaccagcttggatggggcttcttcctgctcagtctgtgactggttcacccattgtgctttgtcctgtcagtaatcgtctaattctttggttattgggttccaaagagtttcatgtttttctgcagtaattaattctactgtggaaccatatattaataagttctttcggaacctggattatagccatacattattcagaagcatccatattccataatcttattcaagcccccctccgtaaaaatctcttaagccctctatcaaactaaatccactccatc

SEQ ID NO: 13613 - DNA, 3293 bp, Zea Mays
ctcagggccctccttgacaagtcccagtgtcctgtgctatgtgctgaattctggccgtctgcagtgactaggtttcctccggctaggtttaggttaactaaacaatgaggcagcagactggtaagcgtccctcccaacacagggaatatgaaagagaagaaaggaaggaccaacacaagaggccgtttccccgtgctcaggaaagctctaataatgatgggctggttctttaccgtatactctgtccagacagtttgattggtagtgtcataggaaagcatggcaatgtgataaatgctatcaggcatcagacaagtgccaaagtcaaggttgttgacccgtaccccggtgcagacaaaagggttatcttggtatattgctacgtcaagcatagagaccttgatgctgagggtgatgacaatgagcctgtttgtgcagctcaagatgcattacttagggtgcataatgcaattgttgatgcactgcagacattacataagaatcataaagactctgataagaagagcacagaggaagctaacattcttgtgccagctagtcaggcatcaaatgttataggaaaatctggtgctgtcatcaagcatcttcggtcaacatcaagagcattcattaaagtgagcccaaaagatccaagtgaccctacacattcatgtgctatgagttttgataattttgttcagataactggtggtgctgaagctgttaaaaaagcactgtttggagtatcaaccatcatttacaagcacccatcaaaagagaacattcctcttgaaacttcaattcctgatcctactccaagcattataatcccttcagaacttcctgtctatcctgctagtaacttttactcggccccagatgctgctataccttctgtacatccaagcatgtctgtcttagggtcaacacgtcatgttcccgaacttgctgtacctgccgatgatcatggtcggctgcctatttatcaatctattcttccagttattcctacttatagtgccccaaaatgttcaggagaacttgagtttcgtgttttatgccctggtggaaaaattggcttggttattggaagaggtggggctaccataaagaatataaggcaagagagtggtgcaaggatagatgttgatgatgcaaagaatgacaaggaggaaagtatcattaccattatatccactgagtccaccgatgatgttaagtctgccgctgtggaagctgttttgctgcttcaagccaagatcaatgattctgaggatgatagaatgaatcttcgccttcttgtgccaaataaggttataggctgtcttattggcaggggtggttcaatagtcaatgacatgaggaagaagactaaggcaaacatcctcatttcgaagggcgataagccccggagagcatcttccagtgatgaacttgttgaggtatctggagaagcagacaagctgcgtgatgctcttgttcagataattttaagacttagggaagccgttctgaaagagagtgttgaaagccaaaattctgacagggatggccaactaactgttgctgcctctgattccttatatggaagcagtcttcctttgcctgcattattacctcacaaccaacaaattgcccccttgggctatgatagaagaggtgaacctgagcgagctctggaagtattccctcgtaccagttcgtatgggtatagttccatgcaggtcacggatgatggctatggaggacttccatcctatgcatcaaaggcatatgaagaacatgtaccacgtttggaaatgactgtacctgctagtggcatctcaaaagtaatgggaaaacatggcacaaacttggacaacattagaaagatttctggagctcacattgaaattattgaaccaaaatcctctcgtcatgagcatattgcttacatatctggaacctctgaacagaggcattcggctgagaatttgatcaaagctttcataatgtctacctaagattccttctgtggtctgagaacaccatttcatcaatttgatctcttttgacttctgctatccatagtttccctgggtttgtgaacatcaaacgtagtgttttctcccacctgtccgagttcccaatgaatactgggcatatctgagcaaggtgtactccagtggtagacaaggcactctatgttccttagatcttcaactgttacctatttatgttggcatacttatcataattcgcgtgtcttactctaaattatctcaatgactggaccagttgctgcttactgatatctctttctattgtcctgccaatactgagttgattattccttcacaactacagtagaggggcctgtttctcaacctcaacgtctgattcactttctgcttagtgtagctcttataatttcatcccatcagactgctatctgattcattaggttagtagtaccaatgccctatttggaatttggaatgcgagaatgaacctttcacgaaaggcttgtccaaaactccttgagattcctgtgtttcaaacactctttggaattcccagtgaatgctgttggctgattcatttggtgcttattgagtttttgtatctctactctgcctatgctgctagctgtgaccttagagaggatcttgttccttgtcaatctgactagttcacccattgcttgcttcggtagttcggttcttatatctttgtcatgtcattaccttactctttcatcatcggttccaaagagttgcttgtttttctgctaactctgctgaggaaccataagttctttgtaaacttgcctgaaaaccctagaggcctagacttttaggagcaaccatgtacataagcttagtcacgttcttggatcacaatatgcagatcaattttttagcattctgcaagtgttttgtgatcatgattggtgggcgtctagaaaactattctaacgtttcagttgtctgaaaaactatcttatctttgttgtagccctgcctatgctactaccagcttggatggggcttcttcctgctcagtctgtgactggttcacccattgtgctttgtcctgtcagtaatcgtctaattctttggttattgggttccaaagagtttcatgtttttctgcagtaattaattctactgtggaaccatatattaataagttctttcggaacctggattatagccatacattattcagaagcatccatattccataatcttattcaagcccccctccgtaaaaatctcttaagccctctatcaaactaaatccactccatc

SEQ ID NO: 13614 - DNA, 3421 bp, Zea Mays
gttgtactcactcagatggttgcattgtgtagcactatctttcatgtgcttccttgttctaatttgtgccatcgatgaccaaacctagtttggttgtcatttgttgcttccaaatctagttccttgtcatgttgccttgttggtttagttactgggttggagggctctagtaagtataacaaatgttgcatcccctgtggctgcattgtgccgagtcgttgttaactaaacaatgaggcagcagactggtaagcgtccctcccaacacagggaatatgaaagagaagaaaggaaggaccaacacaagaggccgtttccccgtgctcaggaaagctctaataatgatgggctggttctttaccgtatactctgtccagacagtttgattggtagtgtcataggaaagcatggcaatgtgataaatgctatcaggcatcagacaagtgccaaagtcaaggttgttgacccgtaccccggtgcagacaaaagggttatcttggtatattgctacgtcaagcatagagaccttgatgctgagggtgatgacaatgagcctgtttgtgcagctcaagatgcattacttagggtgcataatgcaattgttgatgcactgcagacattacataagaatcataaagactctgataagaagagcacagaggaagctaacattcttgtgccagctagtcaggcatcaaatgttataggaaaatctggtgctgtcatcaagcatcttcggtcaacatcaagagcattcattaaagtgagcccaaaagatccaagtgaccctacacattcatgtgctatgagttttgataattttgttcagataactggtggtgctgaagctgttaaaaaagcactgtttggagtatcaaccatcatttacaagcacccatcaaaagagaacattcctcttgaaacttcaattcctgatcctactccaagcattataatcccttcagaacttcctgtctatcctgctagtaacttttactcggccccagatgctgctataccttctgtacatccaagcatgtctgtcttagggtcaacacgtcatgttcccgaacttgctgtacctgccgatgatcatggtcggctgcctatttatcaatctattcttccagttattcctacttatagtgccccaaaatgttcaggagaacttgagtttcgtgttttatgccctggtggaaaaattggcttggttattggaagaggtggggctaccataaagaatataaggcaagagagtggtgcaaggatagatgttgatgatgcaaagaatgacaaggaggaaagtatcattaccattatatccactgagtccaccgatgatgttaagtctgccgctgtggaagctgttttgctgcttcaagccaagatcaatgattctgaggatgatagaatgaatcttcgccttcttgtgccaaataaggttataggctgtcttattggcaggggtggttcaatagtcaatgacatgaggaagaagactaaggcaaacatcctcatttcgaagggcgataagccccggagagcatcttccagtgatgaacttgttgaggtatctggagaagcagacaagctgcgtgatgctcttgttcagataattttaagacttagggaagccgttctgaaagagagtgttgaaagccaaaattctgacagggatggccaactaactgttgctgcctctgattccttatatggaagcagtcttcctttgcctgcattattacctcacaaccaacaaattgcccccttgggctatgatagaagaggtgaacctgagcgagctctggaagtattccctcgtaccagttcgtatgggtatagttccatgcaggtcacggatgatggctatggaggacttccatcctatgcatcaaaggcatatgaagaacatgtaccacgtttggaaatgactgtacctgctagtggcatctcaaaagtaatgggaaaacatggcacaaacttggacaacattagaaagatttctggagctcacattgaaattattgaaccaaaatcctctcgtcatgagcatattgcttacatatctggaacctctgaacagaggcattcggctgagaatttgatcaaagctttcataatgtctacctaagattccttctgtggtctgagaacaccatttcatcaatttgatctcttttgacttctgctatccatagtttccctgggtttgtgaacatcaaacgtagtgttttctcccacctgtccgagttcccaatgaatactgggcatatctgagcaaggtgtactccagtggtagacaaggcactctatgttccttagatcttcaactgttacctatttatgttggcatacttatcataattcgcgtgtcttactctaaattatctcaatgactggaccagttgctgcttactgatatctctttctattgtcctgccaatactgagttgattattccttcacaactacagtagaggggcctgtttctcaacctcaacgtctgattcactttctgcttagtgtagctcttataatttcatcccatcagactgctatctgattcattaggttagtagtaccaatgccctatttggaatttggaatgcgagaatgaacctttcacgaaaggcttgtccaaaactccttgagattcctgtgtttcaaacactctttggaattcccagtgaatgctgttggctgattcatttggtgcttattgagtttttgtatctctactctgcctatgctgctagctgtgaccttagagaggatcttgttccttgtcaatctgactagttcacccattgcttgcttcggtagttcggttcttatatctttgtcatgtcattaccttactctttcatcatcggttccaaagagttgcttgtttttctgctaactctgctgaggaaccataagttctttgtaaacttgcctgaaaaccctagaggcctagacttttaggagcaaccatgtacataagcttagtcacgttcttggatcacaatatgcagatcaattttttagcattctgcaagtgttttgtgatcatgattggtgggcgtctagaaaactattctaacgtttcagttgtctgaaaaactatcttatctttgttgtagccctgcctatgctactaccagcttggatggggcttcttcctgctcagtctgtgactggttcacccattgtgctttgtcctgtcagtaatcgtctaattctttggttattgggttccaaagagtttcatgtttttctgcagtaattaattctactgtggaaccatatattaataagttctttcggaacctggattatagccatacattattcagaagcatccatattccataatcttattcaagcccccctccgtaaaaatctcttaagccctctatcaaactaaatccactccatc

SEQ ID NO: 13615 - DNA, 2457 bp, Zea Mays
cggcgccctgcagaccgcagttcgactcggcaggcagctggccaaccgccgagccggcggaccaccagactcggagacctcctccgcaaatgcgagccagcaggcgcccttgactcctgtggttgcagttcccgcctgctcttcttccagagttcccgctgcccggcttcggcggttggcggctggtgcggaggcgtccgcaggattacggcggcatccgcagcaaccaggccccgggcctatccagcacgcaagcacggtgcacggcagtgcccgtcgccggttcgcccctctacactgcgttagtgctttgcgtagcacagcggctcgggaatgtttcttctatcattgatggctaatgggtcgttagaagagcacaaagatttatatctccaatgatcctgtcacggtggctcaaatgcactgctgaatggttcaggcacagtaaggatttatcgcgggaagttccttcttgcaactactccgtactcgcttcagttcaccatgatgactcaagcggtgatgaaaggctgaattatgcttctgataatgagcctatccagaaacagcagaagtctttgagctcttacagtgttgtgcaggctctccgctgcctaaggaggaagcctgcagttgcatttgcctactttaaagatatacatagccttggttttaaccatgacttctcaacctactcagagatcatacaaattttatcccattcattccaggggaagatgttggtatccttgttttgtgagattctttcgggaactgctaatggtgacccagaaatcttaacacttattggtcacttgagcaaaacttgtgccacttctcacatactctcatatgcagtcaattgcttaatcaaggcatacactaacagccacgacgtacaagaaacagtagagatgttttgtcacctttgcaggcttggatttgttcctacactttgggcttgcagtttccttatcaaatttgtatcccagagtggtgattcagatatggttgttagagcttatgatcaaatgaagtgctttcagttgatgctggatactcaatcattgaacatagtcattaggtcgttttttgaagtaaataaggcagaagaatcatttcaagtgtgggttaggatgattgaaatgggaatgaaacctgatgcacatggatactcatcatttataattggcctttgtgattgtggaaagtacgatctagcttataacatggtaagcaaatacactgttcttcatgagatcacccaggaaagggttgcaattgagtccatcgcttataatatggtaattgatggactatgcaaagaaatgaaactggaggaggctgaaaaagtcttggacatcaagaccagacatggatctacccctgatctatatggttatagctatctcattcgtagttattgcaaaatgggtaacttagaaaaggtgtggcattatattgaagccatggtatcccatggcatcgagataaattgttacattgttggttaccttctacagtgcctcaagaagctaggcatgatatctgaagttattgttcacttccagaaatttagagatctaggactccatcttgacggcgttctttataacattgctatggatgcttattgcaagcttgggaacatgaatgaggcagttaagctactaactgaaatgatggcgggaggtttggtcccagacaaaatccactatacatgcctgatcaatggttattgtctgaaaggagaaatggaaaatgcctggcaagtatttgagcagatgctgaaggaaaatgtaaaaccagatgtagtaacatataacatattggccagtgggtatagcaggaatggcactgttattaaggtatatgaccttcttgagcacatgatgaatcaagggttggagcctaattcactcacctatggtgtagctattactagtttttgtagaggaggcaacttgagcgaagcagaggtattatttaatatagtagaagaaaaagggatagataatattgaactgctgtacagttctatggtttgtggttatttgcactcgggctggactgaccatgctcacgcactttttcttagagttgctaaacaaggaaatatggtggatcaattttcatgttcaaaattgataaatggcctctgcatagatgaaaaggttgaggaggcttcaaccgtgtgtagtatgatgctggaaaagaatgttattcctgatgtaatttcatatagcaaacttatttcagcttattgtcagaacagagatatgcacaatgctcacttatggttccttgatatggatgaaagaggactttctgatgtcattgtatacactatactgatgaatggttatgcaaggttggtcggttgcagaagcatgtgacttatttgttcaaatgataaatttaggatcaagccctgatgtagttgcatacacagtgcta

SEQ ID NO: 13616 - DNA, 2413 bp, Zea Mays
ccgcagttcgactcggcaggcagctggccaaccgccgagccggcggaccaccagactcggagacctcctccgcaaatgcgagccagcaggcgcccttgactcctgtggttgcagttcccgcctgctcttcttccagagttcccgctgcccggcttcggcggttggcggctggtgcggaggcgtccgcaggattacggcggcatccgcagcaaccaggccccgggcctatccagcacgcaagcacggtgcacggcagtgcccgtcgccggttcgcccctctacactgcgaatgtttcttctatcattgatggctaatgggtcgttagaagagcacaaagatttatatctccaatgatcctgtcacggtggctcaaatgcactgctgaatggttcaggcacagtaaggatttatcgcgggaagttccttcttgcaactactccgtactcgcttcagttcaccatgatgactcaagcggtgatgaaaggctgaattatgcttctgataatgagcctatccagaaacagcagaagtctttgagctcttacagtgttgtgcaggctctccgctgcctaaggaggaagcctgcagttgcatttgcctactttaaagatatacatagccttggttttaaccatgacttctcaacctactcagagatcatacaaattttatcccattcattccaggggaagatgttggtatccttgttttgtgagattctttcgggaactgctaatggtgacccagaaatcttaacacttattggtcacttgagcaaaacttgtgccacttctcacatactctcatatgcagtcaattgcttaatcaaggcatacactaacagccacgacgtacaagaaacagtagagatgttttgtcacctttgcaggcttggatttgttcctacactttgggcttgcagtttccttatcaaatttgtatcccagagtggtgattcagatatggttgttagagcttatgatcaaatgaagtgctttcagttgatgctggatactcaatcattgaacatagtcattaggtcgttttttgaagtaaataaggcagaagaatcatttcaagtgtgggttaggatgattgaaatgggaatgaaacctgatgcacatggatactcatcatttataattggcctttgtgattgtggaaagtacgatctagcttataacatggtaagcaaatacactgttcttcatgagatcacccaggaaagggttgcaattgagtccatcgcttataatatggtaattgatggactatgcaaagaaatgaaactggaggaggctgaaaaagtcttggacatcaagaccagacatggatctacccctgatctatatggttatagctatctcattcgtagttattgcaaaatgggtaacttagaaaaggtgtggcattatattgaagccatggtatcccatggcatcgagataaattgttacattgttggttaccttctacagtgcctcaagaagctaggcatgatatctgaagttattgttcacttccagaaatttagagatctaggactccatcttgacggcgttctttataacattgctatggatgcttattgcaagcttgggaacatgaatgaggcagttaagctactaactgaaatgatggcgggaggtttggtcccagacaaaatccactatacatgcctgatcaatggttattgtctgaaaggagaaatggaaaatgcctggcaagtatttgagcagatgctgaaggaaaatgtaaaaccagatgtagtaacatataacatattggccagtgggtatagcaggaatggcactgttattaaggtatatgaccttcttgagcacatgatgaatcaagggttggagcctaattcactcacctatggtgtagctattactagtttttgtagaggaggcaacttgagcgaagcagaggtattatttaatatagtagaagaaaaagggatagataatattgaactgctgtacagttctatggtttgtggttatttgcactcgggctggactgaccatgctcacgcactttttcttagagttgctaaacaaggaaatatggtggatcaattttcatgttcaaaattgataaatggcctctgcatagatgaaaaggttgaggaggcttcaaccgtgtgtagtatgatgctggaaaagaatgttattcctgatgtaatttcatatagcaaacttatttcagcttattgtcagaacagagatatgcacaatgctcacttatggttccttgatatggatgaaagaggactttctgatgtcattgtatacactatactgatgaatggttatgcaaggttggtcggttgcagaagcatgtgacttatttgttcaaatgataaatttaggatcaagccctgatgtagttgcatacacagtgcta

SEQ ID NO: 13617 - DNA, 935 bp, Zea Mays
gaaacggccttgggatggttgatagcagcaagatgcacagaatgacagccgatcaaggacagtggaagatgagacaaggttgcactaagcccttctgtcctgggaggggaattggttacccccactgacgaaagagatgcaagcaaagaaaaacttgttgtctgcataggaacagggccaccattctcttgattagatgacagttgtgttcttaggatcctacctgattcggttattggtgctagtgatcggtgggcctatgtcaggaatgtggacacctggagcatggaaagattgctctctcagggtcaaggagaagaacataatgcacttactttcgttgtcggtatcaacgactaccaatggagctgtgcaaacaccatcctggctaagttgtctgtggcagtggcacctccaccatttatgggggtttactggtttattttgtggctgcaactagtggattctcagacaaccaaaagcaagaaaacaggtcctggaggcttggggggctctcgatgctcctgattccatgctgtgccacatccattaagctgtaatgagagggcaagctgattgttgttggggattctcactgtctgaagacagcctctcttgcagaaacactgatgtgtgtttgtgtccccatcagtaggtaacagacttaagctttatgggcaatgaaggatccccagtcttttgttcagagataatatctccgaagttaagagacatgggcctgttgttgtatgttgaaacggaccaattcattggtcctactcacaactgttagaaatgtattagggtttatggggtatttaccatttcacccctctgtctgtaatgggccaggcccaactcagtctactattaatatacaggcccaccctagtatagggttagggtttcattctacatggtatcagagggcttcc

SEQ ID NO: 13618 - DNA, 785 bp, Zea Mays
agaaaaacttgttgtctgcataggaacagggccaccattctcttgattagatgttgtgttcttaggatcctacctgattcggttattggtgctagtgatcggtgggcctatgtcaggaatgtggacacctggagcatggaaagattgctctctcagggtcaaggagaagaacataatgcacttactttcgttgtcggtatcaacgactaccaatggagctgtgcaaacaccatcctggctaagttgtctgtggcagtggcacctccaccatttatgggggtttactggtttattttgtggctgcaactagtggattctcagacaaccaaaagcaagaaaacaggtcctggaggcttggggggctctcgatgctcctgattccatgctgtgccacatccattaagctgtaatgagagggcaagctgattgttgttggggattctcactgtctgaagacagcctctcttgcagaaacactgatgtgtgtttgtgtccccatcagtaggtaacagacttaagctttatgggcaatgaaggatccccagtcttttgttcagagataatatctccgaagttaagagacatgggcctgttgttgtatgttgaaacggaccaattcattggtcctactcacaactgttagaaatgtattagggtttatggggtatttaccatttcacccctctgtctgtaatgggccaggcccaactcagtctactattaatatacaggcccaccctagtatagggttagggtttcattctacatggtatcagagggcttcc

SEQ ID NO: 13619 - DNA, 741 bp, Zea Mays
aaaaacttgttgtctgcataggaacagggccaccattctcttgattagatgtgatcggtgggcctatgtcaggaatgtggacacctggagcatggaaagattgctctctcagggtcaaggagaagaacataatgcacttactttcgttgtcggtatcaacgactaccaatggagctgtgcaaacaccatcctggctaagttgtctgtggcagtggcacctccaccatttatgggggtttactggtttattttgtggctgcaactagtggattctcagacaaccaaaagcaagaaaacaggtcctggaggcttggggggctctcgatgctcctgattccatgctgtgccacatccattaagctgtaatgagagggcaagctgattgttgttggggattctcactgtctgaagacagcctctcttgcagaaacactgatgtgtgtttgtgtccccatcagtaggtaacagacttaagctttatgggcaatgaaggatccccagtcttttgttcagagataatatctccgaagttaagagacatgggcctgttgttgtatgttgaaacggaccaattcattggtcctactcacaactgttagaaatgtattagggtttatggggtatttaccatttcacccctctgtctgtaatgggccaggcccaactcagtctactattaatatacaggcccaccctagtatagggttagggtttcattctacatggtatcagagggcttcc

SEQ ID NO: 13620 - DNA, 641 bp, Zea Mays
ctctcttcttcgttcttcctattgcttttttagagtggtgctcactattccttcctcgctgatctgctccacctacactcgtccagtcctccctgacctcaagcaacatcacctctgcccctctagtttcccctcgtcgacgactctggtgctccggtcgctcaggccgttgagaaactgatgacgtcgttgaggagccggtaaagtatccctccatggatcttgatccgaacgccaaggcggcagagcatgagcttgaggatcacaacaagcgtctggatgaatttccttatttggaactggcactagcagtaatgcaaatgtggccatagatgttgatgtggtgctgttgaacctgaccgggacggtgactggctcctcgagccccactaccactggtagcactgctcgtgacaaccgaccaaggaagaggctagcgacatctagggtttgggctgacttcgaggaagtaactaggatcgacgagaaaggtaagaaggtaaggatctctgatatttctatggtagtaaatgattatggaatagcaaataaatttttttgcaattaccttagacaatgctacttcaaacaaaattgttgtctcttcttgaacctatctttactggttaccttgactttgg

SEQ ID NO: 13621 - DNA, 3149 bp, Zea Mays
gtccagcgccgccttcgtcccggacgatgtaccggccggtggccgcgcgccagcggcttcctcgccgtgaccacctccactcctccagcatcagcacgccgatgctgtaggcgtcgcttttctccgtcagctgctggctgctgcaacatcccaaagtgtcgcattcatccagcattaattcacttgccgtcgatgtcgttgcctgccgacgtcgtctccggcgccgacgtcccagttttccaatgctcgttgccgccaccgccggctcttgcccctcaagtcctcacacttacgatggaccggttggcccacagttgcatctcgcagatgatggtcaacccgcctcattcctacctgctacccgttggtttgtcgataggcaacgaacccctccaaagcaacgctgaactcctgtatcgaagtttttgatgacctgagcccgttgacttggtggattggagaaggcagcagcacatcactatctggttcttgtgttcttgctgcaatcagtcgagattcaggctgctttggatatacttgcaatccttgacaggattattaaggatttggaaggatcctagggaatagttgaatcaataattttggggggaaattaccctcatccctccagaatggagaacaagtcagatgaccttcagcacgagcatgtctgctgcatggaagtagcttactcccacctgatgatggttacatctggaaggcgcgcgcgcagaacattgttccaggctgtgaatatcccaccatgtattacaagtgcgcccaggacaactgcaacacaaataaattggtggtatgctctgctgatggtcatcaggttcttgagacggttcttagtggttgccacaaccacccacgtcagcaagattgtgatctacccatacccaaggtatcaaaaacggatacttcaatgcctgtgtccagagagggagatgatgagcaactttcaagttcaagtgatagcgatgaagatgatgttgaccaagcaagagttgaaggtgatggcagtgtaactagacatgtgccacatccagctgaaaggatcactgcacaaactggaactgcaaattctcaccgacatgctggtagaagaagaccgaagtccaaggtgtgggaagaattcagtgctgtgttaagagatgacaaaattcaatgggccgaatgtaagcactgtaaaatgagccttggtggaacaagcacaggaagaacaacccatctgcggcggcatcttaagatctgtccagcgctacctgcaactgatcggatgcagaaacagaggtcatctccacatcctggttccaccattgagagcatctggaagttcgatcaagacagatctcttgaattgctcatcaaggttttagtgtccaaccttttctcctctccattgacaagcagcacaacttttagacagctatgggctggcatctgccctactaatgatgtgttatcggacgctgctattgaagagaagtttctcagtatttttgagaatgaaaagcttaagcttaaggaggaaatagcacttgcacctggcggagtttttctgacagctgcaagcagttctcttgaaactaagaacttcatctttttgaccgtgcacttcattgataaagaatggaacttgaataggaaaatcattagatgttgctttacggggtgtgaagactttgatgctgagtattttgttagcatgtttccgaatttgcaatcatgccacaatttcattaatgggaatgtgagagcagctgaagaagaaatagtgaaagaggcagtacaaaattggaggcttgagtggaagcttctaggaatttcatcacgtaagtcattagctgatgctgctgtactggctcttgagaagaatcttacagaacagaactatcttcttgccaaatagatggtacttaactttccactcattggaagctgctttgcagtttaacaatgagctgccagaccctcaacagatagactccagatattatccagctaagccatcttttgcacagctaaaagcagcagagaacttttgtgatcttgtaagggcgatttaccatgcagtaaaagtagtttccagaacttgcaatggggccttgaattcacaatttcacgcaatttggaacttgaagatggctctgctccgttcatctacaaaggaaaacatcgaccaagtttttaatattgaacaaatgaagctgaaatttgaccagctttggaggaaatggtacctatggctgtcgttagctgttgttctagatcccagatataaattcaggtttcttcttgtttgctttaaggaagcctttggtagtcatgccaaaaggtacatctttgaagtgcgaggaaagctgtatgagctctttcttcagtactcttgtcatgttgatcaacaaaatagtgacagctttgatcagagaaccaatgatttacagttggatacacatggtagcacaccagtgcatgccacaagtcaaaatttcattgagcaagcagcacatgaggaactgggagaagtcattagataccttgaagcagagcttattcctcaaaatgccaattttgatattttgaaatggtggaaggaaaatgctttgacatatccagctcttgccaggctggcttgcgacatcttagcaattcctggatctgcggtctctgctgaatctgcatttgatgaaactgatgaacgggtgggacttttcaatctgaagctgagtcctgaattagttgaggccctcgtctgcacccaggattggatcaaatcttcagaaataatttctgacgaagttggtggaaatataaatatgcctgcctagtgcacagcaagctccctcggccgtttcattggttcaataaaaaaatgaagagccctttagaccttctcagtataatgcgtgacggagtctaattggcaatgcttgttttgttgtgctattcagcgtgcaaaatatgaacaatattagtcttttattaagtcaattttgcagtacatggctgaaatatggaatgtgtactatgtgaatggctgaaatatattaaaaaaaacttcaaaacccaataattgtttttgctgacggatcagatttgaggtgagatgtgccatatatatttatctttgaagaacgtaataa

SEQ ID NO: 13622 - DNA, 3442 bp, Zea Mays
ctcgccgtgaccacctccactcctccagcatcagcacgccgatgctgtaggcgtcgcttttctccgtcagctgctggctgctgcaacatcccaaagtgtcgcattcatccagcattaattcacttgccgtcgatgtcgttgcctgccgacgtcgtctccggcgccgacgtcccagttttccaatgctcgttgccgccaccgccggctcttgcccctcaagtcctcacacttacgatggaccggttggcccacagttgcatctcgcagatgatggtcaacccgcctcattcctacctgctacccgttggtttgtcgataggtgcagtttttaattacgtttgttattttacactacaattggcactcaccctctcatatgccaccactttataaaaaggcaacgaacccctccaaagcaacgctgaactcctgtatcgaagtttttgatgacctgagcccgttgacttggtggattggagaaggcagcagcacatcactatctggttcttgtgttcttgctgcaatcagtcgagattcaggctgctttggatatacttgcaatccttgacaggattattaaggatttggaaggatcctagggaatagttgaatcaataattttggggggaaattaccctcatccctccagaatggagaacaagtcagatgaccttcagcacgagcatggtatgcccgatcagacgtctcgtcccttcacttcactcttactgtcggcaacatctgtcgcccaagcagcacaacaagataccggttctgacatcaaatcgcttagtctgctgcatggaagtagcttactcccacctgatgatggttacatctggaaggcgcgcgcgcagaacattgttccaggctgtgaatatcccaccatgtattacaagtgcgcccaggacaactgcaacacaaataaattggtggtatgctctgctgatggtcatcaggttcttgagacggttcttagtggttgccacaaccacccacgtcagcaagattgtgatctacccatacccaaggtatcaaaaacggatacttcaatgcctgtgtccagagagggagatgatgagcaactttcaagttcaagtgatagcgatgaagatgatgttgaccaagcaagagttgaagacatgtgccacatccagctgaaaggatcactgcacaaactggaactgcaaattctcaccgacatgctggtagaagaagaccgaagtccaaggtgtgggaagaattcagtgctgtgttaagagatgacaaaattcaatgggccgaatgtaagcactgtaaaatgagccttggtggaacaagcacaggaagaacaacccatctgcggcggcatcttaagatctgtccagcgctacctgcaactgatcggatgcagaaacagaggtcatctccacatcctggttccaccattgagagcatctggaagttcgatcaagacagatctcttgaattgctcatcaaggttttagtgtccaaccttttctcctctccattgacaagcagcacaacttttagacagctatgggctggcatctgccctactaatgatgtgttatcggacgctgctattgaagagaagtttctcagtatttttgagaatgaaaagcttaagcttaaggaggaaatagcacttgcacctggcggagtttttctgacagctgcaagcagttctcttgaaactaagaacttcatctttttgaccgtgcacttcattgataaagaatggaacttgaataggaaaatcattagatgttgctttacggggtgtgaagactttgatgctgagtattttgttagcatgtttccgaatttgcaatcatgccacaatttcattaatgggaatgtgagagcagctgaagaagaaatagtgaaagaggcagtacaaaattggaggcttgagtggaagcttctaggaatttcatcacgtaagtcattagctgatgctgctgtactggctcttgagaagaatcttacagaacagaactatcttcttgccaaatgtaagttgttgaatctcccctgcataatagatgccctaaatgacctttttggttatgaaatcaatgaatatgtactaagtacaagtaagatgtggtttcagtacatgacatgcaccccactacgtagggataaatacaaagaaatcctgtcacgcctgcaaataaaccgaccttcttttggttcgcagagatggtacttaactttccactcattggaagctgctttgcagtttaacaatgagctgccagaccctcaacagatagactccagatattatccagctaagccatcttttgcacagctaaaagcagcagagaacttttgtgatcttgtaagggcgatttaccatgcagtaaaagtagtttccagaacttgcaatggggccttgaattcacaatttcacgcaatttggaacttgaagatggctctgctccgttcatctacaaaggaaaacatcgaccaagtttttaatattgaacaaatgaagctgaaatttgaccagctttggaggaaatggtacctatggctgtcgttagctgttgttctagatcccagatataaattcaggtttcttcttgtttgctttaaggaagcctttggtagtcatgccaaaaggtacatctttgaagtgcgaggaaagctgtatgagctctttcttcagtactcttgtcatgttgatcaacaaaatagtgacagctttgatcagagaaccaatgatttacagttggatacacatggtagcacaccagtgcatgccacaagtcaaaatttcattgagcaagcagcacatgaggaactgggagaagtcattagataccttgaagcagagcttattcctcaaaatgccaattttgatattttgaaatggtggaaggaaaatgctttgacatatccagctcttgccaggctggcttgcgacatcttagcaattcctggatctgcggtctctgctgaatctgcatttgatgaaactgatgaacgggtgggacttttcaatctgaagctgagtcctgaattagttgaggccctcgtctgcacccaggattggatcaaatcttcagaaataatttctgacgaagttggtggaaatataaatatgcctgcctagtgcacagcaagctccctcggccgtttcattggttcaataaaaaaatgaagagccctttagaccttctcagtataatgcgtgacggagtctaattggcaatgcttgttttgttgtgctattcagcgtgcaaaatatgaacaatattagtcttttattaagtcaattttgcagtacatggctgaaatatggaatgtgtactatgtgaatggctgaaatatattaaaaaaaacttcaaaacccaataattgtttttgctgacggatcagatttgaggtgagatgtgccatatatatttatctttgaagaacgtaataa

SEQ ID NO: 13623 - DNA, 4120 bp, Zea Mays
acctccactcctccagcatcagcacgccgatgctgtaggcgtcgcttttctccgtcagctgctggctgctgcaacatcccaaagtgtcgcattcatccagcattaattcacttgccgtcgatgtcgttgcctgccgacgtcgtctccggcgccgacgtcccagttttccaatgctcgttgccgccaccgccggctcttgcccctcaagtcctcacacttacgatggaccggttggcccacagttgcatctcgcagatgatggtcaacccgcctcattcctacctgctacccgttggtttgtcgataggcaacgaacccctccaaagcaacgctgaactcctgtatcgaagtttttgatgacctgagcccgttgacttggtggattggagaaggcagcagcacatcactatctggttcttgtgttcttgctgcaatcagtcgagattcaggctgctttggatatacttgcaatccttgacaggtgattgatttgctttctttatacctgagcttcactttcatcccaacataactgatgcttgatttgctttctttatgcctgaccttcacttgcatcccaaaataactgatgctttaggtttgtcttaaatcaagccatttagggctagttttgaaactcaaatccccttcagaattggaggaaattgaaggggaaataaactaatttcaccctcattccccttcaatcccagaggggatttgagattccagactagcccttaagtttttttagggtgggggtggcaggatttcccacctgagttcgttatattacattgctggtacgttggcctttaaagactgaacttaacaatttgcatttgggggagtacggggaatagagtcactggctaagccattttaattccaaatttatagaaaataatcataatatttatgacaacaaatatgtataacatgaaaatatatatcataataaatctacaatattcatttggtaccatagacattaatcgtttttattaaattttatcaattttataattgtttgaattaggacaagcctaaaatatcagttattttgggtcggaggaagtatatttgtattttttcattgtgtgcttctgcttaggattttactaggatctagatatctctatatcgaagggcagctgtctcaccgagtcatcaaatcgtggagcgatatttgcagggaagacttgcctcgatttatcccttctatagaccttactcatgtgagagcctccggcaacggagtctgcccctagatatctgcatatcatgggaatatgaaaaggctatcctgtcctgtatatctatttctgttttgtaggattattaaggatttggaaggatcctagggaatagttgaatcaataattttggggggaaattaccctcatccctccagaatggagaacaagtcagatgaccttcagcacgagcatgtctgctgcatggaagtagcttactcccacctgatgatggttacatctggaaggcgcgcgcgcagaacattgttccaggctgtgaatatcccaccatgtattacaagtgcgcccaggacaactgcaacacaaataaattggtggtatgctctgctgatggtcatcaggttcttgagacggttcttagtggttgccacaaccacccacgtcagcaagattgtgatctacccatacccaaggtatcaaaaacggatacttcaatgcctgtgtccagagagggagatgatgagcaactttcaagttcaagtgatagcgatgaagatgatgttgaccaagcaagagttgaaggtgatggcagtgtaactagacatgtgccacatccagctgaaaggatcactgcacaaactggaactgcaaattctcaccgacatgctggtagaagaagaccgaagtccaaggtgtgggaagaattcagtgctgtgttaagagatgacaaaattcaatgggccgaatgtaagcactgtaaaatgagccttggtggaacaagcacaggaagaacaacccatctgcggcggcatcttaagatctgtccagcgctacctgcaactgatcggatgcagaaacagaggtcatctccacatcctggttccaccattgagagcatctggaagttcgatcaagacagatctcttgaattgctcatcaaggttttagtgtccaaccttttctcctctccattgacaagcagcacaacttttagacagctatgggctggcatctgccctactaatgatgtgttatcggacgctgctattgaagagaagtttctcagtatttttgagaatgaaaagcttaagcttaaggaggaaatagcacttgcacctggcggagtttttctgacagctgcaagcagttctcttgaaactaagaacttcatctttttgaccgtgcacttcattgataaagaatggaacttgaataggaaaatcattagatgttgctttacggggtgtgaagactttgatgctgagtattttgttagcatgtttccgaatttgcaatcatgccacaatttcattaatgggaatgtgagagcagctgaagaagaaatagtgaaagaggcagtacaaaattggaggcttgagtggaagcttctaggaatttcatcacgtaagtcattagctgatgctgctgtactggctcttgagaagaatcttacagaacagaactatcttcttgccaaatgtaagttgttgaatctcccctgcataatagatgccctaaatgacctttttggttatgaaatcaatgaatatgtactaagtacaagtaagatgtggtttcagtacatgacatgcaccccactacgtagggataaatacaaagaaatcctgtcacgcctgcaaataaaccgaccttcttttggttcgcagagatggtacttaactttccactcattggaagctgctttgcagtttaacaatgagctgccagaccctcaacagatagactccagatattatccagctaagccatcttttgcacagctaaaagcagcagagaacttttgtgatcttgtaagggcgatttaccatgcagtaaaagtagtttccagaacttgcaatggggccttgaattcacaatttcacgcaatttggaacttgaagatggctctgctccgttcatctacaaaggaaaacatcgaccaagtttttaatattgaacaaatgaagctgaaatttgaccagctttggaggaaatggtacctatggctgtcgttagctgttgttctagatcccagatataaattcaggtttcttcttgtttgctttaaggaagcctttggtagtcatgccaaaaggtacatctttgaagtgcgaggaaagctgtatgagctctttcttcagtactcttgtcatgttgatcaacaaaatagtgacagctttgatcagagaaccaatgatttacagttggatacacatggtagcacaccagtgcatgccacaagtcaaaatttcattgagcaagcagcacatgaggaactgggagaagtcattagataccttgaagcagagcttattcctcaaaatgccaattttgatattttgaaatggtggaaggaaaatgctttgacatatccagctcttgccaggctggcttgcgacatcttagcaattcctggatctgcggtctctgctgaatctgcatttgatgaaactgatgaacgggtgggacttttcaatctgaagctgagtcctgaattagttgaggccctcgtctgcacccaggattggatcaaatcttcagaaataatttctgacgaagttggtggaaatataaatatgcctgcctagtgcacagcaagctccctcggccgtttcattggttcaataaaaaaatgaagagccctttagaccttctcagtataatgcgtgacggagtctaattggcaatgcttgttttgttgtgctattcagcgtgcaaaatatgaacaatattagtcttttattaagtcaattttgcagtacatggctgaaatatggaatgtgtactatgtgaatggctgaaatatattaaaaaaaacttcaaaacccaataattgtttttgctgacggatcagatttgaggtgagatgtgccatatatatttatctttgaagaacgtaataa

SEQ ID NO: 13624 - DNA, 4283 bp, Zea Mays
ctccactcctccagcatcagcacgccgatgctgtaggcgtcgcttttctccgtcagctgctggctgctgcaacatcccaaagtgtcgcattcatccagcattaattcacttgccgtcgatgtcgttgcctgccgacgtcgtctccggcgccgacgtcccagttttccaatgctcgttgccgccaccgccggctcttgcccctcaagtcctcacacttacgatggaccggttggcccacagttgcatctcgcagatgatggtcaacccgcctcattcctacctgctacccgttggtttgtcgataggtgcagtttttaattacgtttgttattttacactacaattggcactcaccctctcatatgccaccactttataaaaaggcaacgaacccctccaaagcaacgctgaactcctgtatcgaagtttttgatgacctgagcccgttgacttggtggattggagaaggcagcagcacatcactatctggttcttgtgttcttgctgcaatcagtcgagattcaggctgctttggatatacttgcaatccttgacaggtgattgatttgctttctttatacctgagcttcactttcatcccaacataactgatgcttgatttgctttctttatgcctgaccttcacttgcatcccaaaataactgatgctttaggtttgtcttaaatcaagccatttagggctagttttgaaactcaaatccccttcagaattggaggaaattgaaggggaaataaactaatttcaccctcattccccttcaatcccagaggggatttgagattccagactagcccttaagtttttttagggtgggggtggcaggatttcccacctgagttcgttatattacattgctggtacgttggcctttaaagactgaacttaacaatttgcatttgggggagtacggggaatagagtcactggctaagccattttaattccaaatttatagaaaataatcataatatttatgacaacaaatatgtataacatgaaaatatatatcataataaatctacaatattcatttggtaccatagacattaatcgtttttattaaattttatcaattttataattgtttgaattaggacaagcctaaaatatcagttattttgggtcggaggaagtatatttgtattttttcattgtgtgcttctgcttaggattttactaggatctagatatctctatatcgaagggcagctgtctcaccgagtcatcaaatcgtggagcgatatttgcagggaagacttgcctcgatttatcccttctatagaccttactcatgtgagagcctccggcaacggagtctgcccctagatatctgcatatcatgggaatatgaaaaggctatcctgtcctgtatatctatttctgttttgtaggattattaaggatttggaaggatcctagggaatagttgaatcaataattttggggggaaattaccctcatccctccagaatggagaacaagtcagatgaccttcagcacgagcatggtatgcccgatcagacgtctcgtcccttcacttcactcttactgtcggcaacatctgtcgcccaagcagcacaacaagataccggttctgacatcaaatcgcttagtctgctgcatggaagtagcttactcccacctgatgatggttacatctggaaggcgcgcgcgcagaacattgttccaggctgtgaatatcccaccatgtattacaagtgcgcccaggacaactgcaacacaaataaattggtggtatgctctgctgatggtcatcaggttcttgagacggttcttagtggttgccacaaccacccacgtcagcaagattgtgatctacccatacccaaggtatcaaaaacggatacttcaatgcctgtgtccagagagggagatgatgagcaactttcaagttcaagtgatagcgatgaagatgatgttgaccaagcaagagttgaagacatgtgccacatccagctgaaaggatcactgcacaaactggaactgcaaattctcaccgacatgctggtagaagaagaccgaagtccaaggtgtgggaagaattcagtgctgtgttaagagatgacaaaattcaatgggccgaatgtaagcactgtaaaatgagccttggtggaacaagcacaggaagaacaacccatctgcggcggcatcttaagatctgtccagcgctacctgcaactgatcggatgcagaaacagaggtcatctccacatcctggttccaccattgagagcatctggaagttcgatcaagacagatctcttgaattgctcatcaaggttttagtgtccaaccttttctcctctccattgacaagcagcacaacttttagacagctatgggctggcatctgccctactaatgatgtgttatcggacgctgctattgaagagaagtttctcagtatttttgagaatgaaaagcttaagcttaaggaggaaatagcacttgcacctggcggagtttttctgacagctgcaagcagttctcttgaaactaagaacttcatctttttgaccgtgcacttcattgataaagaatggaacttgaataggaaaatcattagatgttgctttacggggtgtgaagactttgatgctgagtattttgttagcatgtttccgaatttgcaatcatgccacaatttcattaatgggaatgtgagagcagctgaagaagaaatagtgaaagaggcagtacaaaattggaggcttgagtggaagcttctaggaatttcatcacgtaagtcattagctgatgctgctgtactggctcttgagaagaatcttacagaacagaactatcttcttgccaaatgtaagttgttgaatctcccctgcataatagatgccctaaatgacctttttggttatgaaatcaatgaatatgtactaagtacaagtaagatgtggtttcagtacatgacatgcaccccactacgtagggataaatacaaagaaatcctgtcacgcctgcaaataaaccgaccttcttttggttcgcagagatggtacttaactttccactcattggaagctgctttgcagtttaacaatgagctgccagaccctcaacagatagactccagatattatccagctaagccatcttttgcacagctaaaagcagcagagaacttttgtgatcttgtaagggcgatttaccatgcagtaaaagtagtttccagaacttgcaatggggccttgaattcacaatttcacgcaatttggaacttgaagatggctctgctccgttcatctacaaaggaaaacatcgaccaagtttttaatattgaacaaatgaagctgaaatttgaccagctttggaggaaatggtacctatggctgtcgttagctgttgttctagatcccagatataaattcaggtttcttcttgtttgctttaaggaagcctttggtagtcatgccaaaaggtacatctttgaagtgcgaggaaagctgtatgagctctttcttcagtactcttgtcatgttgatcaacaaaatagtgacagctttgatcagagaaccaatgatttacagttggatacacatggtagcacaccagtgcatgccacaagtcaaaatttcattgagcaagcagcacatgaggaactgggagaagtcattagataccttgaagcagagcttattcctcaaaatgccaattttgatattttgaaatggtggaaggaaaatgctttgacatatccagctcttgccaggctggcttgcgacatcttagcaattcctggatctgcggtctctgctgaatctgcatttgatgaaactgatgaacgggtgggacttttcaatctgaagctgagtcctgaattagttgaggccctcgtctgcacccaggattggatcaaatcttcagaaataatttctgacgaagttggtggaaatataaatatgcctgcctagtgcacagcaagctccctcggccgtttcattggttcaataaaaaaatgaagagccctttagaccttctcagtataatgcgtgacggagtctaattggcaatgcttgttttgttgtgctattcagcgtgcaaaatatgaacaatattagtcttttattaagtcaattttgcagtacatggctgaaatatggaatgtgtactatgtgaatggctgaaatatattaaaaaaaacttcaaaacccaataattgtttttgctgacggatcagatttgaggtgagatgtgccatatatatttatctttgaagaacgtaataa

SEQ ID NO: 13625 - DNA, 3383 bp, Zea Mays
cattaattcacttgccgtcgatgtcgttgcctgccgacgtcgtctccggcgccgacgtcccagttttccaatgctcgttgccgccaccgccggctcttgcccctcaagtcctcacacttacgatggaccggttggcccacagttgcatctcgcagatgatggtcaacccgcctcattcctacctgctacccgttggtttgtcgataggtgcagtttttaattacgtttgttattttacactacaattggcactcaccctctcatatgccaccactttataaaaaggcaacgaacccctccaaagcaacgctgaactcctgtatcgaagtttttgatgacctgagcccgttgacttggtggattggagaaggcagcagcacatcactatctggttcttgtgttcttgctgcaatcagtcgagattcaggctgctttggatatacttgcaatccttgacaggattttactaggatctagatatctctatatcgaagggcagctgtctcaccgagtcatcaaatcgtggagcgatatttgcagggaagacttgcctcgatttatcccttctatagaccttactcatgtgagagcctccggcaacggagtctgcccctagatatctgcatatcatgggaatatgaaaaggctatcctgtcctgtatatctatttctgttttgtaggattattaaggatttggaaggatcctagggaatagttgaatcaataattttggggggaaattaccctcatccctccagaatggagaacaagtcagatgaccttcagcacgagcatggtatgcccgatcagacgtctcgtcccttcacttcactcttactgtcggcaacatctgtcgcccaagcagcacaacaagataccggttctgacatcaaatcgcttagtctgctgcatggaagtagcttactcccacctgatgatggttacatctggaaggcgcgcgcgcagaacattgttccaggctgtgaatatcccaccatgtattacaagtgcgcccaggacaactgcaacacaaataaattggtggtatgctctgctgatggtcatcaggttcttgagacggttcttagtggttgccacaaccacccacgtcagcaagattgtgatctacccatacccaaggtatcaaaaacggatacttcaatgcctgtgtccagagagggagatgatgagcaactttcaagttcaagtgatagcgatgaagatgatgttgaccaagcaagagttgaaggtgatggcagtgtaactagacatgtgccacatccagctgaaaggatcactgcacaaactggaactgcaaattctcaccgacatgctggtagaagaagaccgaagtccaaggtgtgggaagaattcagtgctgtgttaagagatgacaaaattcaatgggccgaatgtaagcactgtaaaatgagccttggtggaacaagcacaggaagaacaacccatctgcggcggcatcttaagatctgtccagcgctacctgcaactgatcggatgcagaaacagaggtcatctccacatcctggttccaccattgagagcatctggaagttcgatcaagacagatctcttgaattgctcatcaaggttttagtgtccaaccttttctcctctccattgacaagcagcacaacttttagacagctatgggctggcatctgccctactaatgatgtgttatcggacgctgctattgaagagaagtttctcagtatttttgagaatgaaaagcttaagcttaaggaggaaatagcacttgcacctggcggagtttttctgacagctgcaagcagttctcttgaaactaagaacttcatctttttgaccgtgcacttcattgataaagaatggaacttgaataggaaaatcattagatgttgctttacggggtgtgaagactttgatgctgagtattttgttagcatgtttccgaatttgcaatcatgccacaatttcattaatgggaatgtgagagcagctgaagaagaaatagtgaaagaggcagtacaaaattggaggcttgagtggaagcttctaggaatttcatcacgtaagtcattagctgatgctgctgtactggctcttgagaagaatcttacagaacagaactatcttcttgccaaatagatggtacttaactttccactcattggaagctgctttgcagtttaacaatgagctgccagaccctcaacagatagactccagatattatccagctaagccatcttttgcacagctaaaagcagcagagaacttttgtgatcttgtaagggcgatttaccatgcagtaaaagtagtttccagaacttgcaatggggccttgaattcacaatttcacgcaatttggaacttgaagatggctctgctccgttcatctacaaaggaaaacatcgaccaagtttttaatattgaacaaatgaagctgaaatttgaccagctttggaggaaatggtacctatggctgtcgttagctgttgttctagatcccagatataaattcaggtttcttcttgtttgctttaaggaagcctttggtagtcatgccaaaaggtacatctttgaagtgcgaggaaagctgtatgagctctttcttcagtactcttgtcatgttgatcaacaaaatagtgacagctttgatcagagaaccaatgatttacagttggatacacatggtagcacaccagtgcatgccacaagtcaaaatttcattgagcaagcagcacatgaggaactgggagaagtcattagataccttgaagcagagcttattcctcaaaatgccaattttgatattttgaaatggtggaaggaaaatgctttgacatatccagctcttgccaggctggcttgcgacatcttagcaattcctggatctgcggtctctgctgaatctgcatttgatgaaactgatgaacgggtgggacttttcaatctgaagctgagtcctgaattagttgaggccctcgtctgcacccaggattggatcaaatcttcagaaataatttctgacgaagttggtggaaatataaatatgcctgcctagtgcacagcaagctccctcggccgtttcattggttcaataaaaaaatgaagagccctttagaccttctcagtataatgcgtgacggagtctaattggcaatgcttgttttgttgtgctattcagcgtgcaaaatatgaacaatattagtcttttattaagtcaattttgcagtacatggctgaaatatggaatgtgtactatgtgaatggctgaaatatattaaaaaaaacttcaaaacccaataattgtttttgctgacggatcagatttgaggtgagatgtgccatatatatttatctttgaagaacgtaataa

SEQ ID NO: 13626 - DNA, 1172 bp, Zea Mays
ctctcccgtgctctcctgccctctgctcatgctcaccatcgccgccgcaccgccattgctcgtggccaagtgcctttgaagcttctctacccacgctaaggctactgtggtggagcccaaagattgttgctgcttctccgcatcttccccgactcggtccagccctacagcatcgcttcgacctcactggagccccaccggccgtcgttcctcattgtcagccgtccccaccgcctcagccccccttgttgcctaggagtccacaccgccaccgctccttgggagtccacaccgccgttcgagaagcccggagtcatggtcaagaaggtcctcgtggagtcgtagcccaaggggcagggcgccaccgtcctcgcggagtcgaagcccgaggggtagggcgccaccgtctttcctcattctccaccaggaaaattttacctcttgactctagatatccaaaccataagggttatctagctccatacaaaggtgtgaaataccatttgccagagtttagagcgggaccacgggcaagtggaagaaaagaggtattcaaccaattacactcctctcttcgtaatcatatcgagcgtttcgtcggtgttttgaagatgaaatggagaattttactagatttaccaaactatccaatgtcgaagcagtcaaaaataatacatgcatgtatggctctacataatttctttcgagacagcaaactggccgacgaagagtttgatcggtgcgatcgagatgagaactatatgacaattcatccaacacaacaagatagtacaagtcaattgggagatgatgagggagaggtcgacatgaataatattcaagatcaaattgcaaatgcattgtttgctaggagaatgtaattttatttatagatactttcttgtgcataaataagatgtacgaactgacagacttctatttttgtatcttcaaaatatttatatgaatcgatagaatgacatacctacaaaaaataaatcaaataaaaaacaagggcattgttgactttgtgtgttaggtaacaataatctgcatttgtataatccagactaccaaacagatatatacagattataatctagacaattataatctggattatataatctagattataatctagattatataatctataatatgaaacaaac

SEQ ID NO: 13627 - DNA, 1610 bp, Zea Mays
ctcggcgctcggagctccgtccctggcgcgcgcactgctccctccctggtgcgcgcgcgttcttccctgttgcgctcggctgttggccatctctgccatggcgctttgtttcctccagtcgagcttccagcgctgcagcccttccccaattcctctctgctcgcagagctccctttgcctccttcccatggcgctcgtccctacctgctcggcctccagctctggctcgccggcgatcctccgtgtgcccagccgtgttcgcacggacctctgctccttcatctcgcgcgcttgcttctctgtgcccacgcacaaagctccctgcgtgccgcggctcgatcccttcatcccgcaagcgctctgccactccctcagcccgtcgcgccttgccggttctttgctcgaccatggaagtcacggttcccagctcctctgcccggccgccgtcatgttccctgcacgcgtcgagctctcgcgccgaatcctttttctagcttgccgcgacgcccggcgtcctctttgctcacccgcgtcggctactcgctggtgctccaactcgtcagcggtcgttgtcctatccgcgtcagcacgcgaccgtggtagtgttcgtcgagttcgccaacgctctgttgccgattcgattgtcgtcgctgttgtgtgcttcgctgcgtgctcgccgagtgttatcggttgtacctcaacactcgtgcttgtcgctggcttgcgctaacgctcatgcgcctgctcgttgtcactgcgtcgcactcgctcttcgtccatcgggcttcacgcgtgctcgcgttagtcgtcgagctgttgaacccgtcctcccttgcacgtgacttcgtcatcgccagagccctcactggattcgtgtcctcgccagctcgctctagacactatctcgtcgtcgttccatgcgtcatcaagaaatcccaagaatcaggtgaagacgaagctagtagcgtgatattcaccaagtgctcgacaaaagctcgaacaagccgttgatcgtcatcctcgtctacgccaagcccccaagctgtgaagacactctggtcttggccacgcgtcaccagctcgaccaaaaaggaatcccacaggtatttggtcaagaatggaaacggtatgcctcgctcgccagacgtgtgcgatcaatgacgtcaaccggaaaccgtcgtcgtgcttgcgacaaacgcgtcgaattagtgagggcaagtaaatttgttattcgtgttagtggattggtggatggtttgactaggtataatatttattagattgcctgagtcgctttggtaatttggtcgatgtcgtaggttgaaagaggtctgagtgtttgcgggactgtaggtgctaaaaatggaaagttttattaatatatatgatacacaggttaaccggtaaattagtttagaaagttaatgaaagttcttctatcaaattttataagtgttaggtgtccaagaattttgaagttcaagttataagtcgtttagtgtgctctctaaactaggtataatattctatgtgttggtcgatttcatgatttgaatggatgttgattgctactttggatatttaggatcaagtaacatcgatatatctgt

SEQ ID NO: 13628 - DNA, 2625 bp, Zea Mays
ttcatcctttttagtgtagattatctatcttgttctatttatactcgtgctcatacatgtgcatcgtgcatcccatgaggtacgttaattgatcgcgcgatgcggaagacgagccaagtcgaccccaagtgtggactactccgcatggtgatgctgatggacgaacctgcctgatcaagtgttaagacaaggatgatcgtcgagtgttcatcgtctaacaacactaacctagtgttattcaggcaagccccggtgcatttgccacctctttgatgttttaaaatctttatcaccttgtttgatgcattaggtgataggagttgtgtgctaaaccgttgttgcatttcctttcttgaaaattgattacccttccttgataccctttttgaaaagaattttatgatgcttagccttgctttagcaaacaaaaatgttttgttttaaaacaaaagtgatgcttcagtgggtgggaatgttttcaaaaataaaacttgatggtggatccgtcaaaggccttgatgggtttaacatcggaaaagatgtacctctgccaggtaccagactttgggttgaaaataataaagctgagaccaggcggttgacttgcacgagaagggagtctcggtgtagtgtctccgtctgagtcgattaaggatcttgtcgatgtaggcttgctgatcgaggaccctttaactggtcacatgcctcatcatggataagctttgcctcgggcagactaataccagaataagataacacccaatgtgagtggagagatggcgagagtagcgtgtaccctccgtggcaagaggctggacggtggtgtatttgtgctctcggttggcgtgaacctaatctggtcttaagaaccccggtggcgagttgacatatgcaagggttaagtgttacatatgtcgtgtgattgtagatcctcagctgagtataattgattcggatcgccgtaacttcgtggacatgaagacttggtcactgccctacacgtagcattctagtgaataagaagggttaataagaaattcgcttgtatatgtcaagtgcttgaactagggtagaaagaactctagatgcaggtaactttacttaacctgacaaataaaaatggattttaaagatccactcatagtaagcttttctgcaaaacagagtctttgattcttgataagccataccttgaatccctctagccagcatacccttgagagtcttttctttagtcgggtaagtcttgctgagtaattccatactcagagttttattccctgttgtttttcaggttatagttttgtgctgctgatgatggtgttaagtgtcggtgggctcgaccttcttataagtctaagtaactcttttatacttctcattgaggatggtcacttgagctagcatatatttcaaacttatacttttgtaatcactctgataaatataatgtaaaaaatatgtaacttgtaaaatttggtaataagatttccgctgcaaaaatgttggtgtgtgatttgtgttacttaatcttatggtcctggttgtaagtggtttatccgaggtccttgggacactcggatagatcctgttaagttatctggtgcacatgcatagccatctgaggtctttgagacaagggcaggtgcatgtgggcccaataacttgggaggttctgccacaccgcctttggtgcccgtgggaagaaaaggctgaatagagtatttaatgttattggttttttttatcttgattactactttccggcacgaaaataaggaacgaaaaggaaaattgcattgacgacctcttatgtcgcgccgaagccgaagagaacaaaagttataactcactggccgaagtcatatttttagaaagggctgctatactgcctgctgcaggggtttcaaagacagaggctgttgaagctgccgaagataccccctcagcttcgtagatgatcaaaacaccccctgcagcagccgaagttcccactattcaaatggagaaattaaaaacagaaagttccaaggccgagaagcagccgaagccgtagagttctccggtggggcaagggctgtcaagaataacatctgctttagtagagacacccaagaaagggagaaggatggccagcattctaggcgttgttttgaggccttcgaaaatggctactccttttcctacaaggatttccaaagacaaacctggagagttggaaaaagctatcgacgtaagtgttgctcctgattgcactaaggctggaccttcggaaataaggtcaacagagcaaataaacgagagcctgtcagagaaaatttcactgtcgatacccaaagcggtgtcgaccagagatcttgaattcatcattcgacatgcttcgaaaaaacaactgacacataagcaaattgttgaagctcagcattacgctaaggatctaaattatcctcaatattggcttcttaaacgaacgtctataaagttcgtgatttacactagcctaagagaacgcctgtggatctcaagaagacgcctgtaaaatgtgtgattttctggtctttcacatcggcggaaactagaaacacgagtatatcggaggagattgaaggagctaaaatcaactca

SEQ ID NO: 13629 - DNA, 1258 bp, Zea Mays
ggcgggtgccgccgccactgcccactgctcactcagccgtccgcccagccctatctcttgaacgcacctcatcttctccatcccctccccatcttcctctagcgccagccaccagggaggttcgagctcgccccctccgtgccctccctgctcgctgccctccagctcgccagtcatgctcagctctgctccatcttcctgcgccgcccaagtccagtcaggaacttccttgtgtcaatctgccactacccattgctaccagtgctgtttttattaccatgctggtcactgcttccatgtcttcacaggccttcttaagctcgtcgagttctgatctgagcatgccgttgacgacggtcagttctcgctcatcctgccagaagacagcacatgacaaagatgctgagaggacatgctatatatttacaggagttggagatgcaaatgctttttgttagtgacgattgccactgtaaattcccttatgtaaaagatagccataccatcatcgacaaagtgctgccatgatgggaatgcgtcgcagcatttatttcaccctgtccagaggtctctgctttaactggagaatcagtccaaagatgaggaagacaggagtaacattcctacagttactattcagatattgatcgaaccatgagattcttacccccaggtagagtttttttagaaagaggatatgtgctggcatgggtgtacaaatcaatggaagctaactagctagaaattcattttgagaaaggaagttggagtgtgctttgaagttgtgcgcaaggtttggcgtgtaaatgataaagacaaggttcaactctcaccctctgaccaatccaaattttacactggcgattgctacatatttcagtatacttatcctggagatgataaggaggaatgtcttattggaacctggtttgggaaaaagagtattgaggaggataggctaatagcagtttcacttgcaagcaagatggttgaatctgctaagtttcaggctgtccaggcgcgcttttatgaggggaaagaaccgattcaattctttgtgattatcaatcagtgcggaagtgatgtcgttgtggtgcttttgaacctattattagaatgcatgagtcaaactcgccttcagtctagtggcgttgtactcccatttcaacaaactgtaaatgatctagttgtgaatgatattataattgtgatgcttttgtgaatatataattgtggtgcttttgtgtttatgtgatgg

SEQ ID NO: 13630 - DNA, 983 bp, Zea Mays
gccatctcctccctcgcgcgtgttataacagaattccgcgcaaggtcagggaaagatccctattccgctggaacccacgcatgtaggacctcctcctttgccttgcagcaagctctacgcgtgccgtaaccacctccgtcaggagcgccttgggtggttacaagtttgtggcctccacttgcttcgtatagcaccatagtcaccccattgctataagccacgggctgacaccttgaataccccaccgaagacggagagaaagaggagaaagaggtagagagagagaggacgccagagggtgccaatcgatcgggcagcaccattggagctcgagcagttgctcgccgaggcatagctccaccgtggagccaccatgaaccctggtcgactctccagatccgatccctaactttggtaagccccttggcacattcgcctcattcgtaggatcgtgtggcaccgattggattagagattagggattggggtgccagctccaccaacttcggcgaacccgccgccgtggggagggcctatgcgccgtcgttcggccgcctgggttgtgggagcatgtctaaccgctaatctggccaccaacagtcaggattggggccccgtactggttcggcccagctcatcttggtccttgatcatcgggtcagtggacgaagtctgatagcgatgttttaaaatcctgaccagagattttagatccaatggctcgtagtgcgtaccggttcaattaagtaaggaatagatctaagagctcgggtcgtgatcggacggtcgaccttaccccgtaccccttcgtggcgccaattttacggatgagccccttggcttattcgaaaacaacccgtagtccaccctgaagaaagtctgagtctgtgggacatttgcgatattaacctcggactttttagtatttgttgcgctgtccagagctcgggaaatcaaataaataaattcagaaattgattttt

SEQ ID NO: 13631 - DNA, 760 bp, Zea Mays
gccatctcctccctcgcgcgtgttataacagaattccgcgcaaggtcagggaaagatccctattccgctggaacccacgcatgtaggacctcctcctttgccttgcagcaagctctacgcgtgccgtaaccacctccgtcaggagcgccttgggtggttacaagtttgtggcctccacttgcttcgtatagcaccatagtcaccccattgctataagccacgggctgacaccttgaataccccaccgaagacggagagaaagaggagaaagaggtagagagagagaggacgccagagggtgccaatcgatcgggcagcaccattggagctcgagcagttgctcgccgaggcatagctccaccgtggagccaccatgaaccctggtcgactctccagatccgatccctaactttggtcaagaacaggtaccacaggatgaggcgcatggaggatgctgtgatgtgttcgtgagaggtctaggttgtcgtctcccagtcaactttgagttgctggattgttgtctccttatgatgtatttatttatttattttgtacagaactcctattatatagtaaagttgtaacattcgtttttgtaccatgattcatcatatgtgtgagacttggtttcagcacacctagtgtttatgttcgcgcccgggtcttggtgcccccgaaacccaggtgtgacataaagtgtgcaacctctgcagagtgttagaaactggtatatcagtcgagctcatggttaagagcggcc

SEQ ID NO: 13632 - DNA, 898 bp, Zea Mays
cccaggttgatttgctgcgatggtggccatacaggggattcctgcattgctgttcctagaaaactgtagcgtgttttctgaagctagtggaactttgtaaaagcctcgtagtggatccctagccattcaccttggaagtgtctaagggccttgcagaccctgacgacatggaatacacgacttgtgggtacagggtacaacctctgcaaagtgtaaaactaatatactagccgtgctcatggtcatgagcagctcagtactctcgcatgattaaattatggaactaaattcaatttgtcatttgcattgcatgggatttattattaattttgttctattattattatggtttggtatttacttacatttagtaagtgctaataaaatttgaccaacttattaaaagcaatgctcagctttaacccctattattgatctggcttacacttcacatgaactcccacctttggtgaattcatgcacattattccccacaacttgttgagagatgaacatatgtgagctcacccttgctgtctcacacccccacaggtcaagaacaggtaccacaggatgaggcgcatggaggatgctgtgatgtgttcgtgagaggtctaggttgtcgtctcccagtcaactttgagttgctggattgttgtctccttatgatgtatttatttatttattttgtacagaactcctattatatagtaaagttgtaacattcgtttttgtaccatgattcatcatatgtgtgagacttggtttcagcacacctagtgtttatgttcgcgcccgggtcttggtgcccccgaaacccaggtgtgacataaagtgtgcaacctctgcagagtgttagaaactggtatatcagtcgagctcatggttaagagcggcc

SEQ ID NO: 13633 - DNA, 3647 bp, Zea Mays
gtcgctatcgctctcgagtggtatgtatgaacctgctgacagggagacgacaatcagatgcgcgaaggaagagaacacaacgcacgccgctgctaagaacgaacgagggagcgagcgagatggatatggcaggccgcagcaggtgcaggtgcagcagccatggacgactcctctggctgcttctcgcgtgctcgtgggtggcagccgcgagaggccagcaaacagcacggactgatccagccgaagcggcggcactgagcacgatcctggggcgatgggggctgaaggcgtcgccggggtggaacatcagcggcgagctctgcagcggcgtcgccgtcgacgacaccgacgtcgacaacagccccaccatcaacccgagcatcaagtgcgactgctcctacgacgacaacaccgtttgtcacatcaccaaactgagagtgtatggcttgaatgttgtcggccagataccagccgagctggagaacctcacctatctcagtaacctgaacctgatgcagaattatttgacaggtcccgtgccttcattcatcgggaaatttcccatgcagtatttatctctggctatcaatccgctatctggaacacttccaaaggaacttgggaaccttactgatcttatctcactgggcattagcttgaacaactttactggtgaacttccgcctgaactgggcaacttgtccaaactggagcaaatatattttgacagctctggcttcagtggtccattcccttcaacattctcgaagcttaagaacttgaagatcctctgggcatcggacaacgacttcacaggaaaaatacctgatttcattgggaacctgactcagttggaagttctgagatttcaaggaaattcttttgaaggcccaatcccaaaaagtctgtccaatctaaccaaattgacaaccttacggatcggtgatgttgtgaatgggagctcttcattgtcctttatcagtaacttgacatctttggatgtcctgatattaagaaattgcaggatatctgatactcttgcaacagtaaatttttctaatctagctggattgaccttattggacttgagctttaacaatctcacaggccaaattccacagtccatactgaacttggacaaccttggattcttgtttctcggaaataacagcctttctggaagcctgcctgatattaaaagcccttcactaaacaatttagatttttcttacaaccagctctctggtagctttccttcttgggctacccagaataatttgcaattgaacttggtggccaacaacttcattcttggtagcagcaacaacagcattctgccttcaggcctaaactgtctccaacaagatattccttgtttccgtggctctccggaatattcctccattgccgtagactgtggaagtaacaaatcatttaggggcttagataatactttttatgaaatggatcctacaaatattggagctgcatcatattatgttactggtcaaacaagatggggtgttagcaatgttggaaaatttaatgaggccccaaatggaagttatacaatagatagttccgagcagtttcagaatgcactggattcacaactgttccaaacagcaaggatgtcaccatcatcgctacggtactatggcattggacttgagaatggaaattatactgttgagcttcagtttgcagagtttgcttatccagaatcacccacctggcaaagcactggaaggagagtttttgacatatacatccagggtggtctgaaagaaaagaatttcgacataaggaagacggctggtggaaaatcatatgttgcagtatataagaaatacaatgcaactgtgtccaaaaacttccttgagatccatctcttctgggcaggcaagggcacttgttgcattccaactcaagggtattatggacccatgatctcagcattgagtgtgacaccaaattttactcctactgtgcgaaatggtgttcccaaaaagaaaagcaaagcaggggcaattgttggaatagtaattggtgcttctgtcttaggactagccgccttagctggaatctttatgctggtacagaagagaagaagagcagcacagcagcaagaagagctttacaacatggtgggaaggccaaacatcttcagtaatgctgaactaaagttagctacagataatttcagttctcaaaatattcttggagaaggcggatatggaccagtttataagggtaagctacctgatgagagggtaatagctgtgaagcaactttcccaaacatcacatcaggggaaaagccagtttgtgacagaagtggccacaatttctgctgtgcagcaccgcaatctagtgaagctatatggttgctgcattgacagtagcacccccctgctggtctacgagtaccatgagaacggaagccttgatcgagcactctttggtgacagtggtacgatccttgactggccaactcgcttcgagatcattttaggtattgcaagaggcctaacctatcttcatgaggagtccagcgtgcgcatcgtgcatagggacatcaaggccagcaatgttctacttgacaccgacctcacgcccaagatttccgatttcgggcttgccaagctctttgatgagaagaagactcatgtcagcactaaaatcgcagtggctacctggcgcctgagtatgcaatgagaggccatctgactgaaaaggccgacgtcttcgccttcggggtattggcaatggagactgtcgcaggtcgaccaaacactgacaattccttggaggaacacaggatctatctctttgagtgggcctgggagctgtacgagagggaccaagcacttggcatcctggacgcaaggatcgaagaatccgacggtgaagaggcagtcatcagagtcatcaatgttgcgctcctctgcacgcagggttcgcctcaccagcggccaccgatgtcgcgtgtagtgaagatgctcaccggagacatcgaggtgcctgaggtggtgaccaagccaagctacatcactgagtggcagcgcaggggtgggaacagcagctatgttaccagcggctactctggcgacacgaccggggagttcagcgtgcagagggagacgactgcgcctctcaccccgtcgccggcgatgactggagtcatcgacgacgggcggtgatttgatcgcaggctgatgcatgctgggtttggtttgatctcaagggaaaatctttgaaccatagttgataaagcgcggtgcgcggagaataagagtcagctttacatgctacttggctgggttaatgatagatatcatataacataacgtaatgtaatgtaatatgctacttagctaggttagtgatagatacgatatgatatgccatcacagccttggcgttcaccgcctctccacagtggcggatctaggttttttatacaggatgtaccgtaataaattttttatatgcaactgtatatacagttttatagtagatttgataaaaagtttgataaatagatataatgtttagcaatcaacagttaagtacgaaagttgcacacattagaatgcaaataattcaaacatattataaaatagaaaaaaattgtacaaagtaaaa

SEQ ID NO: 13634 - DNA, 2072 bp, Zea Mays
ctgatatttgccatcagcaagaaacaggtttgtaaaattgccatcagactcacatttcatagacctagctggacccataattcatacacacaatggtaattataataagaagacaacattatgagtggcaaaaatccaattatctccgtatttgcaatctgaagcaccctgttcgcaaaacctctcctgctcctgccgccgccgccatggagagtgcgccgcaaacccccaccatggcggccgccggcgatgtccttcgcgtggccgacctcccgggacgaggtcgcggtctcgtggccgcccgcaacgtccgcgagggtgaggtgctcctctccgagcctcccgtcctcctctacccgtcgaccctctcctccctccgctcatactgctccgcctgcttccgctccctcccccccgccgccacgattccctgcgtttcctgccgcgccgctgccttctgctccccggcctgcgccgccgcttcgcacccgcacctcctctgtgccgcgctctcccacggcggcggcgctggcctcgccgccgccgctcccaccgaggcgatccaagagccgctcctcttccttctctccgcctactccctcccggagtcaaccatgcgctccatgctctctctctcctcggcgccgcccccgcccccgggcgcgcaggacgccgcggggctccatgctgctgtggcagccctagcgccgccgcacatgcttccccagggattgtcgccagacctaacggcggctctcctcgccaaggaccggggcaacagcttcgccatcatggagccgtaccgacacgggatgtcgctcgagctcctgaaggcgcgggcctacgcagtctacccccgtgcttcgctgttcaaccatgactgcctgcccaatgcgtgccatttcgattaccccgacaggcctgggccagggaacactgacattgtggtgcgtgcactccatgacatacccgaggggagggaggtctgcatcagctactttgcggctaattggaggtatgctgataggcagcgcaggctgctggaggattatgggttccggtgcgagtgtgatcgctgtcaggtggagagtcagtggaaggatgatgatgataacaatggagatgatggggatgacaccatggaagaggagggtgaggatgatgttggagatagaggtgatgatgggattgaggaggaagagggggatggtgctaccaatggcggtgatgatgatttcccacatgcctacttctttgtcaggtacttatgtgacaatgagggttgttggggtatgcttgctccattgccaccctcaccaaacggcgacctgtcccatgtgtttgaatgcaatctctgtgggaagctgaggaaggaagaggatgtcattcctgatgagggcacttctggcatggtccattagtttgatgaaaacatactgatccgtgtgctgcttcttttagtggagtatgaacttacgacatgagcctttcaatcaaaggggagaaagttggaagatgatgtctagccatgtaaagagaatgagaattggccaatgtccataactcttccaagatttgagccagagggcagggggtgggggtggagttaaagagttcattgctggcaaaccatttagccttaggggatgatcattgctgctaatctccaccttaatttagtagtgttcatgttaattaggctacaaatcctgtggcgaaggtctaacacaagcttggataagtaagagaagtgagtgtcaaaatggcacattatttcatttttagtttcatggagatacccagtttgagcagtatctaggtacgaggagttacaaatttgtttatgttatgtattgtgctcttgcgtcatactgataagagaaccgtgatgacaaaatccacctgttttggtgtttaccttgagccttgtaaaggttttcattaacatttcatcatgcttcacaatcagatgtgtttcattttcaaggaaaatgactacattacatattttacatgattgtgaactgaatcagaaccgaatgtttgtgtcactgattttctgatgtgcaaac
